United States Patent Application Publication US 2025/0057892 A1 - sequence listing, part 3

SEQ ID NO: 2160 - DNA, 4960 bp, Toxoplasma gondii
  source 1..4960: mol_type = genomic DNA
tgttttggcaaggagctcgtgagttgaccctcaaagctatgcgtgcccgcttttagttcctgcgtcggtgggtggcagcttcgtagtatataagatgcatgcgtgtatagactatacccttgcaacactaaatgttttgaaaagggtaccctctaccgcgcaccgctccagaacagtccgcggcgcggtgctctggttgagaatgcgtgttgggcagcgttacatcaaaggtgcatacttatctatgaatccttgcattctgcagtgtagatatcacaactgggactatgtgctgaagcgatccgcaggcgccgagcatcgatgtgatatctggcgacacgcatcgtaagcggtgcgcatctttctgcgttgtcacttatttacaccaggcagtagctgcctttgcacgtagtcagcatgttgcatctcgtggcagagaacttgctgcattcctcggtgccaaccttgtccaaacactgataatgacctgagctactgagtgaattgggaaatccagctgaacagcggagcaaacgtccgatggactttgtggcaacatgggcactagcatccgttagacgagtaccaacaaacgacacaggaggtttatggtaaaaggcgtaacttcgtacatgcagccttgatccatctgggaactcatcgagtgcagtatcgcgaagtggcggtctgatgcagaagcgaactccatcaacagacacaacgtcgctatagcaaacaagaccccaaaatcggcgtcacgtgatttgcaaggaacccggaaattgtagtcctgcgatatttccagaacacgggtcgaacagagggtcgctatgccacccgtttcaaggcacgaggcaattccgccgtcgctgggggatcgctcgcattgcatgctcgtgtatttccgctgcgcctcgcagagcaggtatgtgggagcttttttgttatgtacgaggtagacgtatgctccgatagttgtagggtcttcaccattttttgcggagatgcagggaaataattgcactacgtgatacgcatttcagtgtaattccattgtgaaagtgacgcgagaagttttgttcattgaagcatcaggaatcagaaaaccttgaatttacattgcgattggggcgcgacatgacgagcaaacggctagtgaacaccagagtcgtcgtagcatttttttccagtttggaggtggggggcccaaaacagcgcgtagtttaaggtggagtgaacttatatgtctgcttcgatttgtcctgtgaagcctattcataaaaccgaaaccgcagctggcaagagctatttttcacgaggtgctcgcgaagtccactggggccctcgtcccacgccaaacaagcgacgagctcgttccgtaaagttgcttttggtgtgttttaccctcgaggcacaaagtgtttcctgaactgcttttgccgtgacattgttcaaaaggacggacaaacacccagtcaacgcgcacttgaacgaaaatgtgtcatcttcctagaaaacatagggacgacaagatcggcttcataccgagggaagaccttgaaactacaaggacccaggatccaagcgagcaaagacccgcgtgaatgagttgattaagattcatagagaccacgcaaaccacattctaccgttggcttctctcttgaccctcgtgcaacatttccctggtgtgttcaggggatatcaggtgacattcagacacgaatgcgggtctttacttggaaatgaaacgtattcgtgaaccaatgtttgcgggttcagatgatataaggcaacggtgtagtgatattggctccaaggacgggtgtgggttgttttctgtctctggaatgcaaatgcatgcttaaatgctatagaacgttgaggccggtcgcttcctcagcaccctcgaatgatgactgaagagaaacgcaacaaagccatctactgctagaacggggaaaagtcaatcctgaaatccaggttgcgtgtgtggttatgtgcaaactgtgttcagtatacgtctcggtgtctgattccatacgtacacagaacgcagtgatcaccaatctgttctctttacgatggacatacttagaagcctttttctgtcatttggaagataaacagttacgctctctgcgtcgttcgaggcagctctcacacggtttgtgtgacggaacaaaagtgtagtccttcttttgttcgcccgtgaaacaaagcgactttcccgctcttctcttcttgccatgaccgacttggcatccagttgactatcttctttgccggaggctatagaagcattttgtacaaaccatgaagtatgcttgttgccgctgtttagttacctcgcaagaccatcaccgatttgtccatgcaactcctacggagtccctgagggatgcgtaacatgccctggcctttgagggatctaccctgcagaagcacggccaaacctcatcggcagtctgtatcgccaaccctattttgcccattctggatctgcagggggtactatccgaggctgttagagaacatgtgttttccaaagagctgaaaaatgggaactgaagcagaagactatctgggtgctcacagacggcacgccctctacgtcaccccagagagcccctccgccgacctctggagcactgtgtttggatgcattcaagacaatgattttgaaggtttcgtgaaggtaaaaaaataatcaacagggccttcttcaccggaagagaacggtctttccaacaagaatgtcggcaactgtttcacaggaaccacatgggtgggcgcagaccctctgtggcggccagccctctggaagaagtctagctgacgaaaaaccgctttttaaaacaggatggtgttgtggcgtgtcggaccacgcccccaaaagtctggcacaagcagaacgcatagtccttccaattttctgtgtctgtgtctagttttgggaagttaccacaagatgacatgaatcctggcttcccgaaacaaggtactctgattcttcaagaaaaagcaatatttcgacatcgatatagaccagggtctcgaattgaatagtttccttcttccgaataccgttttcacttcttagcctttgccaaaaatccaagcaaatatggggtgtggtgcgttgtgtgtgggtgtgtaatattttgtagtccctggagcttgctatagcagcggaagacgataacactgcaaagcaacctaactccgagagatcgtccgacacagaccagccagaacctccgcgaccagctgaagtcgagatctttggatgccagtcgatcctcgcgcatgctgcagccttttccgagaaatgtctcgaatatcttgtcgagacgtgctgtagcgacgttaatatacggagctcaggttagaagtccgttgatgttagatgtcccttgagacgatcgttaaataagacaaggaaaccttttatacgctcatacgcgtgacaacagtaatacatacattacgcctagaatataaccgatgtggaatttctggggtgctacagtcattcccaaccttaatgtcggaggatattgaaattgaacacttttagctgtgaaagtttgtccgagtgttcgcatgtcatttatctgaaacttttaaaaatagaactatatttgcatatcccccccatcgaaacggttcgacggttagaccaagggcatctgacccatagttctgtctggtgtcccggcatttgttctcgaaaactatcatgcgttctcatgtgttggcatctcactgttctctcctattcgcctgaggacccgcaaaccacagctgtgtcgcaaagaagggtcaccggctgacgtttctcatgcacaacagaaggaccatgtttgcatttccacttgtctcggctgaatgaaatatataaagcacgtaaacccacgacgcactggcctgcgggcctctcgatagaacatgagtttttcaaagaaggtccagattgtcccatttcttatccaccactgctgcagccttctcagtgcagcctatcctattagatatacttctcgatttgcgtactgtctaaaacctctgtgaagtgtctgcttcactcacaaattttacccaaaaatgccgcgattctttgcctaggcacacaagaccgaactgcactttttaatgcgcgaggaagatgcattgcgtatctgctctctcgaggagcggatcagtatgctcgaaatgtcgaaggcgacacagccttgacctccgccatcaagcgacatgattacgaccaggtccgcattctgaaaacctttgtctctcaacattcttttgagtgaaaactgacgagttcaaagggacctccctggccccctgatgcattcacatggactgtgttgtgcgaattgttggacgggaaaacaacaaagttttcacagcgattcgcacgccgattgcactacgtagattacgaaagaaatcggaaatccctccttagctaagctgctgtcaagcacagccggcacgcagcgtgtggtagtaacgaacctgatcccctgtaacactcaggcttctgcaagaggcggcctctgtctgggttgcacagggctcgccggattagtttgagagcattggacttttgagttctacattgtggcgcgtcgaaaaggaaaaaccgtctgttgccttcacttgtgccagagggctttacccaaaacagacactgcaagtagtcctcgaataaaatgtcggctctcattcctcgaaaggcaggtgctgcctctcgtctacgtcattcagatggcccagggaggggaccatcggtcctcttctgccggtacatggctgtatcacggacatagttctgcgctacaaagcacggatgtgcacactacagagctggtttacgtggaggcaattgtgttattccttattttccttcttccgaactgttcataggcagtcgacttccttcagttcggca

SEQ ID NO: 2161 - DNA, 2190 bp, Toxoplasma gondii
  source 1..2190: mol_type = genomic DNA
taggaatcgctcatcttggcagtgctgatggtctttccacctcttttgcccttgcaaagtccggcgccggccttcacagtgcccttgcctggagcggcggaggcgcccttggagatcgccggctggggaggccgaacggccgacggagctcccgcgctgagtcgcggagcagccgctcccgagactctcttcatggcgggcaagagaaaaatgaggaggaaaatacaagagataaagaaaaaaagagaaagaaaaaagagaaagaaaaaagcgaaagaagaaaaagcagaaaaaagagataactggggggaaaagaggagagctgtgggaagagagagagaaagacgaacaggcagagagaggaagacgaacagacagagagaggaagacgaacagacagagagaaggccctctgataagaaaggctcccctagacgaaaaacgacgtagaccgtcctccagagagacgttttgataagaaaacgtagggtggcactgccgcggcaaagaacgccgtaaaagacgagagagagtgaaacggaagacgaaggggaaacgaacaagaactcagcgagagtggagagagaatcgttttgaggcaaaggaacgacaagagacagacagcgaacgaacgagaacagccagagagctagcgccgaagagagagaaagcgaaaaggaccaagagagctggaagaagagacaagtcgcaggacggagaccagctgagaaagccgagcgcgcggaagtgacgcgtcagcgaggacgcgaaggcaattgcgaaggaagagccccgtaaacgtacagaggaaagcgaagacacggcagaggaagcgtgagaagcggatgagtgaaaaggcgaagctggagaagaagacgaagctggagaagaagacgaagtcgtgaggcgaaggcgagagccatatagaagagggggggaaggcgacgaaggctgtctacagaagctgcagaggtgagaaaagcgatgacgaaagggactccgaaaaaagagagaccccagacagttagcttccgacagacttccagtctctttcacttctcctcgccctctcgtcgcctccgtctttccctctcatcttctcttgcttctttctttcattctctgtctctcttcctctgtttctctcctcgttcttctccctctgcttctcagacttgttctcttctcgctcttcacggaagcttgtgtcgtctctctgtggcaccttggcgctgcgaaagtcgcgacacaaccgaggccgcgtttggagtcttgcggcggagattcacagtggaacaagcagagccgactcctctcgcggagaggcgagaaggcgacgaaaaaatctgaaattttgcccgcgtaaaaagaactgagcaccgttcctcgcctcagcgctccgccggcgcttgcttactcagcagcccagcgggagagcgagagaacaaggacgaacgcagctcaaagactgggacctttgagaaggagaaacgcaggaagaaagcctgacggagaggcgaaatgttctgcctttcacagggaccgctgatctctctttttccttcctttctttgtgtgcatgcgagcacctgcaccccgccggtttcgcctgtcgcgacagcagacacgcgccatggagagaaagtcttttgtctcgcttgcttccagtttctttctcgcctcttttttctcctcgcgcttctctcctggtctcgacaagtttttcgtttctcttcctctctgacggcactacgccgcctgcaggctctgtctccttcgcgggtgatcgtcttgcctcgcgcgtcgagcgccaacctcctttcttctcctacacgtttcgttgtcgttctgcacattcttctccccgtatccctctttccatctttccatctttccatctttccatcttcgtccaccgctctctgtttggtcctttccttctttcttttcttctttcttcccctctttctgtttttcctcttcctgtctgtgtctctttcgcgacctccgtccatgtatccttgcatcttgtacgcttattattggaggcgacagcacctgcgaagtcctttcttcagaggacgcagcgaacctcctctgaaactttgtgtcagcgctaagtctgagaagcagcgaaccgtggggaagacaaagcatttgctccgagaggcgcgagaccgaaacgcacca

SEQ ID NO: 2162 - DNA, 3885 bp, Toxoplasma gondii
  source 1..3885: mol_type = genomic DNA
ttgttttctcacatcagacacagaagctcagaaaagctcgaagaaacggcgcgttaaggcaatcaaggcccagcagcaattggaaatggcagagaaagatgcggacgaacgtgcgaaagcttggcaaaaattcaacaaacgcgtaagtagtcggcgaaaggaagtcacctttcaatcttgcgtcttcagaggacgccgtgcagaatcaggcggtattacatcgttgtctgcagtgtcaagagcgttgtacagagttgtgcgtgatcccctttcttgtctttagcaacaccgcattgcaggcaaaattgtaatgctgcatttctcgaaaagaagcagaacagctcgaggatgccggtttctagcgctgtagaaactgcgacaccgccgtcatcgtgttttgtggtgtgatgcaaatgctggattattcgtacatagtcgaaacagtcatgtggggcgcagggtcgcaaacaggaatgacatgtcattgggcttttttcgtcggtggtgctcgattgaagcggtgttgctgcggaaccacgcggtacttgtcacgtctgtattttgtagccggctgcaaagcatctcaaattctgtttatgagttgctgtttaggctgggtgtacagacgtgtgctgtgtgatggttcgccgtgagtggcagcggttcatttgatagttctgtttttgcgtgtctgtgcaggccatcaacaaacgtatggcggggtacatgtctggacgtggccacgaatcaatgttttctggccacgaagtgaagaccacagttagcatcagtgtcctgagttcgcagcgaactacggtgaattcgtttgttccccgccgcaaacatgatgtagatgaagaactgattactgatgactgatgcgtgtgcgttaatttcctcgtaaggtactgtgcacaaactgtaaccctcaaggctttgaaatttcatcatctttgcgagcaagcgagtagatcctctagtaccgtctctcatgtgctagagttacgcgtacatagacctgcaggagaaaagcattaccgtcttctgcgcaagacgctcgtgacgtctcttaagcgtaggtagtggcgttcacttctgagcatcttactggtgcaagacagattgcggtaaattactaaacgtgggcaacccacaggcagcataaaaaagcctaaactcatacatcaccctgaacaagtgacaactaatgcactgcgtacaccacgatccggtgactccgcgactacggagcatcttcagcgtgtttgttgaaaccgtcgtacaaaaacacatcactattccggtattataagtttctgctctttgaatctgctcgtagaaacttatttcgattggtctcctgcatatgatatgggtgggccgacgtggccggtttcctctcatcaacggtacgtctgtgcgccttgtgtgcgaatcaggccacggccttcggcatatttaactgtaatggatcaaagtcgcgtgcaacccgcctcgcacaatcactggtttgagtatgtgctcgacaaaaaaggtccttgcccttcatgttatcacgaggcacacctctacgcaccacaacgatcatcacgcaacctccctcggtatctgtccgacgagcgattacaccaacacattttcttccaacgtgcaacacgctctgacaatgacgtctgccgtctgccacaagggatacagacgacacgtccaaccgtgcctgtatcgatcgatacatgctccgctacacgcactaaatcctcacgctgagacaacaaagagccgagcaacacagtgccccttactcttcctcggcaacttcttcctcttccgcggttgcagactccttgctctcttcttgaatcgcgcgtctcctcctccttctcaacaatcgcagtagtgacacaacggccaccacagctgcagcaagtcccactgcagtcctcactggatgtccagtcaccgctgctcttcccctttcgaataacgatcggtcttcactttgtccgtgttgttgtacctgttgttgttcacccccccaagcaccttcggagtcatccccgcctgaccctgtgtcacgcgttgaaccggcaacgcccacaaaaattaaagccagcacgttcacgatcattaccgccacaacgacgcgttttacagacgccattttgttacttcacgaaaatcgcaataaaaaacagtgaaccatacacacagttagagtgaacacacgcgcgatgatatctgcaaaaaccaaaataaaattgactgacggtaggatcgagtgccgatcgacgtcaaccgtcagtgcgtctctgcacaaaccaaaccgacacggaacagcccacacgtctgattccacaacctggcaggacctttatccaaacgtgtctcgttgccaccccgtcccgcgctctggcacgcgtcgcgcgccgagggatctgaggtttctccgctaaccacctgagggagtcatgcgtcccaaatcctgtctcgatgattgctgcatggcgtactgtatcatcatttcggcacctttcttgccggaacaagcggatggtggcagcctgatcctgcttagttgtagtggcggcttaaggaaactggttccatcttgaagtactggctggataccttgtctcgtgttacatgtaacgtcgtttggtggcagggctgagagacagaaattccccttctatatagcagcatcagtttctcacagcttggaatttgttagcaacttgtacagttttttcaccagtccgtgaacagggaggcaaggccaggatttttcatgtaacatgtttgagtgcgtcccaaaacctggtgggggtgggaaagggggggttgcattgtttttttcatatgcgatgttgcggcagtcagcacgaatgccgcggtacatgcgcccaagactccgccacatagagttacaggctgtaaaattactggtgttcatcagacatagattgcatcactgaagtatgaagagtatgtaggggggcactttgcagcaactggcatttagttactttgaaacgtactttttattgcaacgtgtagagaaccagaaatttcggttagtgcggaaacggatggggttggcatgaacttctagagttctgtgtggtagattccggttcccaccagacgacgaaagcccgttggaggcatttgccgtcttttgcgatgtttcggacaccaggacgtggagttgagaccggtgtcgtgtggtacacagcgggaacaacaaatgccgtttggtggaagcctgtaatgtcgtgactacgtgcttccggcacgtcaggtggtggtgcacacaggaatgagatgaagggaacgtatcaacagagctctgaagcgaaagaacgaacgatctgtgtagctgatggcaacccgccgtttggggttgcactacagtggacagcagtgatgtctcatatagtcacttcgaagtaaggaaagagtaatgtgagtttttcctcaaagccgttgtatatgcttgcaccagtacacgataaggtcgaggaacatgaaaaatcgttgggtagtcggtcgaggcattctttcggagcaccggcgacgcgcaagagtatcagtgtggtacaagcgatagaggcaaaaacgtcacctcgaaaaagagaccgtttctgctgcacttgagcatggccccctggaagcgtttgttgccatgatgtcaactcaacgcttacgccgtctgtacacaggagctggcaccgttggcgccgcggctgctgaacaagagtttgaattcgatgtgttgcggatttactcacccacaaagtacaacgcctcagtacatttcgcggagaaccagctagatcaaagttcgacaagcatttcacaacttatctgatttcttccttgcta

SEQ ID NO: 2163 - DNA, 1467 bp, Toxoplasma gondii
  source 1..1467: mol_type = genomic DNA
ccaatccgatagttatgcctgttcacatgctcacccatgtatatacgcatatacaggtgactgtgtaactaagtcctcacgcactctctacacatatgcatgctgcgtacaatatatatatatatatatatacgttttcctctccactgtctcttcagtggagagtggagagaatgctggagtaacggttccctgaataccactttcggtgtgtgttctttatttgggtggaggacagttatgtttttcggcattttggggaagaactcggtgtcacacttacagcgtgtattgccactgggcaagagttccaatttctcaaactgtgcccatttaaatttgcaagcgataaacacctccacggacgcccacttgagtgatcgaccatcacaaacagctgcggccgcgtcgtgggcatcgtttcgtaccacactccgcggcacctggcacagtcctccttcaggcttttcctctctaaagtagtagaaaccgttgtcttctgcaagcagatctttcgcagaacaaggctcaccacggaccttttccgacaagacacacttcgctgcgtctagttccctccactcgccctttcagcaggaaatccatgtgcacagaacagcaacgaatttcggttgtcagcaactaggtcagacggtaccgtctgaggatagaaatcgataaaatcgggcacttgccagcatttcgctgctgtttgtggggtcccgtgcttgcttcccacaggtcgatggtccactcccacttgtcgatgcttgtgtcgtgacacgcgcagaacagaaagtttgatagtacttccgaaaacgcatcaacagcagttctttaaaggccgacgcatcgaagaagagccagcgcgtgtctaaagaagaaggagcagtggggaacccaatcggttttcgagttccgtcaacggtcacttccgcgcctgccggatgcctagtaaccatttctttgaaactacaactagacatggggggctttagcttttccgtgtacgaatgaaacttctaacacgcgtcaaaggcatttgcgcttgcctgacaaacatttggcttttctttgtttcacccatttgatagtggacagccctcactggcaccgcatgcctcgcagcttgtcgggggaccaaccattaccgtagattttccagttcacacgtgtcgcggcagtgactgcctgataccacaactgttgcggcttcgcattgctcgctgctttgattcctgtttctcacaacgcttgcaaactagacgggagaaagcgagcgcctccacagcttaggctgatctacggcgcaaatcgtcgatgagttatattgattttgtggtgagttactccattgttgagaaaaacaaaagatctccctatccgcattcgtgtccacgtccacgaaatgtacacaggaaagtatctagaggcgacacagttcgtttccaactttctgttccgata

SEQ ID NO: 2164 - DNA, 2260 bp, Toxoplasma gondii
  source 1..2260: mol_type = genomic DNA
tctcgccatcagtctctccgtgtctttcgcgacagttccgagagtctccgcaaggagctctgtggcctgtgcaaccatcgtgactcgggccgaaagctcctggacgccttgaacggggacgatgaggcagttctgcggatcggcgctcctcgacgaagcctttcgccacttggcaaggagggcggcgccctcgactggattctgcaccgcaaaggactgcagctggttctccaacagcgcgttcttgtgcgtcgctgcatgcgccgggtcgaactggtacaagaagttcaccatcgaccggttctggtcagacaagagcgtctctgtctgctgagtgcggcgactaatggcctctacgtactgctgctggtgaagcgggagagaggagagcgaagaggagggcgaagaggacagcgcggaggcagcggctagcgaggaagaagacgagaagaggccgacagatgcagaagacgcaggtgcctgggcagacgacgcggaagaaaacagactcccggccgtccccgaggaagagctgaggaatcccgtcgacgacggctgagtctgtggcttcaccccaaacagcgacatggttcagtcgtcacacagaggggaagaagaagaagaaagagcacctgcttctcacggagagagcaaggcgacagacgcggaaggaaaacgaagtggaagggaaggaacaaggggacaagccctcatctccccgtctgtcacctccctgagatagtacacacgagaaacagatgcacccgagtcctggtctgtagtttttcttgcggcagcgaagaaaatttcccctctaaaacggttcgtgcacttggcgagtttctcatcgaaacgtccacagtgacgacgtaaatacgtttgactttcgagtttaacagcagttttttgtttactctgcgtactccacctgcagaaggcttagcctcgagtcgacagctgttcagacgcaaactgcactctgggtgtttctgcacatgggtggacggacagctgtgctggcacaggtggatttgtcgagttcgaaaggaggcctgggaggcgtcccagaagggaggagccacaagacgccggaaaactgggggagaagccacacaaatgcgagcaaggtagaaaggaaagactcagaagagcggaacaagtggcaaatgaacgacggcgttccggggctgagaacgaaacccgctggagacaaggtggctcccctctgaggacgcagagctgtggacgagcagagccgagaaagggagaaaaagcagaaagaagaaagcatcaagttttttcggacggcgacctgtgtttcaccttgacaaagactgaagagaagggcacaggcttccacgagacgttatcatctcgagtgtgcatgcagagacggctgcttgggcatgtgaacgaaatgaatgctgtcaagagtgcagtgtggaacttcgagccagagttcatgatgtctttgaaaggaatcagtgaggcgttttccccgtcggaagagttttttcctggtcgcgagggagagacgccgccattccctgtttctcgttctctctacaaacaggtgtaacggttttgttcatctcctgcctgttctctgaaaccggcgcacagagtagcgcatctgggtgcccctttctgctcttctagtgaaaacgatatcgctttgttgcgtcttccttcacagatgctttcgtatcgccttcggttttctgaggcccgacttttctctcctctctcctgctcgcctccccatgtcttgagtacgccgtttttcgtcggtgtgctttcgagagtttggtttcgtggtgagcctttcagccggtttcgcttgagtttgtcgcgcattctcttgcctttttcaggtcttctgaatcgtctctctccccgtcctgttgccgggtgttggccgagcatccatcacgcgtaggcttcattctcccttgagacattctccgtttcgttttctctcccttcggcacacgtgtcatctgctcaccactttgaaaccagcctatttttccagcagaacagaaaaagaagacgaccttgacgtcttttctggctgcaaacgtcccgcgttttgcggggtcagttcccggcgcgtctgtgggtctcgcccgctggggctttgccttgccgaggcgcgtctgcttcttgctgaacttctttgcgtcaagttcttggtggacagtgtctcctaacctttttcctctccaaagtctcacaagcacatgcagggaaaaaaaca

SEQ ID NO: 2165 - DNA, 1754 bp, Toxoplasma gondii
  source 1..1754: mol_type = genomic DNA
tttctgcattttccgtacataccgctgtgtgcatttgtgagcaagatgctttgcgtcgctgcctgcgtgtttcccggtacactgcgccttatgcttgatcttgctcacacggttgagacagagtgtgacgcagtgtttgtgccaatgtgtaggtcgcctactagggtgacaacgcgcaggagttgaacatttgcatgtgcatgcggcagtctcgcctgactgctgtgtttatagcattttgtgcataggcctggccgtgcaaattcgtcgccttttcgtgttcatgtttggaaaaaacattccacatcaatgtgtgtgtgcatgcacgcttgtggctgtggtgaggcactcgcgtctgcatcggtctgggaactctgattgaacctgcgtgtgggtaaacggggaagtatgttcctaccttcgtgggcagatgcatgcgcagaaacaaacaccgaagattcagtgcgtaaatccgacaactacgggtctttcttccaggggtctctgtgctcccagtgggtgctttttcttgtggatttcgtttccgcgcttcgctcagccgacgcgtcggtctgtactcgctgtgtgcgctttctggcctcagacatcatattcatctgttacctctatcagcgttggatttacaaagtggacaagagccgcaccctgggggctgcccctgctccaaccgccgagcttcagcagttgcacagggacgacgatcttcagcagcctggttctgaggagaagaacgaagaagagacacgtgccaaggaagatggtaacgagagtccaacagcttccgcttcggcgctggctggtgcctcgaggtcgtccggcaagacgcccggtgccgcatgcaaacgcaactatagaccacaggaaacgccaacagacgtaatgtgaattcggggcaagaaagaaggaagaaaataaagacgagcgagcacgcggactcctcggttccctcgttcgagctagcgactgcgggagaaccacatctttggcccgagattcgaaacgcggaagtaactcgagtcgatgcctcgctagatggcgaccagaaaagaaaacgagtgaactcttgaaagcagcaccctgaggagacagccaggaaagaagggacaggaagaaactcgagagaagcggcaggagactgtcacagctcgtcgaccacacagctaaactgcccgccctctttcattaagtcccgtgtttgaacgacgtccgggagtgcctttttcttttcgtttcccgacgtagcagcgaacctagctgaatattccagtttcgctttgagttcataactccttcgttctctctcttccgcccgtcagttcccttccctggtgtcttcgtgacattttattaagttctatcgcgccactcggactttgttcctggcacccttttgtagctaggactccttgacgagtcagtcagattgacgaggtcggctagctaggactccttgacgcgtcagtcagattgacgaggccggctagctaggactccttgacgcgtcagtcagattgacgaggccggctagccacgctatgcacctcttgcatacaattgttgtagacagcatggtggtgtgcgagacactgcagtcaaatgcctcacccaacgccgcgtctcattcttccaaaaacctgtccgtgtcttcgacagattgatacagccgttgacaaagcaataccatattttacagttttgtactcaccccagtccagtttgtgtgaaagttgtga

SEQ ID NO: 2166 - DNA, 2215 bp, Toxoplasma gondii
  source 1..2215: mol_type = genomic DNA
ctttttctccaccctctaggcgacttgagctttcttcgcgctgcggggtacgtacactcatcatttcctctccggcgatgatccgcatggccgtcgactcgcctccaggaatgacaagcgcgtcgatctcctccaagtctgcaggcttcttcacctgcagacacagaaggcgaagcatcgacggcagcagatcacacagagaagcccagtcgacaaaaagcctgcctatgcagatgcatgtccatgcatttccattaaaacgcaagtgtgagaacatcagaataggcgtggtgaaacatacggaggaagcgaaagaccttgcggatgcccaggcatgcgtagtacgggaaacatcttcacataaacaagtagatagaaatgcgtctctgttgcgtctgtgcgttgcgaatacgtctggatttgggcagatcctgggccgaaactccacccttggcaccgcgactcctttttctatctcggtgtgagtcgagcgtctctgcatgcaacgcaagatgggcaaggagaaacgtttcggaaggcaggcgcgacgcgcgtttcagagcgagcagaggagagaacgaagaaaaggcccccaaagctcgatgtctcaccagagtgaggcgaagccttgtgcccaagttgaggcgcttgaacgactttatgtgatcgaagaaggcgccctggagcgcgaggacgccgagacaaactggacgttcttctcccatctttgccttcgtccaggaaaagatttcctctccacactcgcagggaaaccgtcgcacctgcagcctccaaaaggagcaaagcggagggcggaaaaaaaacgaaaaacagaaaagaaaaggaacaaacagaaaggacgaaaacagaagagcacagaggaggagtcgaggcggccacagagacgaagacgaagactcggtttttgagtagatggtgaattgaaggctggctggcgagagaagaaatgtcaagagtatctcaaaggcgaaggccagaaagtgagacaagaccgttcatctggccttggggcttggttcagcgagagacgcgcattgcctgatgaagaggctggtttgctttttcagttccctgttcaaggaaagatcgatctcgctcctctgtccgcgaaattcttgctctttcttttgtctttttgtgtgttttctttcctctttcctttcctcttcgtagaggggtctcctggcggatgtctctgcagggtcgccgcgcgccctcgcgctccgaggcgacctgtcagctttcctccacacgaaaaccgcggggaaaccttatttctcgagagcgaagagaaccttcttcttttgcaagaaagaactgacgagcagtggctgacgcgctgtctctgagctgtctccttttcggcgttttgtctcgttctgtcttctcgtttttgcgtagggtcacgaggcctgctgaagtctgtgcatgcactttcgcgtcgagcaaagtcgccctcctcacatagtcgcggcactcttttcgaagtttctcgatagacctcgtctttttccgtggaagggagaatctgagagcacaggagaagcgaagtctcgggcctgctttctgtcgacgcatcctttttcgtcttctttgtctctctcccctcgggtgtgtgcggcgaccgcaaacgagcacaggcttgcgcgtcgcagacagcgcgagcgcgagtgtgcagaatatcgttggtgctctggattttctgtttgcagtctttctcgtttcttgcttgcctttgaatcgcctgtagccgcggcgagttgcgagagcgtttgctctcttttccaacctttttttcgcttcttcagagcggggcaggcatgcgcttccacccccctggagggcgagctagacagagagcaggcgaaaaggagagacgccgacaccctgtagctggttttttaaagcggtgaagaaagctgaatttccgctcatttgactcttctccagaggcgcaaaatgcagacttcaaacggacgtttgactccacaccgagtgacgcggctcgtcgagaaggcttcggtttttccgagaggctcgagacagtgctgacgagcatctcggtctcggtacgccccccgcccaccaaaaccgcgagaaaaaaacgctggatcaagcaaacgcgcctctcaaaggctgaaccttacagtgtaacgagaggagaagaagagtagaagaaaagaggcacaagaga

SEQ ID NO: 2167 - DNA, 2736 bp, Toxoplasma gondii
  source 1..2736: mol_type = genomic DNA
tcttggagcagaacggcttggcactgtacgcccttgaatccatgttcggctcagctggggccctagggttcggaggtccgtgtggccaatggaagcagcaaggcgaacactctaaggaggaaggcgaagggccttgtaacgaggagccatgtgacaaagatggccggagtgtcgcgggcaaatgtgcgagggggaagtcaggagatacgggacaccaagaaaagagacaacagatactgaatcgaggtatgattacatgaatgtcgtcgcttgtagcaggtctctgttctgcgaaataaggaaaaaatcattaaggtagtgtagccagagtgccaggaacgcgcttagaacggtggtccccactaagtactccggtaccgacgccctaatcactcgcaccttgagcgttgttttccgtacctgttgactgtgacctcatctccatcattgacactgagggacaggaatgccacctggggtcaaacggcaacaaacagtaaggtctcaggcttgcattcccgtgcacgtatagcgtttcaactcagccgtgcaaaggggtctgtgcccaatgagtatcgtccctgtttgcttgcacattctggctgcttgattcaaccgtatgcttgctatgcaggtttctttgcagcgtgcggttttccggcagaaggtacgcaccctttcggagcctctcttctctctttcctgaagcctcggatgatgttgtcaggcccccctgtcgttacccagcccggtgaaggcgtggctgccagttgtcagtcgaattcccgttcccgcctgtctctgattcctcgcgactacgccatcatcaatattcccgtggaggtcgctctccatcctgtcgtttttcaaacggtgtgttccttggcagagacactgcgacgttttgaacggacgctcatgctaactgccaccacggctgcaactgcgttggcgcttggaatcgccttaccaaagattcttcagaatcgtgacggtggatggaatgttcaggcggccacagctgtggctgttctgctccttcctatgttcgttgcaatgcggtgtacctatgccgctgcccagtagagagccacagaagaaccagacttcaaagggcggctcttgaatgttagaaaatgtagcgtgtgcgtttacttttaaaacaaaatgagactctgttcagacagtatcgacacacgcgtccatatgcgtggagccgtttttaaacgctgatgcgtgtgttcgcctctggtgtagaaactacctagactgtgtaagaatggaaaaatatgaatccggggagaattggcgagctgtccgggaacattcgaatgcctggtgttgctcaagaaagtgtccttataaaaagaatgtccagtctatggtattcgtcgagaggctgctgcgttccggtttgcgcatctcttgcggtgctggcgagaccccagctcctacttatcattatgtatacaatccgggtaagcgcccggatgtgtagtctcacttcagacttcatcggtagcattaccacaaaagacagtttccggccagcttgagtgacgctcagtgtgtgatgctgttgacggacgtctattgcacttttgttggctgccttgtgcgtgaaacgggacacttctacgaagcgattctgcttcacagtaggcacacaactgggactagcgcacttcttgtgaaaacacttatgcgatttagagcacgaggtggaaacgaatgtcatattcctcagattagcggttccacacagagagaggtcacagatgcgtgagtgccaagagggacacattcactaggaactccgcgcactcaataacgcacactgcgtggcaaacatctactgcccttccgtttccgggacagctctgttccaccgttttttgtgcattacgtccgccactccatagtttcttgcaagaggctgcacgaatacttgagtgtgtgagatacatgttgagctgccgtcagactaccgggtgaccgatcgcctgtggtcgggaggacgtgcttgacaagttcaatttagagctccttacgatctgccacagtcaacgacagaaatgcctgtagaacagcttgccttgctttgcacctgacatctcgaatggtgatgaatccatgtgtggcctcgtctctgaacgaccagagagatcgtccgggtacaatgtgcgccaccagatgaaagaacacctgtctactccaccaccgtcataatctgcgtgagctatttctgtcaccgtctacgataacgcagatacggcaccgacgacggggtgcgctaggcctggtcggctaccgaagtagttaagaaacactgggcgtgctaggcgatcggttgtgtttctagttgggctgatcggccccgcactacgcgtggtggtcatacggctgtcgcattgcgcctttggacaacagactccaatagtcattatgtgtccattttcgttgttgcgttcattccttatgtgatgtgtagtcgctgttcatgttttccaaaacattcggaacgcgatactgcatcgaacgagtatgtcatcacgtagacttgccctaacttgtgcttgctgttcgttcttttcttccgagggcggtgaccaggcagaagctacgcgaagagcagtcggttgtgccgttcgaagcgcgcgacgttgagccggagggcttctccatcctgccgtaccatcagcatatttggtgattcctaagttgagtttgcgagaa

SEQ ID NO: 2168 - DNA, 1456 bp, Toxoplasma gondii
  source 1..1456: mol_type = genomic DNA
gaccgtgtcaaagccaacatcaaccttgcaacactggcatgcacctgaaggaaaaaagccaaattaatttgcggtccttgtcgcatacccgacacgtaggtgccgtgtttgacggcttgtgaagaaaagtgagggacgagctgcccgaacagcggagcatggggagtgtcaggcgaccttatttactcgtgtccatacggatatgtatgaaaaagccagagtgcctttggaaaacaggcctttctgccagtcgccctgggttccgcacacgcggcgactgcgaaagtgaagaccaacaaaaaggaccagacgtgtttgggtaagcagggacatttagaggagcaacggaaacaagtcctttgcgtcttttctagaatggttcgcacgagagcgcattttgtttcctcacggtgactcctgcctctacggttctgagcaagagcataacgcggtggttcgtcatccggatttccggccactcctacagacggtcacgcctgactgtgaacctgtcctgtctgaaggggcgattcgcgtagtctagaaggtagtggagaaatgtgtgactgaatatgggatttattaccacacttcatcctcaagagtaaggcatcatgttccagataacggcgagacgactggcacatggctgcacacattagcgggaatctgtgtcagctttgaagttgtacatgtattgtaggatacctgaggggactataagggtgaaaggtagttgagtgccccgtaggactgttttgaagcaccaagatatgctgcccaaaacattcccgtgtcgacagcgctgaaaacgtgccagaggggtgaagctgtgcttccgcagtatagaatttagattctggcgtttttactttcctacaattcgttcgacagcggatttgaaaagcgagcaggggggctttgtgagttcggtcctacgtcgtcgtgccggacattaccgcgtgaagcgacgggacactccacgttacacgggaacattactttctttcgaggacaatctgcgctagtagcatgacagcaaaaggttcagaagctgaatatcttagctcaaatgatatcataagctcgagcgaggcgccttttcgcttacacatcctcagaggaaaaaagtgtgcgacccgcctgcagggctgcggggccccccgtcggtctttcgatagagtcacatacaacgcacatccgtttcattccacgtgcgtattgaaaataaaccctttggcttcgattgtccgtcacggtttcggtaccccacgtcggcgatggttcgaggtgagtgatgacacgaagaagaagttcggtaaatgctcatttctatcctatgacagtaaaagaagccttttcacgcctcgtcgagcaaccaaaactggaacatttttgctgacatttatccagttctcaactggcagcgtgctgcggaacaggctgcgaatcgcaa

SEQ ID NO: 2169 - DNA, 4592 bp, Toxoplasma gondii
  source 1..4592: mol_type = genomic DNA
gctatgcaaaagatcttcgttccttggcacacttacatcggcagtatatcgcgctgctcgccgtagagtgtctgttgtggaccgtagaagtgcgaggcccgccattttcacttcggcaaggcctctggcccaagaaatgaagacgccggcagggaacaccagaccagctgtcctggcgtagcgagaaagatgtcggatgacgacgacagagacaacacgcaacgtgtatcacctggattcccactagaagacgcaatcaagtaaacagggaagaaagagcaacgcaaagcgaggtctcgcctcgttatcggttgacctcaaggctgagaggcggtgccacggtgtacaggcacggggctctttagcagagccaccagtggaagcaggggacgagcaggcgcccagggtaaggcggctctttcgcctacttcaccgtaaaagtccgagttctcggtgttggaaaagagaagctaacgaagacgcgtgacgccacggaacggggagaagtgcgaatgcaaaacgaactttcctgacctggaaaggatgcagcgactacgcattctgcccgcacacctgatacagagagtactgtccggtattaggtcccttttcaaaagatgtcgaatttggggaagtgggggaaggaacagaagtttcatgcttctttcagttacgttgaaatttgcgtgagtcaaatataaccatgcttcggccgcattttgatccgatgctcataatgtggcgcaccggcagtggacggagaaaatagggcacaaaagaacgtattgatagtgctcattcctggcggaaacgccatagtagggcgtgtggcgccgagtggtcgcatacacaaatcgtcgcgagatgaaccggtcgtgtcacgggctagacgcagcgcatcccattcccgatgataatagcgaaggaagcctctggcacggaaatacgcaataatacttcagtagcataaggtgagcatggcgatgggcagtctgacaggaagagggatcggggcatccgctcgcaaaatggggccgccgcagataacagcacccggcaaaagtgaggagacaacacgggcgatactttagagctgcgttgaagcgaaagctcctcagacacggaacgaactgctttctttcaaaagaagtgcaagcgatggaaaaagcgacgatatctaagcaacaagcgcgctccgcacacgctacaggacaggatagagaaacgagtcacagagcacgaaaatcctcagcttttcctctcgaaccggaacagaccggctgttgagctagcagtttccctgggtgttaatgaagagagaacaacacgaagaacaaactctagaattgatagatacacactaacctgctaacacgatgtctaccgcaatttttgtcgaggttcagcgtgtctctgcttcctacactcaagaacagccagcgtcgcgagccgagttgctgcgatcagcactacggacgggcatgctgcatgccgcggaaaggtggcaccgtacacgtatctggttcttctgagcaagacaccaccgaagaaattagagagtttttttacatctcttcgtctgtgcaaaggacgatgggaggaggagagcgcagccattcctgtgacggtcatccttaagccagtgtggcacaccgaacactggcagttggttggtcgcagtagagaagatgcctctcaggtggatcgatagattcctggagagatgagtacaattatatgctgctttatcatggcacagtcaccgttcgttactgcagaatagctacatcaagaaaaaaaggggcgtgtgggctacagctaccatgtatggttcgcgtccatcagcgtgcaaggcagacgcccaccgccacaaagacttgtggtaacacagttgtggaaagaacattgttctgccggatgcaaacagaagacatggcagttcagttgcacaagagaagtgggagaagaggaggggacaaaaggtaagaccaaaagagcacctcacctcacaagacaggcgtgacgctatcgcataatgcccggagaacagagaaatctgtccgatgatacgcggttgcatcagactggttgtgattatctcgaaatatgactatttacaagctgtttctgaatagtgtatgctacgagttggactactggtgtagaccgtgaatgtcgttgaatagcggatccaagttgtatttgagttagcacagcatattcaagataattattgtagaaacagacccaactgaataccacaaatcagtatacttcacgcctctattatctgaaggagctttcatgcgtagtcgaccatgctggcccaaaactacgccagccagttcgcgagtgcgaaggatatgactcagattcctaaggcggagacgattctcgcgaaaatcaaagcattattttagcgtgtggccagtagagaccaaacgtttttcctctgtagtcgttgccgggccttctacccactctatcgatctacccagaaagcactgcctgttccaggcacttgtgcatgttttcactttcccgcttggagctcaagcatgccccctcctttctacaggccagcgagtcttcacaagtgtacaaaagtagagagactctactgtgccatcgttgcccattcgctccgcacagtgactctacaaaggcgatatgtttgagctcttcatcaagtttctgaaaatattcatgcgcagttctctgccttactgccgatgccttcttatgcaggaaggagaccttgattgccgcactgattaaaaaaaatttaaatttgtggccagtgacgccaagagaacatggagtctggtccagcgaactcaagaagatctatgtcgcaaaggcaatcaacacaaatctttcagttgatcccttgaaagcaactgtgtgtagtccatgcattatgcagacagggctaaatcggagaagtcggcgtcggagtcttgcaaccctgctgcctcacaaaatagccagatggctacgtagttcttagtcctctctgcttcacgtgcaggcctgccctttgaatggggtcctactagacctgtccgaaatgtagagggtgcgaggtcctgttagccggaacaatcactaggtagaccgacccacggtgtctggaggcaccaaaagcaatgacgatacacgccatgcagaaaaaaagaccaacgaagggtgcgtgagtgttcgaacacgagtgtgaacagcataggcgccgagattccctagtgcgaatgacgaacatgcgtggaaaacccggaatcaacatgcagtcagacaaagaatcctgtgtgcggctttacgggtgcgtttcgtgacagattagtgtcccctccatgctctgtgccaatctgattgacacagagctgtcacggcaacagtataaagtgatgatcttgagcccccttttggggccgaacttcacctcgtttagtacctgccagccccagcttgtctggccctcgataggaatcgtttaccgagcgccatgtgacctccccccgtcaccgcagacacaggttgtttgccttcaggacgaggtcttatctagagtctttgcgggtgcgtgttgaaatgatgttaccaggaggacgtttaatgcaaggattggtgaaaatgcacttgacgaagcagaaaccttcgtccgcgacgcgcctcacgagcttcgattatcacttcgtttcaactgcgttgcagcccaggggttcgcttttatatcttagtatgccaattgaaaggaaatgtcccttacaagctaaatacatgacaggttgggaagaatgctcactttctgtcaaaagaagctgctgctgtacatctgcgccacgatggcttcggtcacttcatagcgccctcccccgcttgctgatgcgtcctcctgtacccctattttttccacgagtttgcaaatatttgtgcgccttggaaaccttcgtgagtgttctagtttcggtaatacacgtgaatgaaaaagcgtgtggcgagaagcgaagtcggatgtgaaaggacatgcgcctggtacgcgagaatcctcttcgtctgcgcagctttgcatcccgactcctagaacctctccaggtcgagcgtcgctcatcgtgaggcacttcgtgccaaccccccttgcaggaaccttataataaaacagaaagcagagacgcccaaatttccccttttttcgggaaacaatcggcaacagaggcatgtgttatctcggttccgtcaacagatgtttccccggtacggctcactgccaacatcgcttccgtcggaacgctgagtttcgcagtattcgagtgtgacgttcagcttttcccgattggacatagtttttctgtgaatcacgaagcctgcacgcggttggggggtttttattcacgttactgcaaatttgtgtgcttgtctgtcgttgactccgtgcgcttcgtgtgcaatatcgatccggcgtcgcctgaggtgtccttcaccatgtccgctacctcgggcgagtgcacgcgcccggaaggcgacaaggaaaaagaagaaacacaagcttcagtgcaaccgggacacagtgaataccatcatccgttcgctggaga

SEQ ID NO: 2170 - DNA, 2320 bp, Toxoplasma gondii
  source 1..2320: mol_type = genomic DNA
tttgcgtctctctgaatatatgcatagactggtgcggtagagaaacgcgggcctggctcgacttcccgttatttcagaacaaaagatccgtacagactgacacgcagaaggagactaccgaagtgaatagggaagaagggggggatttgtctggctggacgctgtagatacattcgtgggggtgtctgctgaaatttatggagctcgtaggaaaacgtgtgttgctgggtcttttttggttcgattttcaactgtttttgtgtaactgtcgatctgctggacggcactgaatctcgtatgattttgaaagcgcaaggcgctgtcttttgttccattgacctgcctgtcaatcggtttccacactgaactcttattccttcgagatatgcgtaccgccttcgctagtcagtttttatctatctttacaaagagacgtcaaaactgcgagagcaaaacgagcagatcactgaaacgtgtacaagatgtttcctggatggcttgtaaaaacgagagatcgctttgttgcgcgtccgaagatgcggctgatttccttcacttggcaaaaaagttttgtcaagcgaaaatcaaagacttcacgctcttctctcgttctacgaaacgaaccgtgtggctacacagaagagaagagtataggtaatggtgaccatttatccactgacttctgtgtgttgacgaacgcgcgtccggggagtccgagcgcgaatctcagcgcctggattcatctgcgggctgacatgaggcaaatgccactcaacctcgcgaactggtgtttcccattgaactaatctgcttggcagaacgggcgtccgttgtgccaccgtgaaatgcataagacacagtcccaggagaaacaattttaacttcccaaagaggcgatttttatgcaaatgtgtgaggcgcgaaaagcggtcatgacagtcctgaacagagcttttcagcagcaactgtggaaaccacaggaacaccggaccacggcgtcaacactaacgatccatggaaatcaccaatttcacgatgctgacattcctggacactgcgtgaagcctttgtgttggattcttggggtttcggtctgaacacagccctgtgttaattgctactgagtccacgaaaaagtgagaaatcaccaagtgcagcgcacccggacgcaagcaagggccggctttttcgttcaagaacaagtggaaagaagacgcacgttgaagtcgaacgagagatctggaaatcccctgttggtcgaggacggttttgaggggggatctgcgtcgttcgaccgcgcccaaaagttgcagagacagacggttcgcaggggctcgagttttgtttcgtctcacgtctaaaactgtcattctagagaagcccactgaacccaaaagtagcggaacagcacgtttcgcattttcaaacatacacagttgaaaacactcgtcgttcgggacgcacgaccccttgttttgccttttccctctcctttgcctcaacaccgacgcagttatcgctttgacgctcgcttgacgtgcgccgcccgtctgtgttcccgaagttcattcagattttaaagctttcatccatagagatccccattcaccctttcatttactcttcgttgggtttttacatgatgcaaatccacttgcttgtctacactaacaaacaggacacgcgcgtcctcttcccgggggtcctgccggtgtcgctacggttttggacgcgtttgctttggaatttctgcacagtgcctcaccattaaagatctttctgtcacgccgcctcatctattggtgccgacgaaatgaaaaacagcaaccctccacctccaactctgaaaactgcaacgtgccccccccccggccaatggtttatgcccccggctttcctagctgcacacccagagactcaaattgagtttgcagacccaccatcgatttcttgcagcagctctgacgattgtgagtcctccagtgggtctgctccggttttgtgtgcgtcgtactttcgttcatgactatgtttgtcgcgttcttcagtctgaagaatggattatttctccgagcaaaacttccatatctgtttcccagtgtttgtcagagccgacacttgagagaggagagggattgctcgacgagaaagaacgatgggtacggagtttcgaacttcactttaatcaactgaattgaataatacagggttggaaacggtggaccatcacgaacgcgtcgcattctgccagttttgcagagcgacttgccgttgtttcgacccgtgcccttcttggcggttttccttcaaaaaggcacca

SEQ ID NO: 2171 - DNA, 4707 bp, Toxoplasma gondii
  source 1..4707: mol_type = genomic DNA
tctttctgttgcctctccataaacgaggaactggagagtcctctttgcgtctcatctcacctttcctccgaccccgaacacggcgaatgcccggcgaagttgatcgcgccgccttctgggtctccatgcgtcggatcctgggtgcctcgtcgctagtctttcgtccaccttcttcttctgtttcgctgtcttcgcataagtcgtcgatccagaagctgctgaactcgaggcgatttagagtgtctcgacagtggtcaacgagtgttgccggcgccgagggaaaagcgaagaatgcatccttcttccctgttggatctcgaccttcagcaaaggcgttttcttgtcttgtcttgtcacaggccaggcgcgtttccctcgggatctttgcgcgctcgctgttttcgtcatctcctgtttccgagcaagcctcgagcgtcgtttccatgaaatctctgcatcttcgccggcggcggtgacggtctgcgtcgcctccctgggcgttctccagcttttcgccagtcttcgcatcctggtgaagcacagatttttctgttcttcctccgtgactgaagcccagctcctgcgacttggctgcagcaggccctccagagtgtcttctgccgtcttctccgtctcgttgcccgcctggcagtttcacagagaaacgcggagaggagagaaacgcggcggaggcaggctcggaagagaagcgaaagtcaaaccactcaagaagggcgtcgtttcggtcgagaatgacgaggcgaatggaggggaggagccggcggcggagactctcacgcaaagacagacacagttcccgaatgtacgacgaaaccgctttcgcatgactccaccagacgaactggccgaaaaggcggacgcgacgaaagagagaagagggatacacaccacgaagacacagcagatgatggagacaagcttccagaaaagagacgagtgtatcgacgaactctaaacacacggccgacatgggaggcatggaaaagcgagggacgagggaagcgcctcactgaaggtttacacatgggaagggttccacagagagacgcacggtgagagaaaacgaccatgctcagctcgaaaaaggaagtcgaagacagcgatgatggagacacggttcctgtgactggcgggggggtcaccgttctgtcttgtcttgaaaagggggaaacctttgcaaagaggaaatactgcagatacatgtgcgcacctgtgtagagcgtcgactcatgagagatcagaatttatttaccgtgtgcatatgcgaaggtttgacgacccaaggccgtgggcatggccggctggcggcgcaacgaccgcagaaaacctgaaacgtggatggactgtgcagagacatagatttcggtttcgcatgtaaatctaacggaagcaaaaccaattcgtctgctgcgacagggaaagtcaatactcacatgggaaggaagaagcggaaaaactcagatttgcaattggtcgaactacctttgaacatgcaacactcgatgggcgcgttagttgcatgcattctcagtcgagagctcttgctttgcgtgtcagcggtgccgaacttgctggaagcgccttcttctcgttgatgcccgttgcttttcacgtttctccctttccacatgaatgtcctcgactttgcgcttgaccggcctctctgttctgttgcaattgcatccgtaccgggacactgacgatggtttcttcttcggccacggagtgaaatgagcaacagtaaaacttggggccaaggattttctgcagccgacagatgaacttttctgtctaccaacagtccagatttgcccacgtagggaagaaacagctttcccggtgaagtgtcggtacaccgcagcaaagcccctagcctggtgaccctgccttattcatgccctgagaacagaggaaaaaggacagattaaccgctattgaaaccgctacttatatttctgcacttaccgtatttgtagatttacgctgattctccagttcgacttttacatgacaaggcttgatagtaccaccctgtgtacctaatctgaagtcgcagcactcgcgggaagactcaacaagacacgaggctgctggtgatcagaccgaatagccgacgacactgccagaagagttcactttctttgttgacgcagcacgcgggagggacattttgcgacgtccacacatgcaacagcaatgacaattttggaaacggtctgccttccctgtaaaggagcgaggaaggcaggtgcgacctgagtgcctctttttgacgatgagtttttcccacatcgtcatcaccgttgacacgtctgtcagcggcgattcgccatgaataaccaaaaaaggcttggtcaacgcgtctgcgaaactcggcggggaacagcagtgtttgcgcaaagcaaacggttggatctcaagcatgagcgagtaacactagtacgcagataattgggtcgtttctgtcccaaatcgcttagcgataaaaaggcgcgctcttctgtctcccgttctcttatatgtgcatcatactggtgacgtcatgttgccgtcgtcagctttgcggctaccacgtcctcatcagctctttgacaatcgacgggggaagactatcgacgcgtgtttggtttctcgcatgtccaccgtgtacaaacacaacgacctaatccatgtgctggaccgcgattttcagtgtgattctttcttccctctcagttatttgtcttctctgttccttgacggtgtggcggtggtttcgcctgagacaccagacgcactaacctgtcgaggaggccgccatctcacacttgttcggcctctctcttttccgcctcgtggaaaacacccgctgcttgtgaatccacgtcagaaaaacaatgcagagatccagtatttccgccgagcaagccgaggatgtgcccccgtcccgcgcgaatgttcgtatctggttgctgaatcaaagcatccccaacacagcgttctgataatgtgcggactaagacaacccgcctgagtctgtcgctgggagtgagcgttagtgtctacctttttgcagaaaaaaatgtctactcaggaacccgcatcccggggtaagcaagttccctcttgcagattaggcactggcgcttgagtgtgaacgcggaaagccgccttcagacaaacaacctcacacctgtccctactctctgacagttcaccgcgtccggctaccttgcgctaagattcttcttaaaactgttccatccatatgaaaggaagatgctccatcatcaagtgattcgcctttgctacgtatacaacgattatcagctcgtgacctgcttgtttttcgctcaggtagtcgacagtgccactacacacaagatgccgcggttcccctttcacacacgaactcgcgacagagcgtaatgctgaaggacctcttaagatacagtaaaaaaagtagcttgcaacatcggcatcaaaaccctcaaggaactcgatattcctcgtccattcacatccgtacgaaactttgtgtccaccctctgaatgctgaacctctcattcactgcaaggagtaaataggtgcacgttccgctggaagcgtgcttcccttaattctcctgtttctgtacacatgcagtctcagtcactttcattttggttccagtcgcttcgagagagatctatctagacagcagcaacgaccggagggttttctatgcgagtattctctatcctcaggtgtcttctgtttattgaaaagtgaagcatcatgttgactaaactcacccttccggtgcctaggccttgtttgtggatggacaaaaccaaccaagtatggcgacgaggtaacccgggaaattcagtgtgcccagagaaaggattcgacggtgcatgcggctttttttaggtctgctgcatgccgttgacgttctgccagcgtccggcctgagaagtggaaatcaagccgcagagagaactgttttttcgcttgaacttcagaccgaaggttatttaatatgcggatctccgtgatttactatcaccggaaatttcttcaaaacttgcaaggtatgcatgcacttggtttttcgtgtcgttgaggagactgccctaggccacgcggcacaccggttctgacgcattactgtcgctctgttctcggttgtcgttatatattcagttattcgaatcagccacactggctgatacgttgtaaaaggcgaggctgtgctctccctacacagtttcctggcttggtgtgacggtcggcgttttcttgtcttgtgcattcggccttctgggatctcatcttgtttgctgctggtgaccctttcttccagagaacttgcacacttgcctattttacttgcctttcctctccctgtccgctttgtggtattcctactctgttcctcgtcctaggtttctgtcttcgcgtcttttaccccgtatgcttgcctgccccaagcctgtctttgctggctctgattgacatttggccgctcatacacagtcacccaagatacatttgtctctcttcctctctcttgtcccgcgtcagcatttcgtccgttgcaccgactaggaggagggaagccgcgcaacgcgacccgaagagaggctcagacagaggaatgccggagccgcacagcgctcgcaagtagacaagccacgaagacagaggacgcgccatcaaaa

SEQ ID NO: 2172 - DNA, 2096 bp, Toxoplasma gondii
  source 1..2096: mol_type = genomic DNA
gggaaatcccagtgcggtggagctgcttcacctcgttaacgtaggggcaggggtagccagctgggtctcgattttgagtgagaagcttttggggcttgcgattctgaacgagtttttcgctgaacggctactgtctgccgttcacactgcgggcagatattgtggcggcgctcatatgtgggcgcccagagaaagttgagctcttagaacagacagccgactctacacggtgaggagaaacaggcgtttcctctcgtgtctttcttttgtgtcgtgcactagagtgtctctaagcataatgtactccgacttcgatggaaaaaatcgatgtcattcaaacagcaatcagatgtgggtgctttcttcgagacaccaaccgagacttacatctgggagcccctctttgaggcagagagtctgccgtctggatgatattcgcaacattggtttacggtgggaggaaataccgcacgacggaagtctacgtggtggaaagacactgaagaagcaatgtcggtagcctgatgtgtccgtttgaaccgtagaattggaaaaataggggatcaccttcttccggttgctccagccagtttgttacgtggggagagttcgccgacagaagagacatttcgaggttcacggcttcatgcaggccgttctgtcgacggagtgtgaatctctgcactgaattgttcacgatggactaccgacgctttcttttgtaagtggaagcagtgcctaccaacgaactcgacgtggttcagaagtaccagataaattaagagatactggagtcttctcagtgtctgtttgttgatacactcttctgccggtggtaggctcacacgcaatgggcagcaaacgttgcaagtggaacacatgagcgttatgacaatcaccgagtcgctcttctgtctcgccgtgtttcggcaaaccagtaaatctttcgttccgtttcactccagtgtaaaagcacgcatttgacatcatgcaaaggcttcctcgtttgacagtaccatcgtacatgtataatgttcagtggcaccacctgtaacggagtacaccatacaagagtcaagtgtcatccgcaggtaccacaggcgaagaatctacctcaaaattcttgtcgggacgcccctccctccataccggtcacgaagaacttacggactggttcgtgaccgaccagaagctgttgagcaagttcttagcagtttttcgggtggatcccttgctccgcttttacagaggttggaacggtcatccacgatcgcgtatgaacatccaggttccctaaacgagttgtcctccgcgtacgacgcgtttttcactcgacaaagatgcttacaagggacacccacagcaccagccttgtcggaataagggagtgcgtcaagaatggcagggagtaacgaaggaattttccttggtggaacctgcggctggaacagcccgcttgcgcgcatgcatgcaaattctaaaagcgttgcccgtgtctcaccacatgcagcggcatttgttcgtctgtgccaccagtatgctgcaaaatcgtttaccacagctgctcgtttttcttttcggtcgacaaacgacgcatctggcgggacggaaagaactggtttcccgctctggtcgttccacggctgtgggaaaactgcgatgtctgtttctgccacacgtcgcctgcgaggattttatgaagtgtactttctcgcgactgcggtattttcagtcgacgcatcttcacctggaagtcgacttcttcgcttctgttttccttctcgcttcttcgactcagatttgccttccctcgagcttgcctcgctccgtcacgacggcctaccgccgtgatccagaccaaaaacctcgcctaggaaggcgacgaggctcgcaatcaccggaggaaaactcgttcaaagacacggtttgtgttgcaagaccgtcctgcctgactcctctcgcacctggtgcatgcatcgattctgtccatccgtgtatctgagttgacatgcggttgtagatgctggatgctgtctgctctggaggctgcagactcggaccagtgcatgtttaaaaagcgaagaaactgctcacca

SEQ ID NO: 2173 - DNA, 3911 bp, Toxoplasma gondii
  source 1..3911: mol_type = genomic DNA
ctgccggcggatggattgctttgatatcttagaggaaccatctgaggtttgtttggttcattagaatcttttgacctgccggatattctgtcattccgttggcagtgaactgtggaaatatctttgacgaagtcgcgagaatgctgattctactgcgatcggcgtagggatccctaaggatgtgtaatgctgtcagtgtgttaactgttactagtgtgactcacgtcccaggtgcacgggccgctgatcctcgcaagcgagactgttgtggttgagcgtcttctggagtcactggagacgggttggtcagtcccatgcctgaaaggagtcaggttgtaaagtgatgactcgcaacattctggaactcctagaggcgggtgcttctcttcttgcagtggttggtcagtaccgctagaagagaaatctctcacagtctgtagctgaactgccgattgttaggttgttcttcacagggcacgtaacgtgcgttcaacaaagaggcgttgcccgtacagagcgcatcagcgataattcgagcgttaccgtgatgcagagagtggcttttacttgtgtgtagaagacaagcacgatgcggacgaagctgctgaattcggcgggaggcttgcctctctaatgcgagaattacacatctcctgtgcttttcggaaaagacaacacaaatctgaagtctagcagcgagcggatcgggtaaatggctcacttcacagaattgtgcattcagatggtctcatcccttttccacaagagttcgctatacgcattcgggcgaagcctcaaagtgtttctcgtaggacgccgtcgtagagagaccgtcttctccaagaagaaccctgtgtcctttcgatgtggatttacccaatgccggaggaaatgcggctctggaagagctgcacgagttccaaatcacaaatggcggtcctgcacacgtcgcttctggaaatcagtttcctcgtattctcgcaccttccgggggtgatgggtccaagcactgacactcagtcgaccgaggccatcgatccctgttagagatgacgggcatctgtgctgcaaaggaaatccgtttctccaggaaaaacaccattaaggctgcttagtctaggggtatgattctcgcttcgggtgcgagaggtcccgggttcgaatcccggagcagcccacggtcttctcttctgcagaacgagagaatgtacccatgccgctgttttgtcttattttgtttatggatcacggtcagcagctgatactagcttatctggaccctggaacctccacattcaggtaagagtgtggcatgttctatccgagcttcaggctcaagtcgcaaaatgcgcgtgatgtactatctcctcgaatcaactagacatcaccgtttccttataaaatgtctggtttattagcacaacctttaactatttcccctgttgcagtgtttgttcatacgtcgcagcgtatcccctcttgttcacttcgcgacaaaaaaggagagggcttgttcgaaaacgtgaattcggagctgcggtggtaactcgtattcgccaccgcccctgcctggtgcacaccatcaaaatcgccgattcaaattatctgtgctgctcgttgagcactttctggacttagatatatttttcggatgcctgtgtattatactcccttattaacccttttcctctctctgtgttgaaaaaaagcccagtgattatctcaagcttctgctgcgctggcaggttccaagcccaaggatctgcagctgttgtttccaaattcagttctgtctctctgaaaggaagacgatacatcggagggaatcgatctttttgtgacgtgaccaagcgctagtgccgacggcaaccgcctacagcaacagagcatcactgttatattcgctctagaacacaccacggtgcgcaccctgaaattcttcgacaagagggccagggagaaagaaacaatcaaaagtcgtggctataaaatgtgtcttcggtcttttttattctgtgcatcgcataaagcaatttctgtcttctctctaacttgtcgagtttatcgatatcgagcacataagcccacattggttaggggggaatcgtgatgtgcctcaatttgcatctcgctccactcgcggtccgtaaacgctatcctccaccattagtgcacgaaacgccctgacactacatttcttgtatagaccacaatctcgctattatataaacagtctcgccctcagaaggtcgcgtgtggtggctaaaataaatagatttgccacaagaaggccacgttttgtatgcacgacccgcgtaagatacgtgaatcctttctccctaagcccggaaggatgtgctagcaacttacagctacggcatctcaaaagtacagacagtgtcgagtaggacaatgagccaaaacaacttccctatcggaagtgacagtctatctttagattaagtgctctatctattttaaataattttaaacagcccgattggtgtttttatgaattacctgaatctgcctggcgcgtagcaaaaccccgatcctaggtttgaatcagaagagctgaatgcccgctatcggggcatagtgatggaagatgacggaaagctctcttcagttatttctcagacacgtggcggaccgccctctcttttcttgcatcccgaatacaagagcactggggcacaggctacatgaccttagtcacatgacacaccgcgtccggtgaatgaggtacagctctttcactctttcacgtgttaagagtcagaggcgacactcctccttctgctagctcctgagttgctgcgttataggagagcagcagtgctcctttctttgttgaacaagtggcgatattccgcgagcgtatcgaaacgctaccagggggagggcgaaggtataaaaaacacacaagttccgacagacagttgccacgcccggccgcaagcttgaattgaggtcaactagttttcgtggaaaagaatcctaactagcggcatgttcctctgtgtatggacgaggagcttggcagaaacatgcaggcagttaccttgaccaccttgaccaattccgactgcaaaaacggggtgaccctgcgttttccccagcacggccctcgcgccatctgggtggctgtatccccctctggtaactggtatctgcgcacggatctgtggcgttctggctcgctggcatttgccgtctcgccgagtagtccgtcgctgctggcaaccagggtgagctgtgcttcggcattttggggagtactgggagagcaacagagaaaaccggcatttttcctagtgacctggactgaatccaggaacaaataagtgaaccgctactgccgcttggaagccggtagggcatgcgcgggttgcagcgtctagctctacgcgagtcttggtcaggtttgcgtaccttgctcttggtgtctagataatcccgaagagatgtaaatgagatactttgagtagatgtcagatacaaacccccttgttttctagccgcgaggcaatagtccccccgtcccgtcgcagtctacgaaggagcgtgtcaccgcgtccgtgtccctacaaccacagtggcgtgcgcttgcagaccgctcgagccgcatcattgtttttcgtgctcccgttgtcgcattttttaaccactcgtgtatctgtcacttcttctctagcggagggggacggcttgccctcgctccgcgtttgttgtcgactagccgcgtgctccacacctcctttcgcagtgccgccctgattacgatctgcaggtgttcttacttccgtgtcctgttggagcttcgtgcggacccgccgtgtctgcccctgttacgtgctgcctcgtgtctctacggtcggctcgtgcactgtgccctcgaccggtcaaga

SEQ ID NO: 2174 - DNA, 1696 bp, Toxoplasma gondii
  source 1..1696: mol_type = genomic DNA
ggatttagaaacaaagtcgggtggccaaaaagagccgcaagcttgcaaatcaagtagaggccgagctgcataccaacaaggcgcttggaggtcggacttctctccttttctgtctggttactttgcacaggcactggacgaggcgccggaggcgttgcgtacacgcgaattcctgaggggacggcgtcagtcattgcaactcgcacttgaggtccagtttccagaaaggacgggacggcactcgaaccgcggggatccgtggttgacgtcgcatgcatttccaggagagaaagctcgacggactgagagactgaccagcgagcagcatcgctgcccctctgttggacatagctattcgcgacttcgtacattttcgcggggttgctgcggctctcgtactcctcgtggagaacctcgcggaaattcaccggaagttgccgcagattgtgcagaacggccacggggcaccccttttccgcggccctcactgagaacaaaagacagaagaccacacataacggacagaaaaagctggagacgcgtcagggcatctaaccgtgcaccgtgtttcagctggaactgtgtgagtctctctatttcaaccacacgcgtccgcttacgctgaacagcctcgatcaaaccctcgtcgcgaagcattctcttcaactggagaagattccgttcgggcaaactcggcgtttcggtgtctggcacccagccgaaactgatttgagaaccccccgtggtctgcacttccggaggggttccgctccaagaccaggaaccgtgcggcagaggcccgccggcggtgaggacggacaaagtaaagccttcctgtcggcctccggcatttctgacttcgaatgtacgagacgaagatccgcgtgtcgacgcggtgtaaactttgaggtcttcgggtaactcttcatcgacagttttcacctcgattcgctgataccccgtaggccggaaagtgcgtgggctgggttgcggccgcagacccggggtggcgtccgagtcaggttctgcagcgtctgtgaaaagaacggaagaaaagagttggagagcagagcggggaaagctagagaagaagagtgaatccgctgcagatagaagaatcaggacaagaaatgccctgcccaagggcaggccagcgcgtttagtcatggtgacgtctggaaggccgcgaactgttgaaagcgaaaaaaaaaaacaagagctctcgtccttcgcctcagagtctgcgtggtgggagcaaacgagagaaaaaagaggcgcttgctaaaacgagtgcagcgcagtacaagtcattttgagaagccagctgtagctgcctggcgagcgcaaattccctgcttgtgaaattggatggatggaacgccagaagaaaggcctcatttatatcgtttgaacaaggcaaacgaaccgccgttctgcccccaccgggtggcgccgctcgtcgaaacaagacaaatggtagaagttttcgaaagtacacttgcaagacaaggtagcttttcccggagaggagctgaccaggtctggaatggagacgcaggtcacaaacttgcggacaacaaaaaagacatgaaaaggcatttacggacgaggggccatcgcacgcagagccgagggccgttaaaaagacaaggaagaaaaaccacgcgcgaaacagagaaaccccctggcaaagcta

SEQ ID NO: 2175 - DNA, 4918 bp, Toxoplasma gondii
  source 1..4918: mol_type = genomic DNA
tcttccagaaggaaccacacggtatttccggagacgctggagaagagctgtatcgatgtctccctgcgcagtgctggccccagacgctgccggcgtgagctcctcttttccggttgtctggcacctcggacttccatgtggcgcggcactggctgtttgggcgtcttgcgatttgtgtcctgcgttcggcttctcgtcgagaagcactggaggctccccgacatgtcggaacagcagcagtcccgactcgtgcttcgctgcgccctcgtactctcccctcactttctgctgcttagctgcgggcgcgtttccctctcctcgatgttgaagcagacacaggaagggtggaacatcctcctctctatgtcgtttcaagcgaacatacagaggagcgtttcgttctccttgtacgggacgcacgaactgtccgcagaaactcccatttgccggtgaggaagaggaaaaacaggaggcacgcagaggagtcctttcaaggaaaaaggacgcatcgttccggtccatccggctgagaccggacgttagtggtgactcctggcgcgcgaaagtccgtgtgggggtctgaggtttctcaacactgcgttcctctggaagcggggactctgccgagcgattcaaagaagtcattttgatcagcgaaagaccgtcccggagcaattcagatcacagacaacagtggtgtggtggtggctgtaacgatgtcactgggcctcgaaagaacgcctcctcaagaaacaagaagttgatgtcaacgggcggaagtcagttcttagtttgagaccgcagggaaataaaagagctttcactgatttcacatttgtggcacgtgagcgttcacggtgctagcaggatcccgtcggcaactacccacgagtctaccccaacacacggttttccatgcattccagcgtctctccagcctcttcgagcagttcctggagaatgttgaaagtgaaaaacgcctgaactttcaaggagcaggacggacaggaagcctcaacttccagttctcgatccccgagacgacctgtttcctcggacgactccgctttctcgtgagttcgcccggtcgactctgcctcgcacttcttttcaaactgggtaggtcttcgcaggtctccactctgtcggcccgttatttcctgcacctttccttgaatggtttccagagaaacttcaaaaagatccccacaagggcaggggtagaagaaagttcgactcgacacgtcgaactcgaattcacgcagacacacgcgttcgtagtacagctcgcctccgacttcgtccagaacgcgattttcgtcctttcccgcaccacccagaagttggtcgacgctggtgaggtcgggccgttccctgtgttcttcctccctctgtgctgtcacctcctcaactctctctttcgaaacctcctgcgcttgcgggcaaatctggaggttgccaggtgccggcggccgttcagagtcaggaccttccccgcgaccagttcgatcctccacctcggacaaaacacctctcgccactcgcagaccccgaaactgactcacaatggcaggggtgaagaaagaacttccggaagagctcccccttccccgtggtacgctcgtttccccagagccgccggcgaacgtacttgcttcctcttgaacggcctctccgctctgctcgacactctgtccaccagaatagcacggacgcctttccgcagagttttccgttgcggaattcacgtcataaaccgactcggaaacttccagcagtaaagtgacagtcgctgcagttcgagttcctgccgtcgtcgtcgagctggtgccccgggttgacaaggaactcaccatcctggcttcttgcggaggaaaatcccaacacgagtttgtggaaaagaaatcgattcccgaatcccggcgcgcggcgggagaggctcagagatgcgttttcgatcgcttgtcgccagcgtgagacacaacggacttcccgcaagcgtaccgctgccacgtgcaactttcccgcagtcccgatgcctggtgtctctgacacgttgtcccgatcttaaccttttgccgacaggtgcgactactaagtgactctttgatgcaggattcgttacttcgcaaaacgatatcacaaagataaaataacccgcgatttcgtgtcaattcgtccccccccccactcgggttttaggcttgaccagctggccgccttaagcaccgtccatcttgacggctgtttttttgtgtctcacctaaataaatcccgtacactgactacatttaagcgtggcaggcttccataccgaagttccacgtgaaactgaaggagtaatttgaagaggttgaaacttttctgtcggcatgcgagatggtgcacttctcataagcggccgagatgatgccatgggttaggttttgcaaaaggcacacttcagtgaacagtagagattctgtgctgggttggaaacaatctgcaaacggaaagaagcttggcttcagatggttctattcaacacttagctgcaagcatatcgagttttcagcttgtacacacagagagacgatataaccggtaggtgtgaaaaaacaggccgaaaactgtgaggacctcttctaatgtgctctcgcgtgtgtcgaaaccttttgcccgtcgactggtgaaggatcaacagatgttgtacgttttagcttactggataggaagccccatccttcgagatcgtgttcatgcacgcgaggccttgttgtcgctatacgttcaaaaatagtccagagattcatctgtactcttctgaacggccctgtttgcgatactcttgcaatgtgagggaccgaattttgagggtcactcacgcctccggcgtcggcagagaaaaaagtgtggaaatggcaccacttagcgtactgcacaagagacatcgatagatccaggaaacagtccgccagatacggcagacgcaggagacatctaaactgaacagatgcgaacaaactggtgaacggaggtgcgtcttccctgaagaagaaggcaaataatcggtgaacctgacgggtgagagtagcgacacacaagtcaaagccaccagaaacagtctgcattaacaaggtggcgacttgacaatgcttttgtggctacagagcgtcttcttcctacactaaatacattgctagttcaggcgacggtggtgatacggatctcatttgcacatcgaacggtgcttgtaatgagtaagaagctatccttgagctgatatgcgtagccttcaaaacaccctcttcccgcaccttgctatgcgggaagcttaaagtttcttatgacggtgcttgcacaggacctcagcacggagcttctaggaaacactattccaccttttttcagcattcccaacgttcgttgactacatctggtgtccactaagactacttggtaaaaaagcaacgccttgcgaagttgagtgaacaggtttatcgggtgtcgccgagacggacagcggctaagtggttgcccctggttcaaaactaatgagagaacaccagaaaaaagtgtaaaaggaggcgttatacccccagaagacgggcatcttgcagaaagccggagagaagcgtgtttatatgtaatgccgtagagccaaaacaaaggtctcaacacacatgagaacgtttctccaggtaactctccgcgttaacacatacagttccccccgctttcacctctagttttaaagactccggagacatcgccttcctgtcgcttcgctgttcctccagttgcccgttaggaaactactttgtttttgctcatactctcagttgtgtgcggtgtgtttaagattagtttgcatgtgcccatctgagtacggagtttatttgtaagctggaggacgaatccttattaggcccagggaagcattaactgccctgttgcacatggctgggagatcagagagaaggctcttttcagtattcaagggtaaaaagtgccacagcgaaaccgaacacctctgtgctgatgattcttgccagaggatgaggaacacgggatttaacggcaaccctgtggtctgcgtcttgtgacaccaaacttttcttcgttccactaaaaagacacccgtgtgacgcgcatgaggtgaatgagattggacaagaaaactctgaaacgttttcattatgtatacctgttctcgacggaaggcattacgaagaacgaagcagccattgcagcacaggcgtcgatttgggcgcatgcgacagcgtgtggcacactttgtcgagttccacgcctctcaaccggtcaaggcaaacgcttgcgatcgaatgcccatttccttgtcgctttttgttgaaacagactcggtttcttcttctgtgtttcagtgacattctgtcgtgtttattgataggcggttcttctttgacaaagagtttttgtttgatgttcaaagccaacgacagctgctgcagcagcaccccccacctccaaccctcgcggtgtctttgtcatggcgttgtatatggtggcattgcaattttctaggcgcggttctacacggaattcctccatccgctcgaatcgataggaggcgataggatcgagacagagcgttttccgggttcctttaaagggagtgtttgccttgcacaccttccttggtttcctcccagcagagcgttttcctggagttcgcgcggggccccagatgcttttgccaaaacgacggagctaccctttcctcttttcctcattagttggtcctgcacggaagtctcccttctctccctttgaaatcctctctctccccacttaaccctctatgccgttaatctcgacgactttctcgctttgtgtggctgggaagccagccccccaggcgagttttaagtggtttgtttccttatagtttccagga

SEQ ID NO: 2176 - DNA, 1928 bp, Toxoplasma gondii
  source 1..1928: mol_type = genomic DNA
aaaacgtagggtgtcttgtcttcggctttcacttctggagtgggcgcgccgggagaagaaggcagaggcagaggagggacgagcaggcgcaagcagaactctcgaggcttgaactcacaagccaggatgtcttgaggggttagatgtttgacgaaaaaggtgaggccgagacgttctccactctgcatccattcaaacctgcgtgtggaggggaaatgttcagaaacgcagcaagacagaagccagtcaagatttcaccagttttcgcgagcttggacattcaaccttagtgcacaccagacatattcagaatggtgccttctctaccgccgagccacgctgcgctctgaacgcaaggttttcaagaggagtgaagcctcgtgagagttcgaatactgggagcgtgctcaggatcggatctcccgcttccagatcccaaagacagaatcgcacacagataagacgatagaaaacagctactttgatgttcaaatagcgttcaggcgccagtttctcgggcagagcccaaaaaccgaaaacctaccgaggagtttgtgtccggtgtgccggtcccgacgcggcactttctcctgccttcgacgcgggtgcgcagttactcaccgacatcctgtaaaagcaactgagtgactctacaagagacttcagctggatgtagttcctggaaatccggttcaggcaccgtcagacggctggggtttccctgtggcactgcttggaaagggatgctactgatctggtgcccgtctaggcgacatatgacgaggattatgcacgaggctcgagaggggggcgacgagactgcggacagctactctgaaggagaagcagggatcgacctcgctaccttcacctgatgataacctgccctacttgctacgctggaaatctgctaactggtggagcagatgctactggtagaaaagttgcacggtattttcacataacgtgcatgtcagtaattggatgtgcactggtgctgaagaagcgaagcgggctgggctacagttgccgagaacaagcaatgagttcacgcagacgagacaacgcgcgccttggggggctccgtgtgtcattccaccactgccttgcaccaagtctcataggagccgtgcatgtaccctcaagacatggcagagcagaaacagaggcacttcgtatgcgagagatgcttaagttggaacaacacagtcaaagaatcaaggtacacaaggggaatacgcaaagagagagtgatgaacgtcatttgagacagacacgcgagcgccagacagacgaaatgtgttacggctgccagcacgcgcaaagtcacagcgcaaggttgaatggtaaagtttcaaacctgagcagcacaagatcaggacgcatgcgtgggatcgtttacgacaactgtttatgagtgttaggtcacacgttattggccgcagccgacggaaaacgctgtcctagcatgcgaaaaaaactgtccactttgatacgcgctcgtgtgtacgtacgtttgcccgttggcaggctacctgcagttcgtcgccacttttgttttattgtagtctgttctcaaggactgtctaaccgaacacgattcttgtgttgctgttcgctgtcattgttgtggctcactacttggctcgcccctcagccacgttcttcctggactcgagcgaggcctcttgccgttctggtacccctttcttcattcgcgcaacaaatgcgagtcagcgtctcatccgactgcgcctagaaccagcccctacgaaatctcagaagaagccaatcgcccccctgagcggtggccacctgtgtgtcgatttttccgccggtctcgtctctgccgtagtggctttgagagttaccgagcagttcaatcatttcgacccctctgacgtggcggattactggcgcttccacaa

SEQ ID NO: 2177 - DNA, 3343 bp, Toxoplasma gondii
  source 1..3343: mol_type = genomic DNA
caagcacggacatccttctcctcggagtgctggaggttggccttctcgtccggccgcgccgcatccaccttggaatccgagagaggtcggcagagacgaagtcggcagagacgaagtcgactcaacaggagacagtctcgaaatatggaggacgcacgcgctctcgtccgcggctctcggggaaccccgcggctccgcagagggagtcctcgctccgcagcctctctctggactcgaacggtgtctttcagcaaacagcgaggccgcgctcggcaccgcaagtctcagctgctccctctctgcgggaacgtcgagttcctcctcgctttcttcatggcgccgcttccgcttctggagcgacactacaacagtcggcttctcaagggtctcagagtcaaccgacgaagcggatgaagacgagaagacggagacgcactttccaggaaggcgcaaagggaagtaaaccgagagagaagccgcgggagtcgtcaggccacccgagtccttcttcgccatgcgctgcacctgatcccaagacttggtgtacaagaactgctttcgccgccggagtctcgcagagtgaggagtcactccctcgccctggggaggttgaggaagacttgccgtcttcgcgtcgccagacacggcggggagggtccgcagcttttctccgcagcttcccggcgcttcctcgctccttcgatccgaggacggacgcccggaagacggtaccgacatcaggaaagccttcccctcggccttcgaatcaacagacaccccactgcccgagagctcaaccgccgacccttggccaggtgtacgtacacccgacggctgagacgcgacgacggcaggcacgcagcgcacgcgcggcggcggcgagcggtcgcagcgagcctcgcatgcgctctcttctgcggatttctgggaggaaagaatgtcgcgataagatacgatttttgagtctggtctcgcggcttctccgacggcgctggagcgcgaagcggaagagggagagacgggagccgaaaccgcgtccgacgacgcggtgaaggtccctagatctccctcctcggaaggctgctgcaagacgcgttgccacatggcggcgaggctgatactgaggcaaatagagacatggaatcgaagaaagggtctcggacttggcagaggctctatcactcgctgcgatgctgaattccctctctctcctcttcagtctaacaaggtcagcggggaaacgggtcggcttctcgcgtgcggttttgcggtattggagaggctcgaccgaacgaagtagaggaaacgcctctctggagtcctcggcggtactcccaagtgtatatacacctcgactcggaagcggaaactcggtggatgtcgtccatctgaaaagccgctgcagtaaagtgccacgacagcaaaggagcgcctacaaaaaccgcagcggacgaaccgtgtttgcgttgatttgaggcaggtgctcccgcagactgctacagggcaaggcgggcagacgccatttgagtttttcctcacaatgaaaggctaaagaactttatcgaattcgttgccaaaacgcctttctgcgcctgcagaaacagctcaaaaacctcgcagagagagccgccggctctgcggagtcaacgcgcctaaaagcgcctgaggtcaatggacgggcaggacacagcagggcacaattcatggctcgtaagcgtaggacagaccttgaaacgaggcccaagacttcgttcaatcgagtaccctagtaccgttcggaacgaatcgcacctcttcgcgaaacgcacgatcctcagtagttgccggaaatcctcaaaggcatccagtctcctcgctcgaactcgactgcaggaccgttctccgccgaggtctgattgtttcttgccaaaggtaatcgaagttcctctagagacgcacaatgcacagtctggctcgaatccgcacagagacgtcaggtgcaggggcattaaagagaagcgggagtgagaggttgaacgtgtagagaaaaggggaagaattgagttttccaagagccggaacagttcggtgctactctcgagaggactggcaaggcagcgagggacgaggcggcgacctggggtggcggctgaccagtgaagagcagccggacggattgcacagcacgaggccttctcagagcgactttgccaagcggttgacaaggagtggaaatgagaaaaaagaattgaaggcaacggaaggaaccctaagaaagctcaaaacttgcgctagacgggaagaacggtgagctggagaagaggcgccagccgacgaaaaggagcacggcgactaaccgcgaaaacactagccacggagagagtggaatctcaggagaagatgaagacaaagcattttagaagaactcgaagaaaaagaggtctagctcgtgagcagaaaacgggaacaaggaagctcactcgatatgttgtgctgtgccagaagacacttttcgaaggggagcaatttccggtgtacgtccactggaggtggggacccgcgtctgctttacatgcaactttttcctcaaaaacaagcgagtccttctatgagagatccctttttggaaaaggaaaaccaacggccaagcgtcaagagcagcgccgcgacccgaggcctcttcggacgtccttggctctcggcgtccaccctcgcgggaggcgggcgccccctcgctccctcggtatcgggaaaaagcgccgtttcgagaggcgcttccattttctggactctggctacagtggttttcttccgcgcttctcgagactcccttttctcgagaggaacgcggctttaaaccgctagaattccagctgcctgtcctacgtgtcctcccgcctctctcgcgtctagcgaggagtctgtgcccccagctgttcgcgggagaggcagggaggcgagcgtttgcctctccttcttggttaaaagaccattcttgtctcgaaaaaaaggaggacatttgaaggggacattgacggcgcctccggctccgtgtgcagcggccttctgcttgcctcgtgactgaagaaaaggtagacctcttcccgtctccagactcaacaagggggaagcgtagtccagtctcaaagaagccagcaagtccgcaaacgcgcgctcctcgccggtggcgccagtgaagacaagcgtactggaggcggcggtttcaggaggggggttgctgtcagttttctgacgcccttgcttcttccggatgacacgaacgagaaaagacacaaagttctgctctctgggcgttttcgagtccagtttttatctgcctttcgagacgcagactgttcagaaa

SEQ ID NO: 2178 - DNA, 3201 bp, Toxoplasma gondii
  source 1..3201: mol_type = genomic DNA
tctgtatctggacagatccttttctggtgggctctggatgacaagttgcgagggacgtcgaaaacgtttcctcatcgttctttcgtgatggtgaaacgaaactcatggtgccaattgcttcccgcagaccggtttgctcgtcctagaggcggagagggaaccgctggggaatctggaagcgggaagtgcgactaatgcgtcgaatctgcatgcatgtttctgtctacaaaatctaaacgtgaggactgaagtgaggacatcaactgcagcaaaacatccctcccagaaaagagtgtagatactagtatacggacacaaaacatcaagcgaaggtaccttgtgcgttgagtggctgttctccatccgcagagaggagacaaatctgtctactttacgttttcttctcgcatgtggaggtttcgagtgtaatatgagggggtcgagaggaatgaaagagaactggttacaactttttgtgtttgttacgttttccttcacctctgaacaagagtcaggggatctgcctgccgccgcaataaaaagtaaggaggcgtttacgtcgaggtgatcattgcttgcctccaaaggaaatgcgtgtggatggccttttttatgctcccaatttttctctgtgcctcggttttgaagagtactcacacacaccgaagcgctaaatataggtgattttttttgctagactgcgagcggcagacgctgcactttgatttttctcgttgatatttgcacttgcttaattttccaattgtcttcgatcaatcgcacacgggttatcatttttgtcctcaagagattcgaacgcattgtgcccgggcggcagaggaaaagatgccatcagctactcgcgatttctcagtagctccatcaaggtggaaacgcagctccttctagtcgtcgtttccgccttgatgcgtcggactcaattgggtattcgttgagcgcatgtgaggactcttcagcacatcgcttgccagaaaacagccacccgtagaaactgtctctcccgagtcgtatgaaattatctctggcgacatcggtcaggcgaaatgcatttctgtgcacccgtgctgtagtatctcgatattcaaaagcgcacaaatgcactgctaccagccttgcacacaaatcagtgccaccagccttgtcaactgctgcggcgcatgtcatgcttaggtaagctccggaattttgggaaagactggcattgcgacccgaccagtagcaagctctgctcgagaggcaatttgtagagatgttttgagcagtttgatggtgtgtgagaagaggacacggttggggtcctctgtcattcgagaacacgatccagcccttagaaagcatgacttatgtcggcggcgccccctttcctcgggtacctgttttgtccccaggatgagcaagcaccgcttgttacactcggcagatttgaagtgggcagtcacgagaaaactgatgtggccagtacgctccaccatgttactgcactctcatcacccgcgattctctgcaagaacagattcagagggtcccacaattccctattccacgacacactctcgcagcagtgccacaagcacaaaagggtttgtttcgacgcatgaaatagaccgcccctccagagaaaacctgtattggtgcagccattcaaagcatagcggggcatgatcaacgactgcctgctgcattttcggagttggggctcttcaaaacaaacgacgtgagatggctttgccacaagatagtgctaaatgcctgtttttccatacgaggttcgttacaccgacttcggtgtcgccctgcaaaatgctgaccgcttcccgcattgtctatgatcctgccagaatggagtcaccctcatgcccccacttcccctcgcgagtgacagggcagctcgaggtttgacatgaatggcagaagagttcactttccgaacgcccactcaagattacgccatccatctgccacaaaatattacgcgcctccgcttccactgaagtgctgcttgcggtgtcgcctaagccctgaagtttgcgttttctggtgcttcttctgtcacgagggtgatgatgtaagactggtcctttgcctttgagtcctctatcgcctcgcatctgaacgagaatgtttttgaaacagggacattttccggcacgttgagtacagcaggttcttttatgccgtcaccccccgtccaccattggtgcgagtccggcacaccaggaaagagggcttggagagtcttcttactcgtgcaactactgccttttccctcacaaaccagctttttgaagtcttcagggacccagttcttggcattgttgcattcgatcgccaccttccatccaggatacacataagcgatgttctcagtgcccgtcccgcggatggaactgaaccacacgatgttgtactgtccaaacggaaactgctgctcctttcgtgcattcttgaaaaactttggggcggtagcttggtctgcgtccattgcagaggcataggcaaatatggaaagaagcattgctaccgaagcgagcttcattttgtcaagcagagccaggaagcctggaacaatgaggttggccagagaagacaacctactgacgttggtagagagagctcaacaacactactgcatgcaagaaaaagatgcacgttcctcccactcaaacatcactggaacttttgtaatgccaggcagcagactcacaagaatcgatgttggtgccccgtgcagggaaagatcagtcacccgcgtatgcgggtaggttggctactaagacagcgaagacgaatgcccatgagagtggattttcccggactcaaggacagcggcttgtctgaaacgaggcacatgaaagaacaaaattcgacggcaactgtgcgtgtccggagagtcagcaaaaagttcgactctccagcgtatacctgcattaccctgcgctcttggtcacctcggctagccgcctttctgcttcgtgtgtggctctccccgttcttgtgccgctgcagtcgttgatccagagaggtgtcacctgtgcttcagcgcgggggtgtacacttggtgtgagtttggaagccttacgtaaaagtggggtccaaagtgcattgatccatggattaccaaacgagtcgtaaaacccccgtctttgccgtgcgttccccgtccgcgcgttttagattcga

SEQ ID NO: 2179 - DNA, 4625 bp, Toxoplasma gondii
  source 1..4625: mol_type = genomic DNA
gtctttcccaatcctcagtgagttggctagcggttctgtccctttaaggtccgacataggatgggaatcaaaacgcgtacgaatcagcgttgtgtaaccccacggacgtgcatttgatcccgctttgtacttagctagcgcttgaggggttgggtcgacccaacagaaactaaggcgcgcgacgtttgaaaagccaccaagagcagaaaggatataaattttcgttttggtagctcgacagagcacagttgtggccgctgctgcagaacgggcacatttttagaccttcaggagtacagaggaaaggggttgagcgagcacccacgcctgcggtcgtaactgcaggactgacagcctgctggcgcgcactctccgaacaaagaatacaactgtccccactggttgtcttcgcccctctctttcacgtggaacggccaaccgttttacagcgaacgggggttctttgaccgagcaatgagcaacagttcaagttttgaggaacgcggtcagggaacagcgtcgctgcgtgcaaaagatctaatcattgctcactcaggagagcaccaactgtactgcaagcagatattgccttaaaatatcgttctccatgcacataaacaggtacatgtggagtcgccgggaaacgggccgcatccagccttcccatggaacaacgatcgattgcatttgagtttcgactaaatggaaaaaaagaggcacgagccacacagcgcaataaggggggcgaagagtcttcgaaaacttaactcaatggggtcacacagcttttccatccattagcaactcactgttatgtgggagcattaacagtgttgctcgacagctgttctgaaatatatcaatcgctagaaaggcttttttttgctctgatgtttgggacacgaaaagggagcagataatcttcatgcgatgtaggattcaactgaaggcatagatggtgaagaagccgaacactctctgtggcccgttgtgaacggagtcaaagcaaccattcctaaagagtgaagctgtagctattaagagttggtttggcaaaagcattaaaccaatccggtagtaaggtataatatagtagctaaaccatcaattcattgtagaatgctcacaatttttagtgaattggttagagtaagtaagcctgaatttttaccaaatgaatcaagtactctccaacttatttttttctctgtcaagagacccatacactgcctgctgcaagtgtctgtctctgaggtggcataaaggacgaaagggaagcatttggccatttcctagtaacttctttttcttcatggctgagtatctctcagaacattctcagtcactcctcgttctggatgcgtccgtagaaagcatcttgcttgtcatttctttgtcgagtaagcgaaacggctacggccggtgcgcaaatcacagagcaaagttaccgaattattgcagagtttttaactcagcagaacatgcattcactggcatgatctaggtgaaacgacagaaaagggtccggcagctcatctgtcgcttaaagggcgtcacacatgcaaagtccaaaacaaccgggatcagaacgaaaacggtaatggcttttagcggaaagaaattattcacgaacctctgaaaccagagaaacagaacgctatagttgtcctctgtacgagtctatcgcgcgagctcgaggcaagacggaccgcgaacacgctgtcagttcgattttgccgatggcgctgtacaaaacataatcagcccggaggccttagacggggccagacggagatgagagcatacccacgctccgtgtaaatgggcaagctcattttccaaaccttttatgcctgctagtgcagctgacgccgcactccaacccgggctggtacaaataatctcagtatgctgcaactgtacaggagtcgagcatgccggagagcacctatacatttcccaggggtcgtcttcagcagacagccggacggcccgagaagattttggtcgtcagccgtaggagaaacgaaacttacagggtgtttgggcagtccatgctcctcgtgcaacacaaggttgtttgctttgaggtgaactaccagaaaacaccagggtacggtcactccagtgatcgtatgtctccttgagactcttacgctgtagcgctcctgagtcgacagcatgcagttcagaggacaattatgtggattgctcgccgccgggacactggaacatctacggtatcacagtttcagacacctcaacaagggccacaacgcagccgacacgaggaaaatatcttacttggctttctcgatatagctcagagcgtcctggacggtggcgatcttggacgcttcctcatcgggaatgctgacaccaaacttctcttcaaatgccatgaccagctcaacgctgtccaggctgtctgcatccagatcctgtacatgtccgagcacgcacagaaagcaaaccgaagttcatcgaggatccaccctggtaggcaccatggggagacatcttacgcatccctcgttgtgcgtaaccgttcattgagagcacttaccttgataaagtttgactcgggattgatccttgcacgatccacaccgagctggtcagcaacaacgtcctttactctctcaagaaggggccgatcatcagaactcgcctcgtcggcagcgaatagcgcagaagagggactgccgatgacatttgcgctaacacttcgaaacggtcctgggcggcgtgcaacagttcctgcgggttgccccaaagttccgagggacgccgtcgacggtgtggcacaaactccagaagacatgttggggcaagtgccatatcggtaattaaacctgatcaggcctggtgacacaaaacctgtaccggaacacgcgcagaagacacacaattcgagaagctctggttaaccaactgggttgttcaacgaggcagcctacgttacaacagttcacattcttccgttacagacgctatcgacatgatttgctcgattgcaactcagtatcacacgaacaaacacgtgataatggtggccactcggaccggggtcctcctcaacgcagccgcatcttactgccaggcagacacacattgggctgcagcgttgaaagtaggaccacaaggataaatcgtctgcgttacatagtctcgctaaccctgaactctttgcagcggaacactcacacacatggcccctttgggacctcacaccagaccgtcgaggcccgaaaacaccttccagggagaaaaacattcgtgagacggcgcattatcgtcatcgtgtacgaagtgtgcggatatattatacgtaggtcaggcacgtgcacccataagtggcattctaatgcacagcagagacacagaacaacattgtcgacttgcaacgactccgtccgagacaccgttgtcttaacggagacagctactgtctcgtcaaactgggttccacaactcacatactttcgtcgcacccgcagcacaagacgcctttaaaagacttaaaagtgaactatgcatactcaccgtaggaagaagcaatggatgtcgccataaacagggccagggcaaggagtgttttcctgccggcgttgcggggatgcatctccatagttctggtgtgagaggtgtgcagtccagtcggaaaacgacgtgaaatttggagacaaaaaccaaaagagcagtctacagtgccgagacaaaagcaagacgctgcattgactttaagaggaaaggacagttatgaaacgagacaagacaatcaatgaacacggatgccagacatcgcagtcgtggaggtaggacaatgtcgatttctgaacgaccccaggctccccgtccaacacgctgacgtggtgaactaagcgttacggccctgccccctgagtgcgcccgggagagcaccgaggtttgaagaagtgaaagtgactatctgaacagttttactcgtgttttttttatcagcctgaagatttcagttgtttcgttgatatgtggaagggcgtctgcagtgtatgcagccttcctgactgcaaacagaaaagtctgctcggggcgatgccactgatacggagtaaggacacaaccgcgggccaccaccacactctgtcgtgtatttagatggctggcagtctatagagaaagacccaaccatgactgtcgcagagccctgacttatttccatcaatttacagcacgacgccgattgcacacaactccggcatgagcggcaactcacaattctgtacagaagcacgttcgtccctcgtcactcagtaacaacagagttcttcgatatactaagcctcgattcgaaggtagggggcgaaacaaacgcgtactcgtctgcacgcagctttcgcagtaagcataacatccacttcaatttctgggttcgccgccgacagcagcaaattctctgacaaataaacactccgttctgtgcttaggttccttcctgcctggtagaggcaatgctgcagtgattcgctgtgtacgtacagcggacgcgccgggtggcacactccaccagaagctgccgtcaactgttcttcactataacaaggctctgttggaactatcctcctgaaaaagtcgggaatcga

SEQ ID NO: 2180 - DNA, 1977 bp, Toxoplasma gondii
  source 1..1977: mol_type = genomic DNA
catcgctggccactgcatgcgaatgaggtcggttttgaagttcttcgagagagtctcttcttggcttttttcctcctcgaactgcgcgccgcgctgcgaggcaaacgccgcgcacccagctcgagagaagacagccgagccgctccacgagagaggcgaggaggcacccgacgactgcagaacggaactcgagaaacgcgggggagagaaggaacagacagaaggccgaggactgaagtgtgtggaagtacagagacgagggtctctccaacttgccgagggcgtcgcgtcgcaggttgcggggcgttcacgagacgtcaaaaacggccggggagcagagagaccgcccagcgcatatgaagagagagagacacagccagcgccgagagagggggagtccgaacagtttcttgagcgcccagttcgctgacgcacggccctggcttccttctgaggctccgcgcgaggacagaggagacacccagctgtctccgacgcaagcagcgccacagcagaagcgacgctcggccctccacgagaagaggaaaactccgtctgtggccatgtacaggaatcggtggaagggagggcagacgcggccggcgaggagtgaccattgcatgcgtaggaggacgaggagaacgaggagatcgaggagagcgaggagatcgaggagagcgaggagatcgaggagagcgaggagatcgaggagatcgaggagaacgaggagagcgaggagatcgaggagagcgaggagatcgaggacagacgaggcgacgaaaacgctagcgaagccacgggcgccagccgccatcccgcgacctgcgaggccggcagacgaccgacgccagacaccacggcgcgcgacatcattgaaagcgagtaggaagaggtagagcaagagcgaggacagagagaagaaggaaacagtgaacaagacgaagaatacgacggagaacagaacggagaacaaaagaagagcaagagcgagaacagagagaagaagagggaggccaagacaaagaacgcgaggacgaaccagagggagaagaaggaagagaaacgtgagggaagaagaacaacgtgaggaggaagaggaagaacgcaaaggacaacaagaagaggatggaataactggaataactctgtgaagtccgatatggagagaggagaacggagaaaaagattccagtgtcgcgaggctgaccgccgcggattccgaaggagcgaggaaatgcgccttcctcgtttaatgttcctccccctcatagggagaaaaaaggacttgtggtatcgtcattgtcgtgagttcttcactgaagaaaaacaggaactgtcgcacatgcagtgttgagctgcatgcgtcgctccgctggaaaaaaacgcagcaagcaacagagacccggcacatgcgcgtgcttgactgtttttcctttcctccttgtttgtctttttttcctttttttcttgtttttttctttctttctcttttttccttcccctttgtgaagcagtgcatgaatgcgagctgggtgggagaggcgggtgcgacagtgaaaaggcatcgcacaagtcccgatgcagagagttcttgacgaagagaagaaaagcaagaaaaagttcctttttcggggagtgcgtccccaagctggagatgcaagaagaaggcgcgaacttctttcttgtctctcctgttgtgcatgtgggtaccgcagagaagagacgagataaagtcggtgttaccaacggccctcatggcgaatttcgctgctttccactggcgaccatttcgctgtttcgccccgcctctcgatcttgtcaaatgaaagtttcctcgtcttctctctctccctttctctctcttctcccccttcttccttttgctcgctccggttccttcgcttgctgacttttctttctttcacctagcacaaggctgcctgtctggcccccctctcccttgtcttcttgcagcca

SEQ ID NO: 2181 - DNA, 1689 bp, Toxoplasma gondii
  source 1..1689: mol_type = genomic DNA
agagagaaaggtaggcgactgaggaggaggtggacgaagagaaggaagtcggagttttgcgtccgctttttggcaatggcaaagtttcttcggcttccgagaattcgactcttgttcttctttcgcttcctcgaaacagtcgcacagagaagacgcaggggtccccgaggaaagagagaagcagtcaggaccagcagagacacagagagaagaacgcggagagaacgcagacgaaggaggtgaacgcgaggaaggacgagaggaagaaggaagaaagagagacaaagtattcgatttttcacctgctgtgtggggagagaaggagccgcctgtgagggaaaggacgtctgtggcgacagcagagtctcccatctttgcctccacttcttctcctcaaatcttcttcccttctcccttttctctctcctttttccagcgcctttgtgcgtcgccgagagaagttgccaaggaggaacggaacctccaggcgcgaggactagagcgactttgaaaagagagagagaaacaaaagaaagacaaagaggagacaaaagagagacaaagacgagacaaaagagagacaaagacgagacaaagaggagacaaagagaagacaacgaagagacaatgggggtgggcgacgggggcgctaaggtctgctactggagaccggtggagcacgacggagctttgaggactggtgtgaaggaagaaagagacaggcggagtcagagagaaaagcgccttcacaactctttcagagagaagacaattttccagcgtttttcttttttcgcgacgctcttttctagactgcacatgcgtgtgtcggcgcagaagaaaacgctcttttttcgcttgtctcaaagcgctcgagcatgtcaaatgtctccctagagatctttctcggagagatcttcggcgacaagaggagcgaaagaagttgaaaaaggagaccgcggtgcaagccgggtgtctccggcaacgtctggcatgggactgtcggccaccggcgacgacagcacgaggcactcttggctccgcgtcatttctcggcgtttcttcgaaaaaatgaagcagctcgagagatgtattcatcgagagagagagaggagaaggaaaaacgcgcaaagagacagagaacgagtacacaaacgctggccgagcctcagaactcgaaaagcagctgcgaaaagcgggcgcatgcagagcaagcgctcgcggcgctcgggtgtctcgacagccgagcgacgctgtgtggggctcaaggcggcgatgcagagagaacaaatcatttttccctctcctcattttttcgttttttgcggtggatttctcgagaacgcgcgcctgtagcctggggagctccacgagcgagaggaggggcagaagccgcgcagcgagcagcttcaacgcttgcgggtccttgagtctttttccggtgctgtgctttcgcggttttctttgcagaaacgcggccgtctcctttaactaaaaagaggacaccgagagaagatagatataaagtctggagaaaaggaggacagttgagggcagacgaaaaggagggaagaagagaaagcgacggtgaaaggaaagagggagaacaagaagaccaagaagtagccagcagagcagcaagaagaagaacaagaagaagaacaagaaggagaacaagaagaagagaga

SEQ ID NO: 2182 - DNA, 3203 bp, Toxoplasma gondii
  source 1..3203: mol_type = genomic DNA
gaaggcgctcgttcgtgagatttctccgacgcagaaacattctttccgtcaaccctccgggagatccaaggtcgcctgtcggacgacagcgtacgcgggctcgcttcttgactcttcaccatcttgagagaatcgagatgtacggtttaggtgtcagaactgtgttgtgaatctttgggggtaacctgcggatacacttcatcaccctgtaaaagaagctggaaaattcgcccgcaacttgcgcgccgcagtggctgtcctctttgagggagcaactcaacgtctgctgttaagcggttgagctctcaaaacgttcaacggatacgttctaagagggacgacttctgacgcgaaaatggcggggaaccgtggggacggagggcaggctcgcgagtgtgtcgagggcacgaccaccacattttttgtctctgtatgaactgtggaagcaacacatctgtaaggtagaccacactgatctcgccttcaaagagagagcccggctgaaagcgaacccgctgggaatgcaaccaaaaactcaggattcgtgcgaggaagtgcgtgctctctcccggcacgtgtgcacacagcagctcgccgatacagacggctgaaccttggggacctaaagggcggaggcgagtagcgggaaactgcggagaaaaaacatcgatacagatcgtgaacggctgacgatcttttgatcgagaacagagagtcgaaactttacacagcatccaggggaaagttcgggcgacaccagcaggttccacttccacaagaaggcgaccttcggcttggttcgacgcaggagctgcctcgctttgcagaataagagtgatgagatgaaaagatacgcggagacagagaacgagagtaaatggagaccaaggagaactcagttctgcaggacatgttggctttggaaaggctggcgagtcgctgtctcatcggcgtgcctcgattttctcagtcagcgtagtgcctccccccatggagaggcagtgttcaagaaggtgaaaccaatttcttgtgagaaagagaaaaagatgagaacatacaaagaatttcaaggtgcagtggttcagaagttactggctcttccaagcgcgcatgtctgctgatgtcgctatcgcacacgcccttccccccacccccccgtgtaaagaaccctgcaggacactgctgtggctcgcgcacatccttggttagcaaattaaacgttgacagaaactcttcatgctaaactgtgtataaccgtaaccatgtgtgcgtatgcatgcgttttttgggaactttacgggctgatgtcatcggtgcaaagtctcccagtaaggagaggttgctgtgttttcctttcgtttgtttcgtgccacacgggcgtgcaacccagacacacgttggggggaggtccctcgtctcgtcctctttttcttctgttagctgttgcactacagccgatctccatcttctctgttaaaggaaaaagacaactcgaggcggggcggcaagccaataaagtctcaggtaatttctgtattgaggaccctccagcctttatgtgtaagattgccgctcgacaacgtacctcagcaaagactacactccctaatacacgcagcaaaaaattggaaactgttggcacgcgctgcggcagctgcacagcaggacacctggtatccgaataacgctacgcgatcaccacaaaacggggagcagtggaaaaaaacagtgaggatcccttgacgggttataacgctaggaagggacgggactgttctgaactgacgaagctgctaaactgcacagtccatgtggatcaaatacgttcaaccacgcattctacagagaaatttttctgaaagctgtagaacacagaaagaatgaaaacaaatgcccggatttattggaaggagaaccgtactcccgagaagtgcgacggccttcgatataacgcttctaaaccaagcaatgcattctactccacgtcaagacagagacgcacatcactgtgtggtagctatcaagtgtgaaagcttgctagtccatacacgggtgacaaccagatcttttcgaattcttgtgctcaagaggtgtacgagaaaaagccccgaggaagggcacatttgcagataagatgccacccgtcagggatgtccttgaaacaatgatgttcggcggtcaaaacaaggatgaatacagcgcttgcctcagttcacgcggtttgcggcgatagagtgttcggagtctactcgtacaacgcatgtgaatcgctacttctattccttctgaaagaatctgtcgaagctatactcacgaacaaaagttcaataagggcacctccccagttctccctacctagcgagaagaatcggactcagcaagtcatgttgagacagccaacggcactgcgctgcatagcagcgtcaccctagacatacttagtctagctataagattggaaatcctgcggccaatatacctatcagagtctactaaatactgacgtcgtccccgatcatttgcatagtctgtagtcagcaactccttcacgaaactacctgtgccttgtatgtggcgtctacagtagtgtgacagagctatttgtagcttgcaacgataatgtgggcacgttgtcatcctaccttttctaaaaggaaaacaaacctccaatcctcaatgcaaaagagaactccacatgggcgctcatccaggaatttctgtttcagagtagcgcgtggctagctgggcttccgaaaacagacacagctagtggtctgcccgactgaatccgtttctgtttctcgagacactgaatgaggctaggccacagacctaggcacagattcaagtcatgctccctgtccatcaggagatatgcggtcagttgttgctgccacttttttttaagttgaccaaagtgcctcagcggaaaactttgtgaaaagtcaaccagttgcatgttcaaatcatattgtggtaatctttgcatcaaccgaggtgacagccggctgaaggctgtgaggaccaggttgcgacttgttttagctagttgaaaagcgcagtgttgatacgtaaagtctgttgatttggttgtagtcggcttacggccgcagaatagctactgggatcggaagcatctcctagcattttctgtgaggtttttcagcgacctgtggtacgtctgcgcgtccacatacgcaaga

SEQ ID NO: 2183 - DNA, 2267 bp, Toxoplasma gondii
  source 1..2267: mol_type = genomic DNA
ccttcttattcgccatgccgagaacgcgcaatttgtcaccaccgggccgcggtgcccggacgccgactgcggggggggggacgacgggggcggctttcgcggtgactcctggcgctttgggaaggtcttctctctgcccgccgacgcccgcctccttcggtcgcttcgcctgcgcaaggagagacggcggaggtttcaggcgaccgtcacgctgaggctgagaaggtcctccaccaccgacgcctggagagtctcccggccccccagcggagacgggaagagacactcccgagcctggggaccaggcgcggagagccggttgggcgacgaagatgtcgcgaggaggcgagacgcgcgatcctgcatggacggacgtctccagcagggtgtggggagagtcctcgctgcctccgatactggagaccagcgcagggcctccgccggcctcgctcgcgggggcgatggagaccggcgcgccggcgagcgaggccggcggcggagccgagccgggagctgaggaagcagacttctggaggcgcgcgcgaagcgcatgcaaacgactcagcttctcgccgacaaacgccccctcgggcgccggcggggcgcgctgaggcgccgcaggtccccgtgcatgcagcgccggagcggcgccggggacggaggagaaggaagaagaaaacagaggcggaggcggaaaggacgaagcgtctgcagaagctgggaagggggcagacggagggaagtgagggagtccagcgttgaacgacaagggagcaacgccctccccagcgccacccgcggcaggcgcgccctcacgcggcctcatcgtgaaacagagtggatcgaagcgacgagagcagagtgagaagaaaagaagactgtgaggaggcaacgcgcggagaaacggttgaggaaaacgaagagaaaagagcaaactgcggagaagcgagacaacccaactgtggagataatcgagggaagaaggagaaaggcctggggaaagaggagaaggagaaaggcctggggaaagaggagaaggagaaaggcctggggaaagaggagaaggagaaaggcctggggagagagacaatacagcaggatgggggagaaagggagagaaaaaaagactgtggaggaagaagaagaaatgacgtgagtgacatatcgaggatggtcgagtgcccccttgttccttcagttctcagacaagctgcggtgagcaaagacaggaggaactgaagggagtgtgaagacgcgtcttctccttttttttcgcgagagaagagacgagacagaagagagaccagcctcgccctcgccccccttcagttccttttttctcgaccttcctcgttcttttcctctctttccgttccgcgttcttctccggaactacacggcgcggcggggaagaaaacgtctgcgtcagtgtgcgtgagagagtctcgacactcacggcgagagtctggcgaactttcacccgttccgtttgttggttttgatgttctttctggaaaaaaccatccggaaaaacgacgtgctctagctgtctgccagagcagcaaatccccgaagaatccacggaagtcagggccaccgcagcgaagaaagaagacgccgaacgaaagcgcgcaaactccaggaattcgttttcttctggaccatcttcattgtttccacgcgcgcggccattttttgctctgccgttcgtgagaaacagcgctcgctgtccgcgttcaaacctgagagtcttcgccagctttctgtcgccagctttttcgtttcttcgcgcggcgcgcgctgcggccctcatgcttcttgtgtgtctcatcctggaatttgcgtgaaaaattgagacaaaatgttgagagccggcgagaaacccaagacacagctctcgaagcagcctgattgtggcgagattttctcaatttacaaagacgaaaatcaagcgtctaccttgccttgtagcgtttgtatactccaggatatacggtgagagccgcgcgtacactggcgttgctgcacacagagacagcacccccccccctttcatgagcagagaggcgacgcatcctcgccatcatcggctttattctcttcgttttgtctgtgcgcccgatccctggagtcgcgcgagtgaaggctttcttctcggaggaagagaagagaagagaagaagcggtttcgagaggaccggaggaggcaagaagattgtcttgcgctggagaaggccgagggaagaagatggccccaagagcctcgca

SEQ ID NO: 2184 - DNA, 1571 bp, Toxoplasma gondii
  source 1..1571: mol_type = genomic DNA
tgcatgtaaaatagggccacagacagtcatagcgtccgtggtaaactcacgttgcagacgctgctttggacagcaacgagaaagctactcgagcgctcgttattgctcgagcacactcgtcttcgttcacgaggacgatcaatcagcattggacctgggcggctaatggaaattgtttggggtgcgggaggtctttgttatatagcgctatgcaaagtgttctgttttgagagggaagctgacagtaggcaaaatcttgcgatatttcctccccgccccacaatgaaggcggcacgctgcacatcatcacctgcgttcaaatgcgtcgaagtggcactttgtgtgcgttctcgaccagatctcatggctggttatactgttgtaacacattcatattagcgactacatattgtctcctatcgctacagactgcatcgaggcgttttcgccatacagctctctgaggtctccaaactggtgacgagcaaatatcttaagatgccacgcaaaaccattttctcagtgccaaattcttgcactgtcgcattgccatgcgtccgtctgcgggaaggaacccgcttgccactgaaacacggttcattgggtacttactgccatagaaacaactgagtatcctaaatgaatcaccttcgttccctcttcaggttaactaggacaaaggtagtacccacgttgctttgttacctgttagtgtcgttggtcagctggcggcagaagggccagaggggcaccatcacaacactataagaaacacacagggttggagcgttgttgggtacaggaaatagaagtagcaatagacactttttgcagagcagttcgcctcttgtatgttgtgtaccatcgttgacgccagagaaagacggcaaaagtctcgtcattccagctgtagcgtggaaactgccacaggtggagcccggtagcccgcgcaagtgggtgaggccagacccgtgatacagcactctaaaaattttccttttgcaaaataatgcggaaagatgttgctgtgcgtctttgtgctgaaggaaatcttttcggccagctaggtgtgacaccccgcgcgactgagttggcactattgtctctatccagaaggcctgcgcattgggtcgtcgcccacactttattcttcattgatcgtgactgcggcgtacgtggcacgtcgtttaaatcgactcggactgttttttccaggacaaacaggaactacgagcgcatggtattcagcgcattcggattcgaggaccgcgagacagccgcatgcagtccaccttgtcctcagtcccaatgcatgtttttccagtttgcgtgagcgtttgaaagtagccagaagcagaactacagcatcccagtgacacagtctgcgcggaaactaggcctctggaaatggtaccagggattttgtcgtccttttctgcgagccttgtcacaacggggcgtgacgcagccgctgtacaaatttcaacccttgtctactcctttggagatcgaatatgcgtgtaaggaactagaagaagtttaaagcttctcttttccgccagtctgcttca

SEQ ID NO: 2185 - DNA, 2439 bp, Toxoplasma gondii
  source 1..2439: mol_type = genomic DNA
ctaaatgcaatgccgacgaatgccacgaaatgtgcagcgcagagaaactccgtccagaaggctcgtacatgagcagacgtttgagagacatgatgatccgaccgctggcaaaggggtccggcgggataatccgcttttgccttgcgagaagtgagcgctgtccgaaaatcagatgctgaagaaactcgctgttccacgcgctctcaaaaagactcataaaagtgatacatccaaagcaaaaggtccagtcctagcgtcagaacacatctgcgaggagggtcccgcgacgcgacttcttagaaacgctcccgcaaaataggagacaacgtacgcgagaaacatcgctgcacaaggcgatacaccgaaacacacagaaggccgaattctcgcagaggtccatcaactgaggagaagctgtgaacgcttgggcgttcgtgccgacccgctgaacacacgggacaacctgattcatgcagtttcctctcactccgacaggctctcagggtttgcgtttttcgctgctttccagagaaacgcgtttttcaactgtgcagaacggaagacgaaaccttctattctgacaatctcatgaggaccaccacctcttttaaagagcgcatgcacgagcgcgtatatttgagagtttcggttcaaagatagaggggtgtgtgtgtcaaggagcgcctacgcaagaaagccgtttcatacatgtctgaaactgtgtgtactcgcccagagggaaaaggttcgctactccgtcttttccccgttatttaactgtccgctgtacctgagaaaagaaaagctggagaggaacttgaggcctgggtactgcgctgaaagtgggctgcgtgtgggaatcaggtggctgaaacgaaatgcagattgctttcgcggagtcgtaaacacagaagggggaaccaaggaggaaaaccggccgaagaaagacttcgcggaagtcagtgtttttgcaaggaaaaacgacccggagaagcagtggaatttctcttttccatgcgcgccgagccactttttgccgtgaccagcagtccgtttatttgtccgccaaaaagcgcgaccgtacaacgcccccaaacatgtagccaagcaaagacgcggcagcactgggcaagacaggcactcctgtccgagatacatctgagaagacgcgcagagaggaagcatttgcgcttgagaggctctcgaaatcgggtccaaccgtcgcagcgtatcccaaacgcctgctttcgtcgcaatccaaggacgtctgcccgtcccgccacgaacagcactctgcactgagaacacaaactgccagcggatctgccagctttcttctcggtctgacagtcacgtcggtctccctctttccccaaatgaagaagcatagaacctcagacaacctgcgcactcaacacgcccgttttcaacaagggcgctctgcccaccgtaagacgactcgcgaaaaacgcattggttcttgccacggaaagacgcacacgcctagaaagccgagacagacagaaaataccgtgaatatgggtgccgaaccagccttttcaagtgccctgttactcgtgtgtgctgtgagctgggaaacgggtcggcgttcgtcatcgtcaaaaagggattatttttcgaggctttttcgcagcgcatgtgacttgtccacagcgcacagacgagtagatgcaacactggcgaaacgcctcgtctaggccctttgcgggagaaaaggcatgctagagattccccaaagcgcacaataaataacgccagacacttcagcagacaagaggtatctttctgtgtctagcagcggttccatgaagtcacttgcagatcttgtgggaagtcccagggtcgccgagtcgccgctcgcgggctttttgagtgtgcagccccgaaagagcctcgattttcgttgacttcccgccggccttttcttcgccttctgcttctgcttttgatttattttcttctgttggtatctctgtcgcctttgcatgctgctcgctgtctcttcggcttcgatggagttctgaaaaccccgcgacgaccgagtcctcggccccttcgacagcgttgcacatttcgacgaacacacgagctgtgtctcccctctcttcgctcaaagcgacccccatttcgtcgcctgctgtttcgcccccgtttctccttgtctgtcgacttgcaccatgtgaacacgcaagactactgggagttggacgatctgctgagcgtgactatgccagtcgtcaccaaagaattcggtagctaaaactgtggaatcaaggaggcgccaaccgtcccgagggcgagtattccctgtctgtgcatcggacactctgttttcgatttcttctgtcttcctcgcgcgtagtagagagccccagatgcgatgagaagcatctccctttcacctctgcgtcctgcgaa

SEQ ID NO: 2186 - DNA, 1570 bp, Toxoplasma gondii
  source 1..1570: mol_type = genomic DNA
aaagtagtcccacaacgagtagtctcttcctggctttacagtgacaggcatcgtgccgaataggtcctctcagttgtatcaacattgcaaataacgggcgcacttacggggaacgtccgcagcaccacacgaaaaagggtatgtactcggcagcaggtggctctctgatcgtgctccagcttctacagtggttgcagcctgtcacaagacactccttaagcgtctggcatattctacatgttctagttacttcatcgtgcaacattgctacgcctcactaagtagacaatgcagcgactcgacgtgacttaagcagcacatcgtacatgtgcacgaagcctgtctctgaaagcgatgggaatgcaccgggcattcaagagcaacatatttattttttttcactgttagttcattctagacaaagaagttgatgacacatctttgtcgcagtcaccaaaacacatttttcgaacacgtacaaggaagtctaccagcagttaactgtcctgagccatgccactttaattttagtgcatcaaaagaaagatgacactcgataatagccttcggactcgtcagcagagtcgaagagaccgggggtgtaggtctgcatagtgtctgtcatggtgcctgataacatactgcgatctatcaccgcagtgcagcagcgaaagaccgacttggaaactgtcttgtccgcgataaacgagatcatcaagccacgaactgctgaagtcgtgccggtagaaggcgcgaccccctcccacagattcgttgaactgatacgtcaccggcgacgtacattgcctgccaaagaataggtagaaagtagcttctacgttgcccttcattctgcaaagacaaacacagtcgtcaccaatgaagtgattgaaaggtatgctgcggcagatacagccacattttttacgcaacactttagtttcctcctgaagagctctacccgtggcaatgtcatcgttcttgttggccggcccgccactcaacaagtggacacacgactttcctaatctgcactgccgattctgctggtcagcgggaattcctgttaaacattattggtagtgtcataatgcgataaccccagcatcatcttaaatgctattgctgcagaggttattttcaaaagcaaagcaaggtcaggctacactcaccggacgagcaaagccgggcaggcttttctgcgggtgctaccggtgtgacttttcccagcgacggcttcgcggtgtttgtgttttgtcccaaacgggtacaggataaactgcagttggcagcttcttctattttcgcttcgcaaccatggactcacgatccgacgtggcagcttgccctctcgagcaagtaatgctagattcggtaccacccagcagatcatgtctgtctcatacaggccagtaactattgtcggttgcctgtcgatcagtagggccagtgacgtgtgcaggagcatgttgtcgtgaagcagatgagcgttcagtgatgtcagcttctgtacttttcgatttctctgaacgttgatacggcaagaattcacaagcaggacgagagggtt

SEQ ID NO: 2187 - DNA, 2421 bp, Toxoplasma gondii
  source 1..2421: mol_type = genomic DNA
gtccaggagatggagggttttcacagaaacgcgtttttcgagattcgcgccggcgccagtgtttagacagctcaaggaatacgagaagtgagtcgtcaggtggacctcgtctctgcgtcgtcgtgggtggactgatgatcaagaggtctgaggagacttgactttcttcagaagcgttttgagcactgtttaggaaagaaaaagaggcaggtagcctgttgtgtacaacgcctgccgcggggagcttggcagtacgggcgaggcagtctgctgtgggacagatatccccggaacgcgtttcttgtcttttcgaggaagacgctcgacaaacgtttgggggttcaaaggcgatttccttctttcagactcaggacaatgaagggaaaagaacaaggaagtaggaatcgtatgaactgacttaaccaacgacagaggcgcgcatcgtgcagttgtaaccgctttcgtttactccactgcgagacatatagcgtcaaggaaagcaccagccttccttttctttctactttgaaccaacagaatctctctgggagacgtaggagacgcccgtgtatgcaggcgccgacaagccggtaacacaaagacactccgagaacgcgaaaaatggatcctgttttcttgtggtcgcgatttcctacagaaatttccagggaaatttgaccatccacgcgtacaccgacatgtgtaggagcatgcggattgtcgcaacgggcaagccagttgacagtgttgtttttcaccttccgccggcattcatgtttgcttggcagttgtcatcaacaactgtggctccgtttgaacacagttctcgtgaccagggagtttgttccagtgtggacggacgccttctcttcttcttgcccgaggatcaaaacattgcaccctccttcttcagggtgtcgctcatgctggccttcttttcagtatcgaaggcatccatctccacgctcgtatgcaagaggtctgtctctccataactgtggatatacagatagagacgcatttcaagatattaaacatgcatagatatcgaatcgcaaatatatcggtagatcggtagacgtacgaagtgatggagacagacgtaaggacccattttcacctgcgttcttatctgtatgtataggggcgcctgacggcgcaggtgaacgcagtgctctctgaatttacttctctctataaagatatggcgctagatgaatgtaaaaatatgtttccaacttggtgaagcatacgtggatcgtcaacatcgatttccgatcacgtgaggtgcactggaacaagacgcttgaggacggcacggtgttggacagcgcgcatgcacagagaaagagctttgaaaaacagagagaatcctttctgcttctcgatgccatccattcagaacgcctgcatcctgtaaaccgcgtttttcgccgcgaaaaacgccgcttgtctcaaatgcggttcaagcgtctgggtctccctgcctcaaagttgccgagaagagacgtgccatccatctcaacagcgcgagtggaggtcaagacagctgcggatttcttggtttctcgcagcgtttttctcttcactaaaaacgaacgagcttgtttcctatttcacagaaaggcgttctttctcgttctttccttgccatgcagccagccgtccccgccgtctcccggttgcgtggcgcgggcgctgtgtctccagtgtctccaggagacaccggaaaggagacagcagtggggtttcgccagtgtttcggtatttctcgccgttggcttctcattcgattgttctgagacgcgttctactgtctgtggcgtctttttcgggcagagaggcacctcgttcgtgacttctgcctctctcactctcgtcgaaaaatcggctttctccgaggtccccccggcagatgtcttttcaaggtctcgcgatggtgcagaccctgcggtccagagaaaaacggcttgcgtctctctcctcggttttctctttcttttcatttctacttttctatcttcaaaaacatacatgccatgcacgtaaaactacgcagctgcatttgtttggggatgccggtgtcgccggctgtctgcatgaacgcatggtagctctgtgagtgccgatctgtctctgtctctctttcatggtctgcctctgaccaccgcgttcgtcgatctcctccttctctttcttccttctttcccctgtctgtgtctctctcgcctttctaccgtcttctcgctgtctctctccccccctcccccccccgcccgccctcgtcccccccccccccagtcgtctctctggattgttctgtctgttctgacgaagaggtcttttttcctgtccaaaccgtcgttcgaagtccttgacttttcttctcccgtcgcgtctctccccttcgcctcgtcctca

SEQ ID NO: 2188 - DNA, 1254 bp, Toxoplasma gondii
  source 1..1254: mol_type = genomic DNA
taacaggagttggtggcatgtctccaggcctggtatgtctaggcatgcatccatcatggcagcgatggtgcgaaatgcttttcgtaaaacatgaaccacctggcttacagatgtatttgcacgtatcactgtcgctaacagcacgcagcgtgttcattccatctttcgagtcaggatgcgagagtggatggacgcaggtcaaagctgttttctgttgaatgcgccagcgtggaatgtccttctcggcttgtttcaggacgagcacccaggcatatgggctacaatgtgcggctgcgggggacggcaaggaaaaaacggaaccgaggttgtagaagtagtcgacgcgggtaaagcggagctgaaccctgctcaagcttcttaggatacacatcaaactcgccacaaagaggcagagtctgcaccggctgccgtgccgaccggtaaatcaccggacacgggggatgtgtttggatttcttttagtaatattggcgtttaaccgatggtcttaagcttttgtgctttcgcaagagcgttcattcgctagtgaacttgtcaataccgttggttggttcgtggtctttcctcgtttgagagtttttcgtacgcccgacgggagtgcaccgcaaaggccaaaacaaagatttgtcgctcgcctgaacgaagtatgaagagtcagtcgaggcggttgtgcacgggaaactggtgctggctcttacagtgcatcgtacggccctgcctacggaaacctagagttgttaagttctaaagagaccacctcaactacttctgcgtggcggttgaaagctgtcaaagactcaagcagtttcctgccccctagggcctggcgcccaacgcaagccaattttgcgtgcggaatactgactcagtgttgcagagtgtacctctcgaaaaaggtgtctgcgattatcaagaaacccgctggtataaattatgtgtctcagctcttttttgcaccctgtttcaagcagggcaaccttcatgtgaaaggatgccttgcggcactctacgacagcgaagacatgaaacacgcaggaagctgatcagctgcgattaacgttcggtgtatgtacagctacttcattgtgtcccaagagtggccttgctgagatgatccacagttgtggttaaagcattaatgtgcaaacacaccgagactgtttttgataccgctgtggacagcccgtagctgcaacttgataacctggaagtttgcttgtcctaagtggggcga

SEQ ID NO: 2189 - DNA, 4229 bp, Toxoplasma gondii
  source 1..4229: mol_type = genomic DNA
ccattgagcattcaacgtcggttgcaggtcttgtcttgaccaccgaaggcatgatggttgaggaggaggagccagagaagcattcacgtgatgtaccagacatgccaatggcatgatgttcaaataccgcagttaacgagattgtcctgcctgacagggcttttttgtatgcttatgaggtgcagctgaaaggttcgttttcatcgaatgtaaatctcgatcccggacacctgacaggtgtgtgtcatttctgctgcgaaaaggaaagaatgactgaggtgactcactccccaagattgatcgaagggatcatcttcttgtatctgaatagtttttgaacttcactttcgtccccgggctctacctaacttgccgcttaccgtgctccccaagcctacagttacatattcttgactgtgcaacacagcaacatcaatcggtgctgcaaatttcccttctccaacagctcctacgaagaattcggacgtaacctgactgcacaacgtcatgtgacgcgtcatctaacctccacagacatttacggcctcctgttccatgtcctgcgaatggctgatgggtcgtttcatcctctgtagaaaaccaaatacacacaggtttggtgtgctttaccgctctgcccaaacgtgagtgagctgtccatgttcgcctggtcaggaggttgctgatgtaaatccgctggaccaacgcaaaacggtaaggatacattaccaatgtccagccgcatgaaacccgtttctccagcctaacatcgttggagaattcccggcagccgacaggaaaatacgtttcctcacttacccatgcatcaataaagtggaaagtagctttgacacgcaattcagtatgaggtggcagtcttccgaacttctttgtaacttcgccctacactggagtggtaaaagtttgcttttagatgaaattggaatttcgtaatacccttgcaaattttccgaagccacccagcatggttattccagcacatttcgatacgatatctctggatgctggtgaaaagcatttatctcgaaggatcatttgccaaaacagcaactgacacaccagtgttatcccagccggttgcttctcctgaggagagatcctccctcgcagcgatacgaaactgcttaaccccgttgacatgcaagtcgcccctcaagtcaagagatcttgaaaataattgtaatggaggtctgctgtggagaggtagcagatcgtgcatgattcttacgaggcagcgaagttcgtggcagtcaccgtcatgttatcttccgaatcgacctccagaagaggagatctactactttctacaacgaaacgtccagaagaatccatgccaattgcatagtacgtctcttcagatccaacgatgatctgggaaggctggccgtcagctgatccgactcgcaacacagatacggtcattccgctttgaactgtcggggccaccacagcagaaaccggtggtgcccaggcaaacaacaggcagaggcctgtcaccgtagtcagcttcattttgatgttttacacggggattctaactctgcattcgctcccgtgacaactgctctaactacaggcaaggatgatctcgagacaacggtttccacggcaagagacggagacagcagggagtacgtacacacaggttgtgccagtctacgcttggccactctctccgaggctttcgcacacaatcggctgaccccaaagacgcatcatgttaacaaaaaaaatcaacatgtgtctgagagcattgtctgcggcgtttttctcatttgttctctgcgtcagcaccgtcaccgctgatgttcgaccgaaattcatacaggtaaattccttaaccgtcttgttcaccgccaacctaatcctttagacgtaattttacacagatttcccctgcctttggtgctcggaatcctcccccgtacaccgtcgttaatattgtcgcggaggctcggctgccttcggtatagtgacctcacctcttcccgctccagtcggagtattcatttgttgtgcgttaggattttcttgaaggtatgcatctcagttgaacgatttccaggcggatgcaacgtgactgaatgctgacttgctcagaaatgaagcttgtcgaagaggtaagatttgaaagaagtacgccggagctagattgcataccacatgcctatcaagagaaaggcccagagtcgttttcttgcggatgttgaccagtgagcaaatacaaggaaaagctatcgtgggtgcttgcaaacacagaagataccttccaggaaggcaaaagaagcctctcaagtctttcgttcactaaagatagacaggcaacggatctccagtgaggcacttttccccgtttgccgactactacggaaatgcgtatgtccttgtgtcaggaaccttggatgccatcaggtctcaagtgctgaattagatctgctcatccttccagttgtaacgaatctggatcccagccacatgatcaggaaagttagttctctcagactgcaatcacaaggggatttggtgaggtttgcctgagaccatttcacggatgtcacgattagacaaagcggctagtggctgatgactgctcaaacttcccgctttcctcctttcgacgagagattcccaggggagtttgagtctccaaacgcagcttgaaacattatgtagcagatggagaagtgaatgcgtttgttcttgtgacactcatgctgaatttaagttgccatgaacggtttgacaagtgatgttttcttagggtacctttatcagtcgttgactctttgaaaggtccaaactgactcaggcacactggataaaccgagttcatttcgtgtagcagtgttctgcgattccactcacatttgcagctcaactgtttttcttggcagcccaatttgcatttgggtgtatcactacaggacagggggagaatatgagtccatagaaagcttaaagagcaacaacaggaaaggatagccccctgggtcgtcccccaacttctgaatctaggggatttttttctctctcaacgacctggactgggatgagcatatacgtgggcctgcggtactatcatgccttccgtggagctctctttgtttcgctctagtgcgtgccagggctgggaatctaattcgtcaagcagtattcatagctaatgctttatcttcttccgtttcctcgagggtattgcctagaatttcttcggtcgcacaaaccatctcgatgcttctttgttctgtgcctctgtctgcttggtaaaaagaatgttcagtgtcgaggcctatggcatcgactcgatgtttcacccaatcatactataatctcactgggaggaaatcccttcaccgaatgtagacattgggtggcggctgcagagagcaatcacatttttggaaaagggtgagtggtcgtagatgctgagagtgcaagttaagcgtgtcaccgatcaagcacactgtccatgtgacttcttcctctgcggacttgaagcgtagctcaccctgctgatggcgccggaagatacgttagtcaagtacttcccacgacacagtataatgagtactgctgttcgtgtggcatcctttaaagcacaatctctggacaaggaaagctctttgcctttaaaaaaactattccctttttaagtcctgtcgtattagtttccggaggcgggcgggcactcgtgaaatttctcctgtcttggcggtagagtcgtcacacaaaagcaactagccggtctaagacgaccaccgatcatccttgtgaacctcagtcttcggatttcatgaaacgaatttacaaacctatcggtagagggactagctgtttttagatggacgcgaccataggcattgatccgcgatcgatgctagttactttccctcttcacatgtgtctgcgaaccccccaaccccttccccgcttccggatgcccggggctgtcttgcgactgtcttccgcttcagtggcatgcaacttgtcatgtggctggccccgttgtcctgcgtcgcacttccttgtaacatttccttttaggtttcctacttttttgaagttcgtctgtagagtttcgtctccaagggactgggcagctctacgcagtgaaggcctctcctgggttcataggagggttgaccttgcctcaactagtcaatcggactaacttaccctcacctcttcagcgttttaaataggcaata

SEQ ID NO: 2190 - DNA, 1870 bp, Toxoplasma gondii
  source 1..1870: mol_type = genomic DNA
acacaccagtagatacatcttgacagatacagtcatgaacaaatgcatgtatcggtgtgatttgaggacggagaggcgccggcgttgatggaggtgtgtagcaagcgagagagaggaggatgtaagtgcagagaggaaagaaaattccgagagggtctggagaaatccgaagagagaaaattcacttatgcagcacagagaatcactcaccgatctccacatctcccgagtcgtcgagagacggctctgctctctcgcctgcagagctgcggcgtctcctgctctcctccatggccgagagagaagcggtaaaagccagagaaaagacaaaggaaggaacaaggaacacagacacgctagggaagaacaagaaagacgagaagaaagagacaacagcgagttgggaggaaaggggaaagcaggagatagaggagagacagagaagagagaacgaggcgactgagagaagtggagactggacggtcttgacgaaaagtagacgagacagctaggtttgtttacaagcagccggagctgaaggaggttgtgaagtcgccgaggaaagttcactcagaacaaacgagacgaacgctttgtctggaagagactttcgagcgttactctcaccgtcaaaaaagcaagacacgaggagagagagcagggcattcagaggaacgacaggacctgagatggcgctctttactaaaacgagttgcaccgagccggtgcgcaggaaacgcagaagaaaggtctcttctactttctggaaagaagagaagacggagagagaaacggagaaaagaacacgaggccaaccacgctggctcgccagctcgcagctctgcgtgtgcatgtccacgcggcattcgagagaaagaggaaatctctttcgtcctcgccatggttgggcggaggactgtcagatgaacaaacgtgagtagagttctctgcaaaagtgcctgccggagtctcgccgtgtgtgcgtcctttcttctctcttctgtcgctgcatgcaaggactgcgtggactgcatgcgcgcgagtgatccttcggatctgactcaaagcgtggaggttcaggtgctctgtttgaacttcaagtatttctcgccgtccatcactctcttcgaacctccatgtgagctgagtcgcgaacacacacagctggcgaccgaaatcctggctcaaagttagactttctcgcgttaggacgtgagtggagggatcacagcagtcagaaatgcgcagaaaggaagttccgccttttcctgtttcgtttggagagcgaaccgagaagaggcaactggacttgtttcctggggggagaggggaggcgcgagcgccgcggctccaacgcacggcgcaccgaacacggagaaaagtcgcgcttctgtgttttcttcggagattctcctccgtgaaatccagatcgcgcttttccggtgttttctggactcttcaagcaactggggcctaaagacgacgtttgtcgatgtctttccgcgggatacacaacagcggcgtgtctctcagctcaacagacaacgacgcgtagctttcgattccccttattccatcccttcgttttcttaaagtcacttttgcgacttctgtctcgaggtcgtgaatgaagaaggacgccaggcgccgtcgcagggaacacaatggcagggactcctcacagtccgaaacgagactccgcgtcgatcggcggagacaagtcccacagacagacgtttttcagtgagaatcactcatccgtactctaatgcaacagctgtggccgtcatcttgtgcaagaacctggactcctcagagaggaaggcgtttgcttaaggaaacggaagagaattcttcccggtgattgtcg

SEQ ID NO: 2191 - DNA, 2162 bp, Toxoplasma gondii
  source 1..2162: mol_type = genomic DNA
ttctttcgccttttgtgagtagcgcgactcatgcttacgtctcttactcgagggtttcgatggcgcgttccagatttcacgaagaccgcgtggactggttgcgagcaggcagggaaaaggcaacagctgcgccgaatgcgatgacgcgcggcttttatttgtggccattcagtgggtttctttgtgaacagagtgtacggctgagatgtaagtcgatagcaacaaattaagaaagatttctctgacgttttgagcgcgctgatcgttccgctcatagcgtgagggatccgcaacgcatgaagatactcggggacatgaaagcgttagccttgccagtgtactgagaacaattttctggtgcatcgggtgttattacccttcttcccctccgggaagtggaacggaaccagaaaggaagagcttcccgtcccaacaggtcgacacactcctccttgtagaagcttttgcatgtgaatctcaagaactcaaggcttttcgagcacgtcgagactgtctgcgcgtgttcgtttccggagatatttttgaggttgatattccagtgccagttgccgttgccaaggtccgttgacccatcgcgcccaagccagaaatttgcaccccttgtgaaggtgattattcggccttccagtcgctcagtattacacctgaccacgaggactcccttttaatttgccatacagtaaagaaaggacagaaaatcaacgaattcactagagacgtcagactgaagatccacctcaccgccaatcagcttcatttgttagttgatctcggaggggaaggaatctcgctcttcaccttccaacaaaatcgctggagtcgataaagcctctaacttactttggtgggcgcttttcctgagaacagcaaaattttattcccaagagtttgtgcgacttcgaaccccagcgacgagacagacgcgcaaagtgtatatcccaggtaaggaaaacagatttgttaggctcaaagcactgtaacacacgcctgctatacctaggtaatggtaagtgacgtcacttttaatatggtttctgaagttgcgcgggatttctgggcactgtagcaggccagacgatcgcagtggcgaacgcgtcagcagaaaatgtgttcgcgcgtgattcctggagctggcggagccataccattacaagcggcgcattcgtagacttatccaaaactttaccccttggcgacgtccctgttgaaatgtgacggtacaagtagttttactacgccagtacagctaaaacactaaggctagtctcccaaaaaatgaatgcgtatagtagagaacaccggtgttagtcgttataacacgtccactaatgcagcagcagaaatcacaacagcatctacatcgtttcccgttcacagtgtgctgagtcgatggcttagagacggaaacatgttgacagcagcaaacgctgttaaattccgcatcccttaagaatgctgcagtgtcgcgagtaggaagttcaccgttttgtgttttcattgtcagataaaaagaattccgagtcccagtgtaggttcgccagaatactcacccttgttcggcgagtacacactgtgacgcagtgatttttttttgtgggagcggcagcagcagcagcagctttacacaccagataagttccccgggtttcccgccgttttcattaactgttattctttggattatttttccatagtgtgctctaaagctatctttcccgtgaggaacgcggaaaccaaacttgctgaaaggccaggcgagtggtcaaccgtatttcgttggcattgttcccggagacagagacacggtggcacatgcaaagaatccaccgtcctcaggttcatgcggtttatgggaaaacagaagagttcgtcgcctgtgtgtatgttggtttcatgggactgcaatgttctacgcttctccggttcactggtgaaattggaatctgcggaggagtgacatgaacccgttttctcaatttcttcggtagaagccagttttcccctttctttgctgctaggatgtcagcaaggaggtctcgcacgttgtttcgcgtcctacgtttttagtgcatagaacaagtgacctgtttgcagcattctcactgcgtttattcttctctttgccctagttcaaggaacaa

SEQ ID NO: 2192 - DNA, 3244 bp, Toxoplasma gondii
  source 1..3244: mol_type = genomic DNA
cccgccagcaacccacagaacgcgttctttccagcgaaagcaactcccctcttgcttcacatgcatgtcacaggtccttggaatgaagtcacatgcattgctggattgttttgtacgaagtgccaacgctttcggaggacatttgggcgctcggggtgccaccgaaatggcagtgcgcctttttttgaggtggtgacaagcgaacgcgaacttcgatcaggcaccacagtcccgatcgcaaccaacagttcacttcccttttctccttgtcgaatgcatgcgcgctgagttgaatctgtctctcagacgatccccttaactgcgttccactatttctatctttgaatccttacaaggtattcgttgccttaagcatggtcggcaaacggaagagaacttggactgaggaaagaagcagaaaaacccgaaaaacgcttgtcaataatcctgtttcacgaaggccgctttccgtacgacgggtctattcacagccgcatctgtttccttccacccccgcttctcgcgtctgaagacatgaaagccatttctttttgggaaatgcctgaggcaaaccatgaagcagaaaagacgtcttctacgaaaggggtcacctctctccagaccacaacttcacaagcaaacaccaccccactgggaggtccagatgactggcaagaaatcacacaagtcgagttgctaagtcttcttcagctgctcatacaccgccgttcacaacaatcacactcaaatcgggacttgtcgcaacacatagatttacttttggcttgaaaatatgtccacgtacttaagatgcatgcaaatattcggtctatatcggttttggaaaatgacagcgtcacagcagttttctatacggtaacaatatcagctttccatgtcgaacccgttctcttgcggaaatcagcgtcttcggtgaaagaactagttccatcagaaaaagctcagaaaaccgacgagagacggatcgccctctggcctcagcatatacacggaagaaatggaagtcgttcttgtgtggcaggcatatccatttagaaagctttttaacactgacgttcgaagcaggatacgcattcatagctacacatgcttaatatgttatacatatatatatatatgttatataaatacatgcatacgtatatgtgagtatatatgccctcgattgcagtgtcttgaacggagagttttcaggcgatgactagcggtctttgcgtctttttcatttccttatgtttctctacagcttaaggaacaggccgtttgccgagaggaagcgagcaattcgagatcgaattcgtctctccagaagttagatactccagatatttccgtggtcgagctgttcagtaaaccgatcctctctttttaagatggtccttttcaatactgttgattattctgtccttgagctcttagacaaagctgtcgtgtctccagaaaaaacctcgaaataatgctaattaccccagcctcccgcttcgacaaaacaaagacttcgccgaaaaaccactgaaatcctctttacatcccccggttttcggcttcgcaaaagactccgctggaggtacaccggagaatcgtacaggtcgtcgctgcgcaagcgcacaactttaaaaggctgctgttcgtgaaaaaagggagtgtgtcttagtttctgtctggagagtctttttcttctggagtcagtgagagtcttcgttttacctcgattgcacctcgtcctcgtaaaaagccatcagtcccgcagtcgccgagaagttgactttctcccgtccagaacgcagaagatttggaaacgaaaaacacgaacggagaaggcaaggagacaaagaaaaggagacaagactggaagactcaaaaacagagcagtcttctgttctggggggcgacgacaccgtttgtcctctcgccgcgcgaggtcgagtgtagtggtgtgtctctctttttctcgaattgcatgcgctcgacggcgctactttgttgcaaagaccagagaagcccgagagccactctttcaaacgccggtttctgccttttcttctctctttccatggagaaagtctctcttccgttttctcgcattttccacgcgcgttcgtcaggtgtacgtacagctggcggtggactctaactccagaggggaaagcagtggtttttctgcggccggtgtggccggtcttggttttccatcgtttttttcggaggaacgctgaaaagagttgcattttgtgtgaaacgtttctcttctctcgtgtcttcttgtccgtccggtcgcaccacagtcgagagaaacgcctccgtttgtagcaacctccagggtgttctttcccgatcatcttctgccctctctcctctccctcgtttctgctcctcgagcgttcccctgcatcggagaaaagacctttttcctattctgcgtcctcttctctgcacagtgagttgcagagacgcctccagagagagacagttatctctttgtcatctaaaggccgatctccagcgagagaccgagaatgttctcgagagtgccgaaccgactttcttcttgttcgctgtgtcatcagtttttcctttctttgcgtcttccttagcgttatcttgcagtctgcaggacatcttctctctggcggcctcctcgcgttgattccatttctcgcgcattcatccaaaaagtctcgattgttcacatcatctgacagtgtgtcctctctgtaaacctcccgtgtgctgtcgctctggcggccaaaaaatacaaaggaaagacatcgtttctctgcaaaaacatctgcagagctctcgagcgttgtagagcgagaagactctcggttcttatctcttttttgagacccgcaccggcctctcttttcgtcatccccgcaaaagcgagcgttcacctcgctgtgtacacgaggaaacgttttctgctcctactctgtggataaaccgccgagtagttcccagtgtcgactgatgtcctgcgtactgtgtgctctgctgcggagctgctagcctcgttcgctccctcagggtcgcaactttctttcttgttcgtcattttcagccgtgctgttgccggcgtttttcacccccatgctgtgtgtcaactggctgcgacgacctctcgctgttgtgacagagcatacatctcgtttgtctgggaaggtgtcaaggtctcttcgttagtggcggtggcctggcttttcctccaaacgcttcgcaa

SEQ ID NO: 2193 - DNA, 1340 bp, Toxoplasma gondii
  source 1..1340: mol_type = genomic DNA
tggattggtacaaaggagttaccatatcctccgtaaacacctcaagaacataaagatcagagctgggtcatgtactgggagcagcatttggtttacacgtgtaggcatatgctgagaaagtcctcagtctctgtaatgtgtatgcatctttacagtgaagggtcgaggagaacgtggaggggagtaggaggcgatggtgcaaaacctttgtgcgaagagggttcttcagcgacgttgcctattccgatcagaagtcgggaaccagacccctgaaaagcaccctgtgtccctcggtggagagttaacgcttatatcagaaatgggagttccccctaacatcgcatttgtttttctcccattgcaatgcaacgtggtgtgaatgtaccgccagtgcgagaacctcctgcgattgaagtctttggtctgttgctctgcataacgatagtgggtttgatactggtttgtttatacttgctggcatgcgttcaagtctgcccgttggcagaccggctatgctatcccagaagagcgcgaaaccgtgttatattggaaaaacaacgctctgaaagaatgcagcaatagcgcttggggttcattttgcacagcagcacagtggctgcgttgagcagtaccagctacatgtccatttagctcgatggatatccggtagcagttcatggtaactttgaaacactattccctctcgtgtgaagttctttttttgagtacttcagcagaacctgaaaagcaaccctcttacggaaagtgttgatttatctcgttttttcgtggcttgaaccagctgcagggcagttgcaaccgctttcctacgtctggagcctctgtgcaacttttgagaaaactgaagcgacatttaactggtatctttctctacatttgccaccagttgcttaccccgttttcccttctatagcggcttccgattatctagattttgtcgccttgcttgctgttgtgatatactcgtagcgcagtttagctttctttgcgccattctgaggtcatcatgaacggaggaattttcgcgaagctcgttgtctctcggtgcggaagcccaagcccaacacatcggaaatcgttattgcgcgcgcctgagaaacgtaaatctggtggaggaaggcagagaatggtttcgtcgaatccagatatacttctgagactctataagcttcagtcgtgccccaggcgcttgggctcagagacaagagagacggggcagctcgtagtgtaaaggatgttttcgcgagactggaaaaagaggtgtggggacatcggcgaaagggccgagggggcgtagagaaggcggcgcgagcgtcgca

SEQ ID NO: 2194 - DNA, 3277 bp, Toxoplasma gondii
  source 1..3277: mol_type = genomic DNA
aaacatctgcagtgcctctgcaggtgcgttaagtgttcaaccaaacgttctgcacctctctccttcacttagtcacaaagcgccactcccgctatggttcattatccttctgaggcacactgaatggatacgattggatgttgagtacgtgaagaaaccttacactcgaacgcgatgtattttcgttcttgttaaaagacctggtcttacctggtccgagttttcgctcgcgttcgcgctctttctctgccgctgctagggcggcttcgtcgaccggcctgcagcgagaaatgcccagaagagaccaacagccaaaaccagtaactcacgtcgcgtcacaagatccacttgctccccgagctgccttccgtgatcaaggtatcttccttctagtaagacacaaacagaaaacagtcgttttccggaacgccgttccctcaagtgtgccagcatagcagatatacaaaaaacgcatcggcgaatcagggacacgaatgggagcagcgaaaaagagccttcctagtggcgttcactctaaccagtgtgtcacttctgtacattcgcaaacgagaactacccaggcaagccaagttcggaatcgagaagcgcaccacaaatacgccagcgcacctctgcaggtcgacaaaatacggaacatgggaaacacgaagctgaaccccacagacagttggaatgtatcggaaaaataaagtaccaaacgacaaactagacaacaacactaatgacccaacttccgccctcgggcgcctgcaccgcttctccgtctgcccagtctccagtggatgtacactggacactgtcccgtacgtcgcttgaagcaacgaactcgtgtcagtgttctgtccgcccgcccccccccccgacagaaatcagctaaattccgtcaaagagacagaaaaatccagaagagttgtgtgcgagtgtttttaagcgccattctccgtttgtcccctgtttctgtcgtgcgatcaacgccagtgacagataacccgtcccttcgacagcaccgctgttcatgataacctctactgtctaagtccccaacacgttaggagcagcgacactggcacgcgcgcagaggtggagacgctcagaaagaaggacgaagtccccgatgcgggaaacgcgacgctgttcaactcacttcggcgcagacgggagaagtgtcacaccgacgcccatctcacgctggaggtcgcgcaggttgacggaaatgcctttcttcttgggcgccattttgcagggatgaaaaaaaagctccttccagccagtgaaaggaacttggagacagctgcagagcgttccgtcgtgggaggcggggctacatgcaacagtgcgggaaagtacgggagagccggtgacacatggatggggagaagtgtgcgcttttgtgcacgcaaagaaggaaggccgagcgacagagaaattttcaacacgatgaattccggggacgcacaagagtagggagctgccggggaaacgcagaaaagggaaggcagttccgccgcggaggagtggaaacaacagaaaaaacggtaaaaatcagcggaacaccaaaagggaaggcaagcggggaactgtcctgctcttcatggaaaggtgtgcctgagcaacctgctccaccaaacgagaagaacggagtgggcaacaggaaaaaaagtgaggtgaaaaaaagtcagattggtgagtggtccaacgaaaacgaggttttcgtgttttctcggcaaagcagagagcaaagatacaccacctttcgtcttttcgaaaatcggcagggaagtcgacgaacgctccactcgtagtccccctcaaatactctacagaggtcggcgggaaacccttgctcgattccttttcgatgtctctgccaagacgcttaggacgcgccccctttgtcgaaaaagttgcacgcgggcgtctgtgcgctttgatggcaccttactattctccccatccctcaaaactagacactgtggcacaccgtgtgagagggggtccgagcgaccaagtcggtcaatgtggcctggaaagacgccctccagctgcggaaaatcaactgtttaagccttccttttccttctgtactcagagcatggtaaaccaagcatcagcaatccgaagctagacttcctgttcggcattctaaactgagattcccaccgtcatcgagactttgtctccccttgcctcgcgaccctccagcactcgcggcaccccgtttcttaaataagccgaccacccgggcgagcgttttctccgttcatggttcgtacttttcactcgacttccacacgctcgcggaagaaacaagcgaaaaaactggagcgctaaatgtcctcagagaggaggaaaactgccttgctggccccagaagctctgagggaaaattcacgcagacgagaacgagcaagacatcggcgaagccgctgttgacgggggaaatcgtttcacggccaggcagccaccgcgagcgcggctgtaaaacacccgcaaaatcgggcgaactggtggttttttgtcttgcagaacgaacgccttttgctggcacttgagtggaagccgaagaagcggaaataggaatttcgtttcctcttggtgttttgttccagacaactcgcttctcaattgtctgtcatggcactggaatcgcttgtggcggccatcttcttttggtggttccttccagcctagctaccgcaatttaaagcctttttgctgatagcttcccgtcgagagagcttgtttcccgagtccaccgagcaaatatccacctccttcccgtggtctggagcttcttgccacctcctctggcgcgttttctccttcatcttcgtccccctactccgtccccgcctactgtcttccatcctctttgcttccgagtcgttttttcgccgacttcgctggccttcttccctcttacgctccgatcctgctctcttacctctccacattcgtctcaatcacttacagtttcgtagatttgtctcgtcttttctcgagtgtttcctgtgcgctgtctcctccgattgttcactgtcgggtttccggtatcctctttgatcaactttttccgtgtgacgcctccagcgtctcgtaatctccgacagatgcggcttctccgtcgatacgggaccttaggaaacggttgcctgcctctacgaaagacgaaagggagggttcgccgcggtagcttttgagggtctcaggatttccaggggattcccacctctcctcagattctttggtgtccgga

SEQ ID NO: 2195 - DNA, 1698 bp, Toxoplasma gondii
  source 1..1698: mol_type = genomic DNA
cagtcggtgaaccgagcttctttatcaagtcacgccatttctggttcgcacatgatacacttcgagcattctccactagaagtctctaccctggtttcgccactacagagtctcgggctttttcctcgtactctgaacctcgctcaaaaagccgctgcacgcattgcttgaatgcaacacgcagtcagccgggaactagaagataggaagacgcacggacaacgctggcaatgttgcagtttccgaagctcgcacactcgcacgggtagggaacctatccatggattgtcaaaatggttttgaagtagatgtctcgccaacgtgtaagatctctggttgagacgtgccaggcagttcctctaggaagcagcagttaacatagttctgacgtttgtcactacagggtgctactgcgaattcatggtagtgaggctactagagattacttgagttttgcgactttctttttctggattcgtcgacagtgccaaggaggccacgcctggctcagaagcctcaaccgtccccagaacttcttgagctaaatcgggatgttgtccgttctagaacacttggaataactgaatcttcctacagcgaaagctctctaaaaacgtgacactgggctcatccccgtcgtctggattcaactgcgtgaataggtcttcaagtttgagggtcaacttcagctaccgtgtgctgacaacgagcgctcgctgtgaatgcgacctgtggacggctcgtaagattgccgagtctgacagaaggcggaagataaccgcaacgagcgtgtgctgtgtccaaaatatcagagaatctgtcgacaacaatcgctaaaacctaagtccattcacgacctgggcaaatcgtctttttctgctcagaggcgttcgctgccggggcgacggcaggcacactcggtgacgacagaggtggcacaagtttaacgcaatcttcgggcgttttttcctcttggtaaacttttctctcgaatacaggattgtcctgcttcgtcttcatgtgtgcattcctcttcaggggctaatgtcgttctcacgcgtcaaaagcctcgtaaccccggcgaaaagtcgcaccgctcgcggataaacgggaaatgctcatccacttccagagtacaatgacaacgttacttgcgcgagagatgacgaggaaagggggaagaaaaactcctgatggcaaagagaacgggcaactcgaaaagcagaaaacgccttttcggtacgcaacctccccaaagtcacgacgctctcctagcgacatggcatgcgccagaccagaagcgggaggcacctgacgaaacccgggcgtttccttgtgccttcactggaaaactgctaagttgtcacatctatccactaacttctgttttagacgccttaaatcgtcgttccgggcggcaaaccactgccaccacgccttgagcgcgcaaccctcgtgaggcgctgtcgctgccgcgttcttagctccctttccaatctcatgtctctcggaatgtttttttctcaattggcacgcgcaatcgacaacaatgtcatgaattctcatgcggtttgagccgccgtaccttcctcagcaccgtggtttggaacgggatcgggtattgaactcgccaggcggccgtatctcgcggccgaatcccacgcaaacttcggcttcccgcctttttcagagttacca

SEQ ID NO: 2196 - DNA, 2491 bp, Toxoplasma gondii
  source 1..2491: mol_type = genomic DNA
atactcgacccgtcagcaaagaatagatcaagtatatcccaagcaagatgaatcgattgacgccacagggcgtcggctggaggcgggcggccatcatcgcggatgtggtgtgagccctggggaagaatttgttgcgcagtcgctcacagagccctgaaaacccgagtttcggatcttccgtcgctttttccacttgaccttcaggaatgcctgcatcttcttgctcttcatcctgaggtgtcacttcacctcctcctccagacgcatctagatagttggcggagagacgagagttctgtcgggcgagctctgcagccaccttcagcgtaagctcgggaggaacatcttctacacggcaaatttcgctctcgcggactggagcagtcggaaagtattccagagctgatgacacgcgccgttcgcggtggaacaggtcaagatactcatccaccgtaagtcggcgagatagcgcgggggctacacggactccaccccgacccctctgtggatttctttcctccacctttgaccccgaagtggaaaggtctgtagtgcaggttcgctccatactgtcggacagaggcaacgcacaaccaggccaagaggaactttccgtaacaccgaactcctccaagcgcacagagccggtgagttcgtctcaacaccgtcaagacgtcacaaaggagaaaccataaacagaacgctgctttacgtacaactgtccatgaactctcttttagaggaccaagttctttgaccgacggagaccccacttgtggggggagcacttcaggcgcctatttgtaatagttcggccaaccggaggcgtctctggtgtgcaacacctccacgatgtgttctatattcacgaccgcagcggcgcgggagaaaacaagtcagtcaatcttcaggactaaggcctcgcggtctagcgacagtaactgcgcaaaaagcggaagatgtcgtgctgcccggtcaccgaaaatgccatacacaagctgtattgctgggcacaccaaactcgctgcgtttggcaaacactgaataagaataaaaagaggggatttggcactcggatgaccggcaacaccagggatcagttagactgccgcacatacacatgttcaaggctcccatgaccctgcaggagtatcaccacaagaacgttcccgtttgaagcgggaacgagacggctatgttggagaagaaacgggggatctgtgcaggaactgtgaagcagtagctccactgaccacctcctttctaccgtagtagtaccaacattttaccccaaacgtacgctgaagaattctggtaaaatccggagacatcaggcaaaaattctgaagacagcagcattctccacgacacgcatgccgtgacaagagccggacaccaaccgagctgccgcgattctgtgcgcaaaagaacactcaacgctgacggaagcttatcggcgggaacagaataacagcggggctgcttttcgccgaaaaaatttttaagcagtttcccctttcaagaatcaccgacacaaacgaacaacaacttggcagaaatggcaagacaaattcttcgcggaacggcgaagtaaccgtggacaacactccgtgccgatacccacaagcggcgggtccgtggaatgatgaggcgctctggcctcattctcttgctgcttcgcattttgccacgtctgccaccaggtgaatttttggaggtgaacatcaaccccacagaacataattctcggagttaaagaaacgttctaaagtcgttggccccgtagtaccaaagccttcaagcgtacgtgttgcgtcactgcgtcaccgtccgcactgcgctttgcctgcgagacccaaatcttgggaggcctcaggactgaaccaggaatgaagttgtgcagtttggagcctgcgaagttgcccatagaggaggggaacggcgtttgcctaccatggttaaggatgaaagcttatgggatctagggcccgactgtaaaaaagttcataaaaatctccctttagaaaaagaggcaagtcgggcttggatcagggtttacgaggagagagttgtgtaccagtgtggaagcactgacagcccgaccgcagcggttatgctttatatagttcaaggactggggagtgagggatggagcgaaggtggtaggatgccgaatgaatatgaaatctttttagccgggtggcttttgacataaatggaagcatgccaaggaggcacgctcactcacctctacatcacactgtgccatcataaggtaatgcgtgatcaggcgcagtgtgctgtccaggcgtgacgaagctgatgaaccaacggcgattcgtctcatggccaagatcaattaatggtaccacagtacaagttactactcgcgcgcgcgcaggctcacagacatttcaggacactggtttcaatttgccgtgtttcttgtcgtagggcgtcgcatccgtttgcagtagtactggccgtgcca

SEQ ID NO: 2197 - DNA, 3771 bp, Toxoplasma gondii
  source 1..3771: mol_type = genomic DNA
tcgactttgagaattttgtgtacaggttcgtcgatctacgcgcttaaatggcgttcagaaatgtagctgggaaactgaatcgtggattatgagaagcactctgaattgcccttcaagatgcgtgaaacaggtcgctataacacagccagtttgctgccgatgcacatttccgttgtgatattgaaaacacctcttttcccacgcagaacgaccactgaaaacagtcgggagtccctgttcgccggtatggtgcggaagcgacacgattctgacatattgttccaacaactgcgatttctgatgtgttgtttcgtcagggttttacgcgactagacgatggctcgtccatttttctggctgcggcagggatgaaaggcactaccaaagtgaatacgatgacaattgtgcagcttgaatagacacgctggtttttcgaaaatacgctgaataccgctaatcttaatgcgcacttacactgggttccgacagtttacggtgcatagctgtgtagaaaacgcatctacgctccacggtctggcttcacgcaaaaaagtttaaaatgtcttgtgtgggaagcttttttgacagaccctgacgacctagccatgtgccttgcgaaagcaggatgttctttttcacaggacggtcggaacggttgcgaaatattacttgtatggacttcttttgcgctcgaactcttgtggtacactgacaggttcaggtccgatatgtggcggttccacctgtgccgctgctttttgaactccgttaacaggcaccgttaattttccggttcactgatccactcttcgtgtttttgagctgggattcgtgttactgacctttcgcgcgaatgaagaggatctttcaggcttttgccacaacgttcaaatctggcgtataatactgataacagacaagggagggcattcgtctcggttggcgttttgagccaagcctccgtaaatcgcacagttgataacagacaaggaagggcattcgtctcggttggcgttttgaaccgagcctccgtaaatcgcacatctcgtcgcagtgtgatacttacctaggcgaagcacgagacgttcacaatttcgacttgggaaaatgtgacgtgtctctgctacacaaatcgtcgcgttctgtcagacgccgcgcttcattcacattgtgtgtggttaagaatgaagaaacaccatttaaagagtcattttatcgtcctatgtgcgaaagagtgacaggctgttagagtattgtcactgcgaacccagtgccctccctgcagccggacgtgacgcgtctcttggtaatagacctagtgaagaaacaccaacttatcacaaagttggtttttgcttttgcagccgtacctctcatgtctagttctctttgctgtcgatgcgatgccaagagcaaatacggctgataagttaacctaactttttctcattctgtttagtagcaccccatcttgtctcactagcccacagttttggcacagctatgcagggcagtacgacactgcaaattggcgaacttcacccgcaatgccgaagcagcaggagacaaatgtgtgagtaaggctctcgtcctcagcgactttgcgccatcacctggttaacttgtttcggcatgcttgtacgattattgcctcaatgtattaccaacgaaggtatgcagcacttccgaggatcactgacatagttgtccaaattaaatcgactaattctatcaatgaatccgtctcgtagggttcttcgatttcctcgggtcttcgacagggctacgaactcgcatcgtctaactctttcggtgaattcggaaccaaggtggctagcgtgtccaacgctccctaacagagctctcaaatggcaccgtgtacgcctctcttgcactacaaattaagctgcgtagtattttctgtgctcgtaacaccgcaatttataatatatggtacatgaacggtagcttctagctcgtaactgtctgtcagtaactagtggattgtttgtacgaagactgtatcaatgcattaccgattagggcgtttcgcatctcctatggtcatttgtatgacagcaatctattcatatcgtacgaacgaagtcgacgatcaggttggttcccccggaatcgtcgttgaagctaccagtacgcacaagcaatttcgctggattgacaaacgactagaaagaagagacgatttgcacgcccatttgtaaacgctctcttttctgcgccaatccggtacggctaggttagtccctctcctgcgattggttaccaagaaactcgctggtaggtcgagagcccggtttgacaaggtggaagaagtcagattaaccgtgccacgtcctgtgtgcgaatttttcgtctgcatctgaggagaggtacgaaccccccagaaacaggagtttcctgtctcgacaatcggttggtagctcgtctcagaaagaccagaagctgggctagctttcagttttctaacttttgcggcgctcgcagtttcgtggtaggcacagcccaccagctcgctgcctccatctcccccccccctctgggaactagacggcgcgcacgctgtcctggaaatcggcgcgttttcacgctgctgtcggaaatcgactagacgtctggggaattttagacttttctggaggtccattcaagcaaagcaactttttgcgtcgttccagagatttttttcgaaaggactgcggccttgtgcccgttccatctatccacagattgcagacacgcgtgtccctgctgtctctgctgctgaatgctgaggtgtgccgagaggcgacttaacctgccacctgaccattttcccgcctctgctatttgaagaaaagatgtcacaagtgtcaagggttccattttcatttaaagagccgacggaaatgcccgagctcctcaactgccctgtacaacttgctagccgacggcggttcgtatctttgcacaggcgacccgttcttacttccaggagtttctgcgaagtcttgtacttttctctgcaagcgtcgtttcgcgttgccatctctgacgagcattcacatgcttcgtagctctgactccagtccttacacacccagtcgtccttctcaatgcgaagtcaaaggcggtgctccacgcgcgcgccacaaacgctgtccgtctgttcctgccgggcgaggacctttttcgtcgcagaagcttccgctctgccgcgcatattcccgcaaacgtctgacagactgcaatgcagccacggcagcatcctcccagtcggactcaggttgaagtatactctgagaagcattggccgctcggtgttccaccttccttccccatctctgcggagactccgcacggactgttccccgggagatctgtcgcaaggaacacgatttatcgtttttttctgtgagaggaagcgggtatgtgctttcaagggctcccggaccttcgagacaccaccggaacgccctctcctctggcttttcaagagttcgtatgtctgtccagttgccgcaatgtcaaaacactctcatgctgggttttaaatattactcacccaaattttgttcactaaaacgcttcgcgtttcggtgtagttggttcaggggtcgcctcgcggcgttccaccctgtagcgccacccctatccgacatttccacacgtttgtttttcgccgcctttccccgagttctgcacaccttgtttgcgtctcatttcattcggaaagtgactgctttcccacagagtcgccggtagtcgcgagaa

SEQ ID NO: 2198 - DNA, 2357 bp, Toxoplasma gondii
  source 1..2357: mol_type = genomic DNA
tttctccgccagttcgccgttccgagggattctcgacgaagtcgaagggggagagatgcagaggcgttcggcatgtctctgccgcagaaccatgggcgagtggagtgtgccggcgcccccacaggtttggcgcctgagaagacccgcgcagatgatggacggaagcctccgcgggggtggtgccaacagctgctgtggagaggagcgaagacttgcggtgatggcatcgctgcgcctccggagacactcgcgaaagcgggagagacgactcgttcgtcgtccctgagagccgcctgtcgctgcctgcgggggtcgaaaacaggcttgttcctcgtctaggaaaaagagcagaagaagcctgaacgctggccctcgacaacctcccagagcctgcctccacttgccacaggcgcggatccattggcgctgcctgtgacggttccctgcccagggaggcggcgccgccaaggaaacgcatgcagcccggtctggaagggagaaaagactccgggggacaagacagcatcgacgcaagtgcgacggctcaacaaatcgaagtgcagtcagcagttccgtcgcgccttggctgtagactgtggtcttctcgcgaggaaggacgaagagggagagagagaggacagggaggacgatggagaagcgagagagggggcgcgtcagtctagcgggggggaggggggggagcggcggcggcagggtcagacaggagcgtcgaaaacaaataagaaatcatctgcgaacgcgtcttggttggtccatgaagcgaggagctcgggaacgagggcaagacgagatgccatcaggactccctctgtccctagctcctcgtccaccgctctaaggacagagacgcccgatgtagagctctgtcttccgagagagtccccccgcccctacaggagcatcttcatatatgcgcatgcacatcgacatttatatttatacacagagggaggtgtagggagagtcagagaggtcggatgcagcagacggagagcaagtatcgcgtagttgtggttcccgttggcagcagtgcgcagcgagaaagcgaaggtaatcttgcaaaggacggtcacctggagttcgagaagcaagacggaagagcattgcggtctcgagcgagagcggaaaacaccgacagcaaaacggatgtcttccggttcgttgggccgttccgagcagacacaccagagggacttccgtaccagacaggttcgcgcgtggatttcccgatcgcaagttctgcacgcaactcatgtagaaagaagtagcagcgtaggccgatcgatgctgaagtcgaagaagcgcggaatttctcagagcccatgaagactcccgaaaagggtctctctgcgtagcagaccatgaacttgggtcgatctcggagttgaaagggagtccggcttccaaggagtgcacttcaaaaaacgagacgagacttccagaacagagtccagcgtttcaactcccgacggttttcacgggaaagcggccactctttgggcttgcagacatcgcgaacagatcgcatctaccgatcggacagaggcaggaattccgatgtgtgttgtcgtggcgaatgcctcgaagcggctccccagttgcttcgctaaaaaagagaacgacctgtttcctctcagacccaaggtggactgttcgataaagctctcgcccgataaaagtgggtctggccgtgcaccgaggcagagggggaaaccgagagaggcagagaggaccgcggaaactccgcagagaggaaaaacacagaggaacgctaagcgttgcgagaagcagaaatcagctgcgatgcatgtacatttacgccggggaacattcttctggcagactcccagctgcggacagactcagaagacacacacttgcgtgtgcttttcttgttcgcgccctccttttctcagcaccattttcctgtccgtcgcctttgcaccttgactcgctcccgccgttgcctttccatagacggcgtctgtcgacgacgagaggagagaaaacgcgaaggcgaggggacaaaggtagcgaaaggagaaatttcacagactggagtgaatctgtggtaaggttgtcttggcagaaaccagcgtccggcaaacgcgtgccacacagctaatctggaacggcgcagttgacagcctacccagttcgagtggagcaggcccagagaagcgagtgaccaaacaaccgatggaaaggcagtctgaatctcaatgacgctcaagcaatttccgctcttcacagtgaaatcgatacgtcgacttctcgttctctctcgcctcggccgtccgttcggggcgggcaacagaggaatttcctcactccag

SEQ ID NO: 2199 - DNA, 2823 bp, Toxoplasma gondii
  source 1..2823: mol_type = genomic DNA
tgttgtcgacaccggagagcgacgaatcgtggagaggtcgtgaaggcagtgcaactccggggagcaacggagaacggacagaaaaaagcatccagaaagcagcagatgccagcacatgtgctcgagatgcacaactttcagtgggagggcaccaacgttgttccaggttacacagagctctctttaccccgacaacttggtgcctcgtccactgtcgatcgatttttgaggagcgcatgaacctaaacatgagttgtgatgagcttttgggtccttactagggcaacctgtgcgtccgtaaaccgatccgtgtctcgccctaacagctctctgacgcctggcgggaacctgaccagtttaattgctgagcggaaagcgagcgtgacgcagctttctcacacgtttgtctccctcgttattgtgagctgcgaaaaacatggataactttttcgctagctactagtccatcacagtgagagacggatagctcggcgcagtgttttttgtccctagttgacctaagagcaggagcgccgtgaccaccaccactctcttccatggactgtctacttcacttaccagagacgaactttgacgttcatacgttgctccttaatgcacctagttagagctttgtttcctctgcatgcagagagcagagagagtgcagagtgccccaaaacggacagcatggcggggttgcttcgtgcgggccggtgaatatctgactgaacgcggaggcaacacgactggacgcagtagcgtgccatccacgaactggcgtccacagtttagggttctggggcaaaggttagtgtcgctttcaatttgtatgtacacactcactgtctctcagggtggaaggaaagtcctactgttgtcctgttcggagcaaccagttcggtctgctcgagaacgatcaccggggcgtacttttccaaaagcactgtgaaggtccgtatctccacatacatgtggactcagacacggatatgcatttacgagtatctagaaggtggtgtcgacccgagctagattcctagggggtcctcaaacgttccctgtcgctcaagatcttttcccctagcagtcccgcacgtgcgccattctggcctaaatgcgtaccgcgaggagaggcgcgcttctcacaaaaaacatttcagagtggcatcacacagatgaccacgctctcgcataaaatctgcttaaaccagctgccctgggacagatgaccacgctctcgcataaaatctgcttaaaccagctgccctgggctcctgtgtgaaaaggcggagctattacctgttttcagtgggttcgttctacctccctgggcgacggctgccagtatattcacataaataggagaccatctctggcctaacaacatttgggcattcctcttgccatgttcctttcgagggcgcttgctccttcccagccgatcaccttgtacctccccgttctttttcagtgtcgttttcgttcggccccgggctcttgtccgtgagcctttctgctaggttatgaatgatcggcaccgctttctgagaaggcagaggagagactttgttgtcgtacgtagcggggcattgttatcagctgggattcgtctttttttatcaacacattttcagttaacgagtcttcgttgcccaacagccactgcatagccccacaaagaggggttactgctgcgctcccccgccgtgttgtctcgactacgagaggcgcgagaaagcggtgcaagaaaacagccgcggccgcatgtttcttccattgtgccatatcacctctgcaattcgattaaacacgtgagcgtagtgatttgacacttcgatctaaacaatcggggcttttcgtttaatatgacggccattttggtcctgtccaagtacgcttgcgcatcgcttctacgagggcttgttcggttgcataagggtctggcgctgtttgaatcgttgggaaactttcagacacgaagatccgttccccccttttggatctgttcttcaagaaggaaatgtgtttcacactaacttgtggggcagtcatcacgtggttgtcgtactcgatcttgtatatgatttttgccgccggctttaccgctggagcctcacggtcgctgtcgccaaatggcttgtcacggtcatactataaggcttgttgctgacttaattttccgcgtggcgcgtttttcctgactcctagtggattcaccgtagctcttctccttccgtaaccgttgcgtcttgagtcgttttcctccacctttccatctttacccgtcgctcccggtgtgcccacgtgccttctgtccctcagtgccttgttttagcagagacttttcacctcatgcctgacccggcaattccatcagtttttgtccgtcagcttcagagttgaatgaataccctctcggaatcaagattttgattttcgtccctgctggggactgaaaacaagcacctcgatgtgcacgggcctaggtggtcgaatggcacgaaacacccaccgaaacgccaaggtacatcgtcaccgtttgtggggtctcgcaaggcttcggtgagcgtcttttgcccggacccgctgccccgtcttcctttcgcctgtaaggcaacgctcgttaggctcgtgagtttacatccccgtcgtgactcagttctcggctctaggggagtggcagacacagcagacagaagaaggcaacattttttgctttcctcaagttccgtccctcttccatctcattctatccactgtcaaaaggcctcggtaggggaccgaccttcggttgattgcatgtagatggtcacgctacca

SEQ ID NO: 2200 - DNA, 2144 bp, Toxoplasma gondii
  source 1..2144: mol_type = genomic DNA
tgtcttttcatccactctcctgtaaccttctgggtttcgtctcacctgacacacccaagctgtgaagctggtgccgtagtgcatgcctagccacttctcaacgactgctccagcggcgacgcgcgccaaagtctcccgcgcgctgctccgaccgcccccgcttttcgcgtgaatgtggtactttgcatggtaggtgaaatccccgtgacctggacgcgggactgtcgcgagggcgtggtagtcctggggccgccggtcttcattccagacgagcatcgccaggggagtacctgcagacggatcccggtgacacgaacgagaaggcgaagcagaaaaaaatgattttttggaagggacgcgaggatcacggtagacggccagtccacgatgccagatggcgcaggccacgagcgccgggcacttttgcaccctccaatttcccatcgaaaccacgaggccatcttcggaacaaagcagcgttccgaagcctgcagcaggtaaactcggatccggtatttctacggagtggcgcgtgtgttttgtcacctccgaaaactcgccacgtgcaagacacttttcggcttcgcttgtgtccaacacactgtgtggataaaagagaacgtttggatacggtactttcgagctattaactgcggtttctgaagcttagccggcagaacttgtgccagggcttccgtttccccagggccttctccaaaagcgccacagggcgaataagaatacaccgacagccattttcaatatcatcctctgcttaactatacacacaaaatacacatctgtatatgtatatatatatatatatatatatgaatctgcagttatgtgctggcacaggcacgtgacgtctgtagtttcttccctcaccgagtgtatatccgtcttcaacaccggagagtatgttgactcgatctttctctctccgctgcgtcgagagaggcccttggccgggtcttctgcgatttaattgaggctgaacatcttcgacagaaagagggaggcgaggaggcagcccgtcgattatacacccaacggctgagccgtgagattcaccgaaagtgtgtatgcgcagagcggctccataggaagacatctgactgcaagaaatgtgaggagatgcagcggaacgagcgggatgtgtgacagctggagggaaaacaggactgtgaggaaaggcgtgagcggaggagattcttgttgcgacgaccgtctctcacacaggcactcaaagaaaagtgaaaccgagaagatgagaaccatgctgcgtcgaaaagtcgttttaccagcgtacagtaaaaagagcgaaaaggggagacacgcgtccgcgtcgtctccgtaggccccgggagtcaaaggtgtgcgtctctaaccccatcgcagactcgttagctctaccgtggatgcgcgcgagtggcggccggtgcaggttgtgtgtcacgccgccgagtgacgcaagcgctgcgtcgcaaatacctacgggtagtgggcagccatatattcgagagaactgcagaattcgcgcaccgctgcggctcaccctcaagtttgtcccgtgcctgacgccctcacgcaagcaggagtgaacagcgaagttcggcgtctctttcgtgaacccagaaaggctagccgagtattcccatgtgagttctctagttttccgtggcgaaagaaagagggccagcgcgcgatgatgttttccctctgcttcgactgtgccactgcgagaattattgggcgaccgtttgaatccaacaactgtgcacaggtagacttgggaagagcgaggccacagttcgggtggccgcatcagtcacgtaaccgttacgcactttctgatttttgccgttcttcaggtgtattttggcgttgtgaactgtcgtaattcgtcgaggtttatccgcagttctcaatcaacaaccgggacctgctgccgcagctgtcactcgggcgagggccctcgtctgtcgtggagtttacacttttacgacgattcgaaaaggaattgccaggtgggaatcatcttcgcttaaggcttccgttagcgctcactacactgggtgcaagaggtagccgtgccgctcactgagctttcgggcaagcaaggtaagcagatctctctaaga

SEQ ID NO: 2201 - DNA, 2776 bp, Toxoplasma gondii
  source 1..2776: mol_type = genomic DNA
gctctgtgtcactaagcgggcacatgtttctggaaaaggagtcttcaggcataaataacaattgggtttcagtgttgtaggtctccagaggcaagagtgacagttcacgtgttgttttcgttgtttatctcggtgtcgttcgcccttgggaagaaatggaagcagagcgaggaacacccacgttgtttgtatacgcagttcgtctctctttgtcttgtaaaccgcttcacgtaaacgcgtgcgcatacgcctttctctccggagacagcggcttctcgctttttgtttgaaacaataacgcaaacgggagagcaccccgtgcccgcgagaaaatgggagctgcagcaaaatttcggatgcgaccaaacttacttttccggaatcgttttacatacacgattcctttgcatgttgaagaattgaaggtgcatgccaaagaattgcgggtcgttgttcgttcccagatgtagacacaaactggcagtcgtacaaaaaagcaagggagcagtttgacttcactggggagaaaacctgctctcatcgctggcggttcctacggtgaactggcgcatattcagcaaacagccctgttcgaaatagcgagatcaggagtggcacttgagaaggatgtttcgtttttgcatgagctgaacaaacgaaagagcccgatactcccgaactgggcaaaactcataaacgcgcttcaggaatagcgcgacttccgtacagctttcgtcgcctttttttcctaaacatccaacagcaacaaagacacagacttgcggagaaaaaacatcttccctagtcctgcatttcaagttctattttcattcccacttgtaaatgaagccccactgcaccaaaaaagaactaaatcctcggacatggtgctgagagcgctgtgtaggtgcttttgctttgctgcgaggcgccggacataacggtgtacagagaaccaaccaagggtatcgcatttgcctccaatcccatcacacgtctacatggaaaaacggagttatgaggctaaccgaagcagctacaattttgagatgggggtattcgagggtagcgcagcgtgtcgactctctccaattttctccgcgtttctgtggatgcggataattctgtagatacatggggctacaacagagcctctgttccaccttcttgtgcaggcctgtacccgcttgctttttcacgggattttctctttttgaaacgcgccgcctcacatacgggagttccatgggcattcttatcaggatttgcagcctgttgcctgtcaactctcaacccatgctcctctcccatcacggagaggcttgtcccttgcaggttcctctgtgtagaaatgcttcacgaaatgtgtctccttttctgcatttccgggctgtctgtgcacccgcaagtcacacaccgcagagcgcgcgaacgcagacgatcctcggtgacaagctctctttcagtctcgtttcagagggacctgcaaaacgtccacactactcgcgtactcaaagattaagcgcggaaaagagtgaacctctttacaaaagaagtttgatgaccggtggatctcgttcagatctttgagaaaagcattgcgtcgacttcgcatgctgcacctgccctccgtcttcagcaagcggtcgcatccaagcggtttgtaggagttctcggtttcgaagaagaaccgattatcttgtctctcgtcagtttcttttgagctttttgcgggagatattcttgtataccattttcagaaggcggaaaaggaaggatccattttccgtctggaaagtccaaactcgtaccaggggaccgccggcggggccctcgagaaccccgcttctggcggttgcgccttcgatgttcttgtctctctttcatcgatgatctgcctcgattttgaattcctcacgaaaaacctgcagctttctgtgtgtttcgacggtgaaacggcttgacatttcacgttcatgcggtgtaattcacccagcatgtagtgagctgctcatcctcgtcgtttgctcaggggcagaatttgcacaatggtagtgccccgtcgtgaactgtgtgttgcttcatttaaaaagagggttttgtaaaacagcgacagcttacatcagcgataattgaacgcgagggctacgaatctatatgccgcaagcaggatatccgtttgtttcccttttttttccaggcctttcgactcagtcggctacggcacaccctgtctcgctccaagatataaccgaacgcattccgatttccctgcaggccaaggagccgcttcaaccttgcgttttaacgtaacaatttagcatgttatatgtagtgtgacgcggctgcttcagaacgtccatttgtaacatctgtctcacgctcactctctagccgcgtagcaccgcttcaccaccggggtttctttccgccctctcatttgaacacagaggaacgcgttggatttgtcgactctctgttggcaaggatggaacaagttgcgttctagccggtgggaacgtggcagtcacccggttctcacggatacgttgatgaacacttaaatgcccggggccgggttcaagcgcagcgacatccttggactcagtttttgtcaccccggatggagacgcttctttctgcgggaacgttggatccggaagtgccattcgagtgttttatttcgaagttaaagagacgagatgtgcgtgggtgttcctctcaactctgctaaggctgcgagcgccatagtcgggcgtacctttgtagggacgaa

SEQ ID NO: 2202 - DNA, 1764 bp, Toxoplasma gondii
  source 1..1764: mol_type = genomic DNA
tcgtgttgccagcaacagctggtgtggcatccgacattgcatgcacaagccgcgaaagaaggccctgggatccgaagctcgaggataagaaaaaagagaagaccggtgagaaatgggtacttggggggccgctgaggacgcggggggggccagagtagagggagacacgcgagaagcgtcagaacaagagagagaaggagaaatgaagaaagaactacactgcctctggattcccatcaccgctatctttttcggattcgcgtcaccgccgccttgcttcccagacggcgtgacggaaagctccgctgccgccattttgccgaggacaccgcgtgtggtgcttagagaagctcggaagaaagacagacacacattgctctttccaccgaactccacagcgtctctgttttgcgaaggaagtcgttcacgagatacaaaagataaaagtcaatggaggaagaggggacacagcttcaagaaatcttggatcttgcaggaggtttttaccgcgacctctggactcaaaaacaagcagcactgggggagagccgaatggtacacgcaccttgaaaaactgacggggaaaaccgctctcgacttcttcgtcgttctggctagaaaaaatccgaaggcgtccccggcctcgacatgtcctcccatgcagaggtcactcgaggcccagaactgaaaaacctttgaagcctgcgcaataccgtaatggcacccgcgactcgccctaggttttagagctttcgctcgaagaatttccttcttgcaagcgttcaacaaggccatttccacccaatcccaggtgattttgccgagttttaatccctttcgcctcgcgttgccccgacgctcgaatccgagaccgctctcgttctaggcggcccctcacaatgggacgttgaacgcaaggcgaagcaagaaattgcacacgctgaggctcccacactcgctccttgaaaagacaacaaaccagcaggaaaggaaagacaaaaatgaagaggggcagaaacttcttctcaggtctctatgtggaactttctttgccaaatctgcatgcaacgagctgccgtccagcgcgtgcgcaaatcgcattccgagagagacgccgtgactgaagcatgtggaggcctctcgatcggcgaatcgacctttctttcagcggcaaaaatggccgcttcggttttcttttctctgtagttcaatgaacggatgccaatgtctctcggggtgtctccagagctcgtttgaaacaattttcccagtcctttccccagacagatgccaggcagacagcgtctgacttcatgagttgacgcgatcaacatcaaaagataacagagaaaacagaacaatctcttcaggagaagtcttcgttttcgacgaagtgttgtcttccttggtgccccttcaatgtctgtggcctgcatctttgttcctctctttcgccttcgttccctcttccaagaagtggaatttcgaaagtttctgcatgcaccggactctcccctcggcgggcccctgcgtttcctgctttccactcgcctccttctcctcgatgccactcatctctccctctcgtttctttctcctagggcgttctcggcttctcgtctatcgcttacccccgctttcacgttcttcctttccaagaccgtcctgtcacgttcgcgctcaagactcacggggaacagccgttctctctccttttttggccgcagcacagagtcgccagagcgtttgttcgtcgcatcggaa

SEQ ID NO: 2203 - DNA, 2605 bp, Toxoplasma gondii
  source 1..2605: mol_type = genomic DNA
taaagtcgtctgtgctctgagctccgatgaccatcaactgtctggtgttaccgcggaggcgggagccaggcaagaagtttccagttgagactcttctgaagagtcaggtagaaggggaaaatgagtttcactgtctgtggaagcgtttcgttgacatttgtaaggacgtagaatccgtatagggtggtctgcgctaggggcgttccatggacagtgttttcgggttattactgaaacacatctaagagtggaggtaacgctggggagcagttttgaatcgcggcgggtgttgaccgacgtgaacacaagacactcactttctcgacgtgtttgtccagtcgtctgctgcacaatggtgcaagagtttgcggaaatcaggaggggaaactcacggataaatttcagtcaccgtcaaaagagttgccctttcatttgcacactctgttgcttacagcaggtctcttgtcacacaagcggccctgaccttgaaaagtgggaagtctgtgacagacggagaagcgggccacttgaaatacccgttgtaaatgttctttctgcgggtagcctctcggcagctgttagttttccaacgcggatcggagtcgaagaagtcgttacgtgaccagaggcatgtagacgacctgtttccatacgctttttctaaccttttgaactaaaactattgggtcgccatgccacctgcgggtgagttttcaatgggtatcagctggaagttgtatcggtcctcgaaaacactggctgggagttagatacccgttgcttaacgtcggattccgctcttcaagagacgcgtccaacagaacatagcctgtgagaagctgacaattttcgccgcctatcctgacggttctctgaagaccgctgggagggctgaggcataaactaggaatacctgttttctttgctgataccgtggatacctgttcatggctagagaacatccgatcccattctgttcaccccgtgcatacatggaaggaatatccggattctcagctctgaaagaaaaggagaagcacggtacaagcagcaatttacctggtttttccccgtagaactgtagacagggcccagaagcagtcgacaaaccgtgagttctttttgactgtttttttgccagtgtttggtgtatggttgctacacgaaactgactctttcctctcgcacgtctactttttcatgcgcgggttttccagagaaacgtggtggagtacaagcgtagaatcccccaagctattgtggcttccatcatgtgcattcgcgattctccagcttctggtgtgatttaaccaaattgtcaacagcatcttccagtgaggtggtccgaaaaaacatacttcacctgtgcgcatcctgatcgattctgcatgaagcgacaccaaggatgagaaagcgtatcctgtctctggctggtgacctggtcgcattcaacagacggccgttcgtgtatcaggcattgccaacagaggcataacccccactttggaaacactttttctttgagtctatgaacgggcttggcatttgaaccatttttcagcgctttcgctttggaaggcatgcatgagtgctactaagtttctatgacttcgtggaaaatggtaccccgctgcttggtgacaagcccctgctgacagctcagcgatttgcagaaagttacggtcttcaccaaatgaggcagcgttaaaattaactccatcaaggtctggcgttttactaatgcgtatgttgccccttattaatcctggactattatctgtaatgtctcctggaacagtcgaccgactagatttgccctatacgttagacctatgttcggcggtgctctaaatctattccatatgaacacagggtcttcaccaacgaaactcgctatgaagggtcacatttcttcctgtcacttatcggcgcgttctcttcttttattgcctccagggtgctcgtccccttgcacctgtggacgatgttgcgacaaatgctgattccaagctcggctgtctgaaggatctagatttgtgagcctctactaacttgcactacagaaagacaaatgctattatgtcaaaagtcgatggttcaaaaggaagcgtgacaaaataagttagagatccgctcacggctcccgagttctctttcccttcccggcatcgaccgcactatatgagcatgcagttcggcgctgtttgctagccatcgctacccgtcgccaaggtgtcggagctgatcgcgcaaacaccgtcaaatttgtagtttttaaaggatccttttcgcaataatttgtagagagaagacgtcggcgttactcgtgtatgtccttttttgagccaggaattcttcggtttcctcctagcatcctcctctgtctatgcccgaccgcctctcactatctcttcagagccctctcttaaaaatcgctccgctgactacgcgaaaaaccgtccccacacaacgttgcttagttaaaaccctttttgtatttttttgctcgtatctgtctcttggctactcattctgctgcgccgtgcgtgaagatatgcttgaaaaagcctgtctctgtgcgaccttttttttgtacttgtgacga

SEQ ID NO: 2204 - DNA, 1988 bp, Toxoplasma gondii
  source 1..1988: mol_type = genomic DNA
gccgtgcttcaaaccattttcgcaaagggtgcacagataagagcaacagagaagcagatccgtttcctcaaggtgtgcagccagtggctcgatggccctctaggcagagaggatggcctcgcagaactggatgaaccatgggattcagcgaagaacgcgttcaggagtggaggacaaaagcccaacgcatccaccaccgaagacctgcgctggaagctctcgtcctttccagtgctggggtagtcgacgagcagaaggaaaacagtcgggagaagcaagaaagcaacagcgagtctaccacagttgatgcaggctgcttgcggagcagcactctgcgtggacctaacagtgcgccgcacagggcttgaggtgccgacaggcctacagagaagcacaggggagatgatggagagaaatggcgactcgaggctctccaccttgtcggaaaaagctttgaagggatctttagacgtcaggaggaaaaggaggaagccggcaggagtgccgaatgccaggcaccgcagagagaggcaaccgtctcggacggtaggggagagctgaagaatggagaggtcggcggcgctctgcctcgaactgggtgaaagagagtaaagacaaaagggaaggaaaaggagaagtagaacgcctcaagagggcaggaacacctggaaacagcacgttcaacgcgagagaagagttgtgagaaacatacacacacacagaggcagcggacgcaccgcaagacactggcccgaagctgacagaggaaacggctttttagaggagagactgactcaagaaaagatggactgtggaagaagtcacgacaggcaaaaaagctggaggagcaaaagggtgactgagacaaagaaaacaaggaactttgaggctctgacgcttcagtttagtgacaagacgcgtgaagagtcactcgacgtgactttgcctaattcttttcccccaacatatagacatctatagagctctacttagatagggaagtgtatcgtggacatacacacaaacggtttctttcttttcgctctatcagtttgaacttctcacgaaaaaagcgctcttcaccgctctgcatgcataccccagcgcaatacgctttctcgcttgtcacgcgctactcaacttgcgcgatcaacgctctttctcggcactggaccgttctgtgtagagccgctgagacaggcagatacacacgatttctcgagcttgtccctttaggggcgccttctcaggtttgcgcgagtcttttgatgtctcgcgccttctttgccgaaaaacactccacttcttccctgtggcggagctagcgcgacgagagcgcgagctgcacatgagaccgtcaccgtttcgaacaggtggaggagaagagagacattttcttatcgatgcggtgcatcatgcatgcaccactcagatttgacttgtgtagggtgctgacacacgccaacaacagacagctcgctcgccccccaattcaacaggctgtctggagacgcgctgccagtctcgtggttcgcggaaaagggaagcgaagaaagatagagaaggccaacactacggtgcttccaactctcaaggtttttagcaaagagacaacgagaccgtcgcacacagctgcacggctccgtgcctgcccccccgacatccggtgacttttgatgctggcgccctctcgctgcttcctctctcttttatgtctatctcgctcctctctttctctgcgggtgtctgccctgtccctcttctttaggccttttctggtcgactctcgctttctgctccactcgtccttgtgacgtttctctctcacctcttcccttccatgtctgcccctgtcgcaccttcctctcccctctcttcttctctttcgcttctgtctcctggttttccccgttttctcgagtttcgcgccttccccttcgcttcgtcgcgtctttcttcgtgaaggcgcactgggaatgcaagcgcca

SEQ ID NO: 2205 - DNA, 2321 bp, Toxoplasma gondii
  source 1..2321: mol_type = genomic DNA
gccggcacctctgtgaccagacttcccgattgctttggcctcttcggctagtaacttgagtgaggggtccagtggcctgtccctgatgcacatgggcgttggcaatcccgtgggtacgcgtatcatgcctttcccacctcgaggaaggcgtaagcagaaagtcaagcgaaacctttgaacacacttcccttccgcacccaagacacgtcagacaccggcgagtggtgcagataaaaaaatcgcgtcatgcgcgactttcccagtttatgttaccttttgaacaaagatacagcagttgaacttgtctttctggagcgccgttctgtacaaaaacccgtcacggcggatcagcaaagtacgagtgtttccggcggcaagcctagatctattcgtcaaaccaaccgccaggccactcgctaccgctttccgagactccaatccctcactatcccctctgacggagtatgcgaactattcagggacaccgtctcgcggtcagctgggtaaatgcctttaccaccttggacggaaagcaccctacctcggagactctgtacatggaagcgagtgctcagttccacaaatcggcacatccgtacgagcagcccacaaggtacaccatgccgagagaaacagcttttcttccactcgccacgggccctcagcctgcacctgtccgcgacaatcggtggtgacaatcacctgtttaagtttctctcaaagaaacgccgctctcgtggactgttgcccgttcaggcaacccagtgttcccttcgagaagaggggaatcttcaacggagggagaaagtgacgttgaaacgaaacaggaactgccaatcctgctgctgaagaacagtttgacgcgggcacaaacggatgcgttacggatcgccggaactgggcctgcgatggggcaaccgtcgtgggacagaaggagcacggggacaaatgtgagggatcatcaacgttttcacgattgaaacaaagagtattcctcacaaaagaccaatctagaaaaaaaaaatcattcaggcggtgctccccgcgggcaaagccatgcaaaaaaggggttgcctcttccgggctgtcaccaggaacagtctgtacgcagactttttttcgctggttctctaccaaaattaaggctctgtctatgtctagttcgtgaaggatgccccctcccataaacacagagaaaaacacgttgccttgagatccatcaaccaagcttttcgcttgcgtccctcgattctggctggtgagtagtaagagacgaggacatccccaccatcgttttcgcaagcgtcctgctacagaaagagaaagtgacgccggccaggcaatccgacccccccagcgaagaccaacgttgcgctttaacgaagggcgcagaaaaccactgaagtacgtgcaggggacagaagttcaccgcagggaggcgtctcacccgcatgcagcggcttcaacgcggaccgagtaaggaggcgtcactctccaccacaatacaggctctgcctggcgcaacgtcccagcagaaaccggacggcttcgcacccagaaagcacagcgtgcgcgccgttgtaaggaggtgtcaaccgcgtggcactgtaggcacacgaaatacggaagaaagtcaattccgcgccacaaatatgtcatcaggcagatgaggcacgttcccattccctgtgaaaaagggaaaatctccggaaaatgcggcgtctagtacagttacagaccgagtgtcgaagaaaaatctttcccggccacgccgtccacgtcgacttcagcgaggtccggtgcgacttcaagtccagaaccaacggcagcagtagctgatccagaaccacaatatatgtgcatgtatattaaaaagtatagaatatcgcgattcgcccatgtagagccaactttttatatctagcgtgttttgttcagcgaaactacgcaaggtgtctgccgcggtggtaaccatcgtccaggtatacgcaatccacaaccagacaaaaattggacgcgcgtggacgatgatggtgtccgggaaatccgtaagtgcttcggagaacaagctacttacacgccatgttcgagcaaaatggatgttacatatagagagtgacacacaatcttggcgagaggtcttctctcaatgaactgcgagagtaaagagtgtgaaacaagaagctggaactaccagaaaggagtggtgtgtcaacattgctgtccgtatgcgagtgacacacaaaaaacgacttgcagccacttggaaagcagctgtctctatctgccaccaacggatcattcgacatttgtcacgctaa

SEQ ID NO: 2206 - DNA, 2804 bp, Toxoplasma gondii
  source 1..2804: mol_type = genomic DNA
caacgtcctgggagccgccgtggaaacgtgggtattcactggctattttttcagtaagggagctttgtgacaggaacataagggacagaagggagacacctaagcgtatctggggcttacgagttatgtcagggtgtgggagttaaaagaaaaccaagcaaccgtgatttctttaatgcaaacagattttaattgaggctgtcacatcggtttccaaaaactgtaccgtcatctggggaaaaatcacataagaggatcgcagggcggggtttggcgtggtatgcggcattggcgacatggaagtaactcacaaatcccgcacatgcttcgatatgcctttcctgaacaaggaaggagaacaagaacagcgtcatcatcgaattgaagcatggccttgcgtaggcccgctcagctttcactacgctgccttcgttcacagattgacatgccacggccagcatgagttgggttttctacaaatggaaaaaaacacatcgcaaatggagcgtttgcgatgcagttagttccatggactttctacgtgtgcttccacttttccaagatatttgggaagcttcctttcacccagaaatgctccgaagtcagtcgtacaacgcaactgcctcttcttttgtaggtatactttgtcctcaaattccgaaattaagccaccagtgctcaggacgcatcatacaagagaacaagattacctttgttgagactcaaggcatttcctctcgacaagcctacatcccttttgacacataggcactaatttgtatgatagactaatatgatctgcagtctccccgatgcctctggccacacaggagtaggattctgcgattttgattggaaatttgtcatccatctgagtactacgatacggaaggcaacagcggcaaacgtaattccctcatcgctattcacggaagacctatacactgtccgcggttcggcattcatatgtatctgtgaaagtatggttgatgttactgcttttgcattgagttgctgctcccttggcaggcggatctctacggacatcgcacactagttctggtttggagcttggtagtatttgagaggtaacatggtaatggagcaagtctgagacactctctcgccacggtgtcttcgtttcaacactctgtggagatttgtaaatggtgcggcacgcgcacgtgttgagaaaaccagcatttttgctcatcatggtgctcagtgtgtggcatcatgtgatcaagcaagctctttactgaggaaacccttcccacatcagaaaggaaaatggtggcttgttcgtttgcgtaaccccgccagaatgtaagttacgtgcctagataccgccactgatgcatcactggggcagaagcatcatcaccccatcaagtgcacagaaaaaatggttgcggtacagaataatgcggctttatgaagcgcgggcagcgaaataagtctttgttcagttatagtcgccgcgtttcgactaattctgtcatctgtgacgcgaactgcgtcacagacctgctgcaccgcgctggttggagggtcatcaccttagagcaagtagagtaagccattttaatgaagcacataattttcagaagaattcatcttagtctgagtcgtcctcactattgcgataacctgatctgcacaaagagatctctgtactagctggttgttgtctcccccaacagacatcttgccttaaaacaagaagtgtctgtatttaaagctcaaacaaccgattgatgcaagtagcagggtcgagtttttttccagacacaagaggtggttcttagataccgttttaagactaactatggtataaacgcgcagactagttgttatgtccccgtgtctctattccagtcacggtctcaccacactgctggtgcgttggcaaaaccagagagtacgatgtggctctcttacttgtttgtctactcatttaacctcattcgtaacgggcgatgcttcttgttagtttgtgccttcaggagaagtaagtcttaatctgtcaacatatttctgcgttgtttgtgtgcggagccttgatggctatagggctgcttctacatctgcatgcccgtttgcttaaggggggcagtagtttccgaacatctttctcagccgagagacaggaaagtcttgaaaaggtcgcttgcccgtactatatctggcatgatcgtgcagtagcggcttctttaagtacgaccaacaggtgatggcgcatcagactctcgctgtgggggacgtgtaagtcgccaagcgcgattgcttttcagtcatcgcttttgtcggtgtccgattgctttttcctgtctgagcacaaaacgaacatgcccccgtatgttccaaacgtctgtgtcgtatcgtcgtaatagtgactcaaagcacgtagcagtaatttctcactggctcaaacaggagccacccgtttttccacttctttagtcgacaggataacttttttggggtgatgcatgtgtctattatcagcagtccgaattatgtttgtctcatttacaaatgtttgcttgtactggcagcaccctctccgaacgaacactgcaatactgtttgtgtgatatcaggtagccgcccctctcaaactgccgaactgttcattctggtttcatagcgggttcgtcaacggctagaaaatggtcgtaggtgttgtctttttccgtgcaacacgaagaatcaagatatctcactcaataggggaaacactattggctctcttcgccgcgacttcatcttgcctacgccctcgtgaggagggttccctcaca

SEQ ID NO: 2207 - DNA, 2799 bp, Toxoplasma gondii
  source 1..2799: mol_type = genomic DNA
tgtctgaattgtgggacttccctgcaaaatgaaactgaaacgccgaatcgtgtagcggcggtggggtacggcctgcattccatagtggatatcgctgcgaagttcagtgaacgaactgtgcaccgctgagcatggcatagtgcggctcaaaccacgccgacaatcgcgcatgcctctacggaaccactggaagaaagcctcgtccgagtcttcgatcgctcagtggctccgcgaatgccgtcagcatccgaggcactcagtggggctcagcccttcaatagatgagaatttaatgcagctcaatgcacattctgtggacgtatccaggtaacctttgtgtgcgactgagctgccacttgattccatttgcggagtgttgcgtcgctacaaacccgcaatatagttttcgacctaagcgtctaacaaaggttgacgagttccgggagcgaggccgtttatggctctgtgttccccaagtaatcaactgagccttttccgactactgaaggagtctaggatgaaaatggctgagcaacacgaccaaagtttgtccagctgaatactacggggatatacgtgcctttctagtaggcagctgtcggaagtgacagcagtggtgctgtacgacaagaacgttttccgtcccggaacacacgtgttaagcggacgttgcgaatgcgagtgtctgtaagcttcgtttcccccgccaccgggcgggatgcacacggtggagtagaaacttgccttggtacaatccataagggggagtacacacacattcgtgaattctaaaaaatgcacttttttttgacccaccggaaccacacacactcagatggcgctacgtctcacaacttgagatcggcaagcaccaacaggagagtgatttgcatgggagcgtgagacacgtccaaccctaaacatagttgtgttgcgcgaccagcctttggggttacagtaccacgatgaatcttcttcatcaatggaatctttctttgtagagcaaaatgacggccttcgtacattgcttcacagtaaacaaacaaagttcctccactgtttgccgaagtagcggagtggctgcggtaaccacatgcgaaacgacggggagccaacagaagcactatgcatttatggttcgtcgagaccttggccagtgtacactatgatcagcgttaccttctattggaagaacctaatagtttagttttgaatggagaaccaaacacttctagaactgcatgaattgtgtgatagctgtagcgtttagttttaccagagctgctacgcgtgaaagttgaatgccaacagagcatcccccccaggcgcagaagcgtgacacctgtagttgtagtcctaattaaattatccatcgctttcaccagaacagcgccggactctaaggaaagtcagacagaacggaattgcaggcctgctgcagaagaggcggctgccaccggttcggacggtccgttccttcccacaagaccgacagaataacgaaaacctattctcgtcccgtgcggtgcaatgagtcaagtttcccgaacgaaattgggaggcactcgtccacaactaaaggggtgccacccattccatagttgttttcaaaaaggcgccggatactggattataccgccgtctcttgatatgtcaaggaatgcacggagtgaacgtagaatcaagacagtcagttaccgactacccaaaacttctctgttgcagaaaccacgtcgtgcgcacacgaacacacgcgctttctcacgatgttacgtggtaggcattccggcaaagacaggacgatttcagtggacgagctgccatcctttcggaattcaacctgaccaacaaacgggacacaggacatcgtgcggcagatgtacgcggctggcttgcacattcggcgtatcacgtggttggaagcgtaaccttatgagtgagacctgatcagtgtatgcgctgggtctgaacaacatgatacttcgtatgaagcgaagccgaccacaagtactcgagacacgattggaccgtaaaaccgattgacagtgctataggaggccatttcctaacacgaaaatacagtggtttgatgtcttcacgtaggcaacaaccacactgcgtaccagtgtgaaaagttctttttttaatgacccaactgaccccgccagcgtcgcggcggactcggcagcgccttttcagtccgcagtgctgttgaagcacacgcgaaaacaatctcctcacactttccaaatatattcagttaccgtgttcattcatgacggagtggagccacgaggtccataaagtttacttgacgtacccagttctcaatagaggatcttgtgtcctcagactctatctatttctgatgaggtaatactggtacgcaacggatcatacatctttatgttcgtaatgtcagctgtgcacggaaaattaaggaagaagaatccgcatacttgactgacacgttgtgttctgtcgacgaaaagtgttgccattgaggctcttcagtgtctggccctttgcagtcgcactatacgcggcaagatggcggcagccgcggcaccggtttgtcatcagctgttagctgtgatttttcgtcggaaaaattgcatgcacgacgaccgatccgggatgctcggcacctcggcatcccccggcgagctgacaagggaggttgtgaacgcgcgaggctttcagttcaaaagcatttgcctttgaggtttattcgctaccattttcattctcgattgtgtcttcgcttcgccattgttttcgtccgcttccccaacacaa

SEQ ID NO: 2208 - DNA, 2409 bp, Toxoplasma gondii
  source 1..2409: mol_type = genomic DNA
ccgaacctggacatgcgcaactcgcgtttttctgttgctgctcaagttcctggcgatgagccagagagcgccggtacgcttgcgtggcttcgaggcgggccgcaatgtcctccgacttgagctgttcggccattcgctggtggtagtcccgaccccctgtcagcgacgaagaactcagctggtggaccagactgtcgagggcgctctcgatggaagccgccgcctcaccctgacctgcggcacccgcggaggagcctgcagcaggggcatcagactccttctgcggattcgaagcggcgactccgtccggtcgaggaacttcaatgatttccccttcttctggcgcagccacagcgtcgaggctggcggccgtggatcccggcgcaccggtccccaggaactctggagaccccacagccgccccaggccggcctgtcaacgtgagagagagaggaccggatcccgaggcggcgccagacgagaaggccgaggttgccgacatggtggagagtgagaaagagacagacaggcaagaggcgcctccaggaagcgacggtctccgtgggagactcgagagttgcctcggaagacgaacaagaactctgtgaagcgtggagcccgcggcggacgcgccgacttcaccacttcacatggtgggcctcgcaaacgcttgagtcgaggagagcgcggaagatcgcgtctgacacacagcgaacgggtcctcacagcgaagagtccggtctgtggagttcaagagggcgacgcgtggagaatgggtgtgaaggcaagcgagacagaggagacgacgagagagactgcagacagatacgccccggaaagagacggggtcggacacaacagacaggcatgtgactgtgacaagacgcggagaacttggactcggatagacttctgccgcagagaaggtggagaactggagtggctttccagtggcagcgtttctgacaggcgagaaacacacagcggacgcaaggaaagaggccttcttcgcgggtgagccagctgaacagacagctcgcagagagcctttttaacatgtggacgacgacagaaaggactgtcgcttcgccgcgcgcgcgagaaagagagctctggacgaggtggaaacgagggtggactgcgagcgtgatggacggggagaggagagggaaatgccaaggaacggcacacctgttaagacgcgtttctcgccagtcacagacaacgcagacaagcctcgcgaacttggcaaggcgaaagagacaaccacgaatgacactctgaagcaagctggtgggcacgggggcgtggacccagattcggagtttcgcaggcgtctgcccagacaaaaaagcggggccggaaacgcgacggagagtcgcacagactgcagagagaagtggcgcggtgcagcctcgcgggcagcgaaaacggaaactgacgggaaaaagaaaagaagggagcgagagaaaccctccgagacttggttttttcgctgccgcagctatcgagctgtacaaacacacgtggtcacatgcgctaagaagcgcctcgccctccggcttctccgaagagaaatggaaaagagttctcgcagctcaggagcgcggaatcgaagaaacgcagacagacccagcaagcctgcgacagccagcaccgagaacgaagttggaagaagccccttggcgaagaactgaagaagaccggctcggtaacacccaggggacgtagaggacaacagagtagcagcgcgcgaagcgaaccatcttttcctcccggtgttgcatgagcggggaaaagagcactcccggcgccaggaagctgaaacctcagacggcagcaagtggactagtgtgccgtggccgtctttaaaagaagattttcgatcgacaaaaacgacgctccttcgcatacacacgatgccagactccgatgacgcgcagacatccccagccgcagagaggaggggagtctcacacgagtgccggcaccacctctctccacccgcgccttcgacgtcgtgctctgactctccacaaagagctgtagacacaggcgggcagcagttatggagggtgaacgggggcctcccgcgaaaaggcgcactctagaatttcctgcaccgtgagtctccacaaaacgcagaacggacctttcccgagtccgagagccggggaaacgaggcttcagactcctacacgcactcgcttcgcgcagaaaaagcgggggaaccctcttgctcgggcaccaggagcttaaaagagagaaaagaagctgcatcgaaagccggaagccagcgcaatgtcgcgcgcgggacacttggcagtgtatgtacacctcgtgaaaatcctgccaggtgactgcagaccgcgcagtcgcgtttgccttcccctctttcgcttccgctca

SEQ ID NO: 2209 - DNA, 3848 bp, Toxoplasma gondii
  source 1..3848: mol_type = genomic DNA
aacacacacatgcagatatgcacacaaatcccagacacatgcgtatgtgtaagtatatttgtatatacatacacatatatgcatatttatatgacatacatatatatatatatatatatatatttctgtatacgacatgtatatgtatatatatatatatatggagaggaagaagcgcaagatgggaaggagagaagactgcgagggaagaaggcccacctgcagacaaacgcggatccggtagttgatccactgttgaaggcgagcgtttttcgacggcattttggagaacttgtttctgaggagacgaagaagccgatccggcgcagagagagagagagtccacgcagtcgcaagtggaggcggaacgagttcccgagacagaggaaacgaaagagagtcgtggttcgacgcagactgagagaagaaggacggagaacgcacaaggaaactgccgagtggactgcagctcgaggagaacggagggagaaaggagcgacgaggaaaggagacagacaagactcgagccgcgaagcgagaggggaagaagagaaccgaggcgtgacggcgagaaacacccgagaacgttgctggacgcgagagggtcaggagaaaatggagaaattggagaggaccgagttgacagaggcggcgacgagcagggataacaagatgcggtgcggtcacaaacgaacggaaaggacttcgcgcttggagcagtgaatgtgcagactcttcgggaagatgcagaggcaggaaccgagaagcaaccgcttggtgcttttctctctctcaagccgaaaaagcagaaaaaacggcgacagtcaacgcctgcttctcccgtctggagatccactactgcgatgcggtggagtttgcgaggaaagagaacgtggagaagagggcgggcaggcaatcggagacgggtgcatgccttccatcagaagagcgacgaaaagaaaagcgcagcgccttctgcgaaagttgaacgtcgcggaaaacagaaaccgcgcagagccgccgtcacccgagtgtctgtacaccccactagaaacgcttctttgcgtcacgctcttttctcccagctgcatgcgcgcagagaggctggcggccgcgccgttcgctcgcgagaggaccgaggaagaaagaaaaccaggtggctctctcgagttgccgagcgttttcggagctaaatgatcgaaagaagatgacgcactctccccttttgttcgtctacacacagcctagtcgcgacagctccacgagatagggggaagactgaagcagtgcctttcttacacagggacctgcgggaggcgagaggaaaggacaaacagtaactcagatcacggagccacggttttctgtgctcttctcaatggagtttagagctaacacgacagagtcacgggttactctctctagaaagcggtggttgttctgtcctacagtggccggaaggagagtgcctcggcttatattcggagaacaccgcagtagtgcaccgaaagggtgaagacgcgcgaccagacgtcgcagctctgccctttttacgctgtgaggctccaaatctgctcaggagatgaactctgtttttgtcgactgttgcgcactggcggtcggctctcgcttgtgcgactctgagttccccaggaagtctacgcggcagaagagacttggcagcgttactggaggcaactgacacacacagtccacgcaggagcaatcgacgacacagcagtcggactttctgagatgaggcagagtctccttgcgtctgcgtcgcagaactcaggaagggtgtggacagtcttaagcgacagaggcgcgagcgtgagaagcgcagtcagttcttcggtgttacttagagctgcggggattttacaagcaccacggttttaggaaggaaactcgtagcgcggcaagactggtgtacaggcagctgctcagcgtccgtcgctcgaggagcctcagggacagcagcttcgagctgcgttcgctgctgttcagaccctgcagaacggcgacctgcggacggagaattcttcgcagaacggacaagcagctcaagcgctcggagtgcagatgcctgcgcgacgagacggatggacagagaggcgacgcgggagagagtgagaggagagcaggaggaagaccgagagagacggaatacgcagagggaaggatggaagcgacgatctatgggagcgccggaggcagacagacgagatacggcagcaagtacaagggagagagtggaacggagaacaagagtggaagcaacggagatgagttgagagagactatgaaagcggttttaggttttctttctgtgttctctgcatcagcggtgcggcagagacgagcacgcagctcgagtcgacttcgttttcttctctggtgtcggtcgatttaaggcgacctccgttcggcgtagggagttgaaaactgagagaagcaaggagactgcagctgttgctgtggagcggaaccggagaacggcgttcactttatcgttgttctcccgccactgacctctcttctgtccccactgaaaagaactggtcctggcctcgcagccgggcgagagcgtcgttgcgttccgtcctgtttcttttcgtaacgacgcgagtgtgtgtcatctctccggcagcaccctcgacgaaaaggtcgaatggcgctcagaagattctccctctcccgtcctccccatcccccgcgttgcgtttttccgcgccgtccaccctctcccctcctctccggttcacaccccccgatgtctcggtaaaggatgaccacccaacagtcgagagagcgacacagcggctcaagcgcgattttctcgcgggtgcggatcgcgcggggagtctgttttcaacgagtgcagagccgcgtttctcttcgcgtgatgacagggtcgacagaaaagtcggaaaacgcgacagctggatgcgcgtctccgcacagctcctgcacgggagggtgggagccgaagaacggtcgccagtgttcccgctgtgccggggtgtctgtagactggaaaaggcgttttctcgattttttattcgcagaaagtctgcgttcgcacaccacacacactctgcgtcgcgttcgcaacgctcggctgagcctggagcggagacttcctcatgtttctccactccgcggggggtcggctgttttcgcagcacacctcttcggagcccagccgggtgggcgagtgaaaccaagtccaaggcgagacttcgcgcatttccttctgaactcttcggtgccttttctccgcggaaattgccccgcaaaaaaaacgattggcggactcgcgctccccgcggagagtcgtctccctctcacgtcgccattctccgcatctcgagagagaaacttcggtgtgtgttaccggtgtgacgcctctggggaaccggctggtgcttgtcttcatctcgacttgtgtctcccgtcctttctctctgcacttttccgtcctttctctctgcacttttctcctgctgtctcgttctccgtttcttgccctttcttcgtcgaagaaacgagacacccgacggccactgtgcgtcgcgcctcgcgtccattctctcgttttcaccggctagaacgaccgcgactccgttgtctttctgcgggggggaccgtgtcttcttcgtggttggaagatgccttctcggctggcgccgtgaggaagcggattccactcaggaggcagagcgacaaaccagaagaaacgccgcgttgcttctccgtcagtagtctcagcagaggcaggacgcagttcctctcgctgtcggcgacatagttccagccgaaaacgccagcaaggagaggaacca

SEQ ID NO: 2210 - DNA, 4518 bp, Toxoplasma gondii
  source 1..4518: mol_type = genomic DNA
tacgatgcagacctcatacaacctgcgaagaagtcaattatgtgatttcttcttgtcaatctaaaatgccaatgttgcactataggatgatacactgagcacttgccaacaaggaagacagctgggggagcgaaaccgagtggaggagggtgtttttcaactgtgattccatggttatggaagtaaatctcagtgacagttcagtttaccaaatacgatacactccctcttcagggatacctaccgcctccagaaaaatggccttcgaccttctcttatagttcgcgccacgtcacttgaacaagcagcctagcctcttcagccacggaatgcgtgcaagcgcacatgatcgtgaaggcggaagcggttcataatttaaaagctgctacctatgtcggctggtagcctcccgtgcgtttctgtgttcatttctcatctacggtgaagggccggtggcaccggcgctaggccttcacaagagcaaggagctgccatcattcgtaacattcacggaagctcctcaaatgggatggaccatatttttgccactgcgttgtggagttgacgaatgctcgcttttcgacatagaagccaggggggaacaggaaaactgacttccttagaggcgtttgtgaacgctgagatggctccaccccgaaaatgagaacaaacgattgtacagtactttcagcgctgtcgatgctgttgtctttctctatgttttctagtgcatgacacagcacagaagcagctgatggagttgtaggatgtttgagcactggaacggtggaaagaacatcgtttttcactaacctagggagtctgtatggggagtcagtagaatccaccggaagtcagatttcttcatccgcaagtacggacttcgtacacacgatgtacgatattcgagtagacagggtagaggtgtccaagcttttaactcagcactttgctgcggttgtctctgtatttccactcctaagacaaggaattgttattccgaacaagggtcagtgagattcgtcaaaacaggaggaacaactgtggacagcgacgtggcgaaaatggtcacgagaggtagagcgtgtcagcaaacggaagaagcactcccgcaatcgcgcgggattcgagtggtcactcactcatcgctcgatcacctctcctctcgttcttcgggtacgctggcgacacgacgccattgcgggggaagaaacaacctccttccccttaacttgtcaacatgttcctgtgcaaagcaacttcggaacattgcagtcacgttattttcccgccactcgaagtctcttttccacctatgttatatgcgttggcgtgcttgtcgagtttcttacacgtgtatgtatgggcatgacagaaatacatgtactgcaagcatacggctgaaactgtcattctccatcttctgtgccgcagaggttcagtttctgctcctcttcgtccatctacttttggttgcgaagtcgcatcccaattccatcaaactagctcatacagaaagacagtacgtgagtgcattcctgttttacttggcagaaacttcggtgtcaggcgaggaggttcacttttctcccactgttgttgacatatttcgttcttgctccgtctcaagcggatgccgtcgcctcccattcgtacaacgcgtttgcatttttcgggacgcacacatccgacgtttgaatgaaaccagccacagtcgtctcttgagtggtagcgctgactcaccgcagaatttccattcttctcttgtcagaaaaacgcccctgcctcctactcatcgcaatgagtctacaatcatctccttgcaaaaatccttcacgcggtcccattaagtgtggccgctatctgcaggcccgtttaacgaagacgcgcctgtgcaagtatataaccgagcgaggaagctgcgaagcgggcagtgcctgtgcatatgcacattcagaggcagaattggttcccagacctgatcttcggaaaactaagctgtgttatgcatttctggctaacagatgcaaactgtaagttgcgcgggcgaccactgcctctgtgatatgctgcagttgtagagaccaggtgtacatgagaacctaaacctaattacagtgaggaacagtgaacaagagagaacacacaatacatgtgaaataggggaaatacagctctgctgcaccctgctgattacatgaaaaattctgaaaattgaaactatgcaactgctccccctttctgtatgctcgggttgattagttcgtcgtgcacaatgtagtgttgaagaacccctcttgctagtgagtcgcagatagctcactagaggaattcctgcaataaaactgtcttttctcaagtagacagagcgttcaaaaaagccaggaaaatgcaactatacatctgaataacattcatcaaaccgtttccattgtacggaactgggattgaaacgaaaaacaacttcgctgctgatagagaaaggctctgacaccaatgcaaggtaatactacgattgcttccacttgtgacacacagttgctgctgtgtgagtttcgtgaacgcaaacgaacaaaatacagcagcgttcgcctactgcatggttctttgatgttactggaatgaatgaaacaggcactacctgtacgttggatcgagctcaaaaacttctggaagggtgctcaacatcaaaagcatggtcatgcgtgctgaacctagaacaaagaattggtttttcaggagcggttgtttgtcgttatatttccctttcaggggggatgcctgttcgtatgcccatacaagccaagaacttagagaggttcaacgcctggttctccccctcgacgagagtgaagcggacaccatagagcccaacttttgttctccctacgttgaatacgtaacacctccaaattcaccatcaccctaccgtgctaaaaaggcccaaacaacacagagagtcgactccacggccaacgtgcaaggacccattcagaacagtgtggccgattcgaccgactatacgcctccgaagacgttgttcattcctttgcctaaacatggggatcagacggaaactagaaaagaacacacaaaacaggtagaggaagtagttgggggcgagtcaacgccagagacgcctttgctgagtgaccaccctcaagttgcggcagcacttcaacagaactgcttaaatgacgagaaaggtttgatatggccgcatttcgcaaaactccagagtttctttcatgccgaaaatcaacccgcgtggacacaatcaactccaactccacatgtcgacaggagttttgttacttgcaatgcagctccagcacaggctcgccatctggtccctgtacaagcgtctcctgcgtctccaggggcatatcttcctctcgctcccgcaggaagcctttcaacatcgccttacttccctcaaaacccctcccagatttgtcccattatggtacccttctggaatcagttcatcaataacacagttcactcctccccaggggtcttgtgcacaccggcttttcagatgcagcacccgagaagtcagtatccacagaatggagcgttctgctagcttgttgtctccctaacccggaccactgtctctccagtctgattgagcgaagacgtcagactttgagctttcaaaaacgtgtgcttcatgtgtaccttgtccacacgtcgcctgttctgtaacccctgtaaacatgtgtttccgtacatacacgcagaaacgggttagcatcgaacgagactgctgtgtagtccgatttccccttctttctagctttcgtttcagctccacagggcggaaaactgttgcaacaggagaacccgtggtgattgttgctcgctgtcatccttcgtgtacaatgccaacagttctggtacatttgtcctccggtgcacgcatgcacgcatttcttgcatgcagtccctcgctcacagaaaacgatggtaggtgtactttttgtagcttaacgcccgtttttctgtgttttatcagttctttcttcctcgtgtgacccttgtctattccccgtgatgttcgcactaggtcgagaatttatggctgtcttacccttcgaacgaacaccgcgtttctcgtatttcgttgtacggacaccgcttgagaacgcatgatttacctgtccgtgtaccaaaactgaatcaaggaaagcaacatacgaaaattgttggctggaagagtggcttccagttctgctcacacaactccggatcgtggagcagttctatacatacagccggtgggtcatggtacagcccggatgcaagccgcgccgttgagctatccgtgattctcagtagtagagtagaagaatcacccttttcaatgcagctgacgtactcctgctcccattttaaccaacgcgtcgcattcggtctgctctctgtttaacgctcatttcgcaaacacggaagccacgatgcaaaatccctgctgagatactgtctgccggtcctgaggtcatttgcctgtca

SEQ ID NO: 2211 - DNA, 1927 bp, Toxoplasma gondii
  source 1..1927: mol_type = genomic DNA
acacagctcaagagagaaagccacagttgagcctacaaatactcatgtgtatatcgacagagagagccaagtacatacatgaatatatatatatatatagagagagagagagagacatataatataaatgtgtaaatatatatatatatataaccagagtcacagagctttttcgctgtttgtcgtccgtctgcaatctgcttggtggataagagtttcttccttggccacctggctgcgccgtgcaattcgtttttttaacttctgaaagaagctcaccagaacgtcctcagggtcgatgaaacctggatcggtgcggaagaagcctgtacgtacaccccgttgtgaggagcggagacaccacaatgtttctctgtgcctgcgtccagaaccgggtgcatgcgcggtcgaggagaggagtaagggagaaggcgaagacgatggtctccgaggtgaatcggaaagacagaaagaagagaaaagagaacgcgaagaacgagactcaaaccgcaacaccagaggagacgaagacggcgaaacgttacaagacaaaagagacttgaaagacgaagaagaggaaggagagaaagcggagggagagaaacaggaagatgtcggaggagagagagtggagcttccgcggctctgttcatttttctcttgtcttgcttcgcgtctttcttgaatggccgtttgcacagggaagttgattttcaccctgcgcctctgctgctgtcggagaccgcagactggctttcctcccctgtcgcccaaggagcacagagaagagaaaaggttcctcatcgtgtctgcgttttcgaggaaaaccggacctcttgaaaaatgatgcgccggaaacatgaggtgaggcagtggggaaaggacgacgatacagcgcttcgggtactcgagtcaaaattccaagtcttcgcgagagaaaggctcgaccctttgcctctctcgcgtcttctctctcccttgttcttcgctcctttccagttctctgcgttgcccttcgtttttcctctcgccgttgagcttcccgcagccatttgcttctctttgttcgtcctctctctgttgttctctttgagctttctcggcgactcttcccagacttcctcggtcagcaaagagaaagagagaaagagactcgagggccagcgctgcggcgtagcgacgctcggtaagaacagccgggcacccttttcgtctgagtcacaggcatgaatgaacaagttttttcaggcctttgtttccacccactgcgttccttcaatcattcatcagtctcgacgctttgcacaaaagcggctcccgctctcacgccctctgttcaactgccctgtctccgcgttctcgcgtccgtcgcgttgcatgaggctttgcatgcacttgcatgcactctacttttttaaagtatttatttaaatgttcataaagacatgagcttgtaataattcaaatataacttgcgcctttgcatgcgtctcactgtccctctgaggggctctgaaggaactccgtcaggaaggccttccagttttggcggcgacgataacgagtcgaggggatcctcgaggcacacccagactaagatcaaagattttttttcctcccctccgttttcctttgtatgtacatcttcgtcttctctcacgttcgtctgcgtcttctttgatccttgtaaaagaacagtccgtgacgcaggggggagcttctttagtcttgcttctcctccagctctttctcgacccccgaatcttccctctctgacattgctccctcttcttccctctgtcgttgctctctcttcttctcttttgttcttgctcttcttcctctcttcctccgtctgacctccttcgtcagcatcttgcctttcttcgccgactgcttcttcggcttcctgacggcgaaacagaca

SEQ ID NO: 2212 - DNA, 2027 bp, Toxoplasma gondii
  source 1..2027: mol_type = genomic DNA
attctttgtttcctcgtcgcgccttgtaagaagctctgactgattcagtgtcttttcctctctcctctgctcccgcggcctggagagaagcagaggcgccccctcgtcgtctcggtggggctcttcgattgctttttctttgacgtcatggcaagccttcacatgatggtcgtcagttgtttctctgctgcagtgacagggcggcctccttcgtctccaacaagggacatgacatctccagttttcgcacgcgtcaccctcgtcttgatcttcgctctcctgcgtctcctctctcgccatcgtggtgacgagatcaacagcgaaggagaataaaggaatgtggaggagcgacggctctcagtcgacagccacggatttaaggtctcggctttccttcttcgactctgtgcctttccttctgctgtcttcctgttttatgagtctcctttcctcgttacattccttcttctctcccctcaacctgtctcttttccccggcttgcttcacctctcggacctcacctgcagcttctctgatcccaggctgtccttggcaactcaaagtctagccgagaattcagcgcccaacagacgtccttacgtgccaccacagatgcacgggcagacacagtccgtcctttttctgttcgaacttacttttggagtcctcaatgcatgcaagttcctttgtttccaactctgtccgccttctcctgcggcatcgcctgcgtttgcttcttcctttcaatgtcgcttggtttgtgatccacccgaactcgtcttgttccttctgctgcctccggcgcatccagctcctgcctgctgcagcttcttcccggttgtcaccttcccttcttcactggtcgggcagacgacacaggaaagacagaacactgcagaaaagagagattcgacgcgacggtcccagagaagacgactggcaaaggagagaagcaccaaagatttggaatttcagcgaggcaaaaagtcttcgcggccgggaacgaggcactccagggtgtaccgacacccgaagcacgcgagagctgacagagcgactgtttcaaggagggactgtcttcttcctggttcgcgacttctttccattttcaggtggaactcgaccataacgaagagaagaccagcatgtgtcgagacagaaaaacagctaacagttcacacgcgagacggcgcatgtcgtttcgccgcttgcatgcatgcacggacatactggcgagttcaaaaaaagtgtcggattgatgaagaaattcaagcaggaaaacctcatagtatcaaagtttttgtgatcatcgtttttttttgcatctctgtagagctaactctccactttcacacaccctggacagcccttctgcctcgtgtttgtacctcgtatctcgtggcgagttcctcagcagtcacatcgacataaaactcgaagaaaggtccgttttttttctcgccagatcgtgctgactaggtgaacacaaaaatcgccctgcgaaaatggaaccagtgaagctacgttgacttccgttaacgggcctacctctccgattatcttgctgccgtggcttgtacttcaacgtaaacatccaacgtctcaaaaacttttctgttctgcctgaaaccctctgtggctgttccaatgcatgctttcagctggctgaactctgagtcttgcgctgtccgctttcctgctcctttgaaagggactgtttctgcgtcgtttcgtggtcctctgtgcttccgtgacggcttctaaagacgctgctctgtctccggttgcttcctggtcggttttgcatgcatggtcctcgtattgtggttgcctgtgggagctaggcctagaaatcccctcttataatgtacaagagggagtttagcttcagttgtgtcttgactgatgctccatgcgcgcggagttctgttgcgattctcgagggttgaagatatcatagcaagacagagagcagcagatagagagacaaagaggtagaacaacaggacgacagacagtggagaga

SEQ ID NO: 2213 - DNA, 4260 bp, Toxoplasma gondii
  source 1..4260: mol_type = genomic DNA
cgtggttgctgtcctggaaacgaacctggcaaaagcactgggaaaaaatgacgccagctagcgggtggcatgtcgttgagaggggcaatctcttcagcgcttctcagagtgaagcggctgaacttgccttctttgtagatgaagaggaaggcagagaaagaagcgcagagcttcagtggcgaggtagaaagtatgcgcgggagtggaacgggcgagaaagtggctctgtcgagacggggattacccacaagagtattgatcaggaaaggggtggtaagcttgaggaatggtcgcataaactttccgaggaaggtcagaggacgagaccagagaatagtggtagcgtgcggaaccagagagagaccctaggagatgaactactcgcgaaaaaaaaaagtagctcgacttccagtgatacgttgcaagagccatctgctaagccgaatgcaaacaaacccggcctttcttctccacaggcttctcagagcggacgaatgctgaacgatggggacaagcgtggtcagctcccctcgatcattgatgactcctggctcaccgaggaagacaacgacgcaagtcctgccctttggtggcttgtccccaaaggggcctactgctgtcgctgtgggcgaacacagcgagaaatggcgttgtcatgtctgggtgacattgtcgcgcttcctcggtctctccgtgaagaggcctggaagcgtgcaaaggaggctgaagctacagctgatgcagcggcttctctgtcctcagtgtttgcgggcagccctcttcgccacggttcgagcactgttctcgagcgagacatggcaaggacacgatctctggaagataggtcttttgcgcaaatgatgcctcactatttaagcggtgcatgcgaggggctgacttacagaagaacattccggggaggggatccgacagcagaagagagtgaaggggggagaacgagccacggtcaatcccctcactcgcagacacagcgagacagagctgacagaagtgaagagcatgggcagacaccggggtttgcagatacgaacgaacgaaggagtagaggcgctgagtggggaacgagtggtcaccagacagaagtgtcttcctctcagttgccgccggtggcatctctcaatgtgcaacctccacaacacgtaagcgaaacgaaaagaggaaaatttccgccagtccctgtggacagagtaggctaccgggaagagacggggattgggtttgaccgggacggacaaggacaccgaacgagtatcccaagcgacgagaacgacacaggttctatgtttctttcacgcggacccgggagctcgtgggcacacgaaagcagcaaggacgagtttggggaaaactgcaaaagcaaggacttggcgctcactcgtcaaatcaaatcgtctccgccctcgcctccatatttgaaagcggtgtcatcgcagtcgagacactccaccacgggcgtacaaaattgttacggcttttctgaatcgcggcctgccatttacacttcgagttcgtcgctgccagctaccccgggaggcaacactactgattgcgacaaagggcgttccgccaataaggaggatctccgtgcgttcaaccacgatcagaaaaaacagtttgtggacattgtacagtcctgggtaccaggaacgcctcgagtcgatgttcagagcgattcgccatcgtcggacaaagtttcgcgactaagtgaagcctatacattcaatttacatcgtgcctcctgggagttgcagagaaccgacgagcaccgcgacttgccccaagatggattcattattcaggagaacagtcaagtaagaggcggggatcggacgggtggtaacctctcagaggccgaactccgccgaacagactcatcggcggacagattttattgtcagtgccacatgcaacccgagaatgctgacaacggagtgatatcttccggaggtgcagcagtacattcccccctttccacttcttcgacgtcgtcgtggaatccgggttctccgttagcgtctgaagcagacacattagatacccacactttcagagcggcagcggaggtgaatttggctccgcctagcgccacttcactttgcgacactagaattaagtcatcgcaagagaacaaccgacgaacggaagagaggcagatgtcccaggacgccgcgtctcatgggcaatccgtaagccaacaaaagatccttgataccaatgggctattttgcctctccgaatctccccctaagaatcgtaggatgaatcgctggtcacctgagtttgcggtacacactgaatcacagatcacaacggcagaagagtccctgcgccgagtgtctgtgaaggcgaaggcacaggagaccgcatcacagcagcggatctcgctgctcgcggttggacgtatggcccgacacttggagcttgtcaacgaagatacatttgccgtgtttgcgcacataattatgatcctcccctcccgagttctcgttgtggttgcccctcctttgttcgaatttctctttgccctgagagatgtttggtgtcgagatctcctccttctcccccccaaagggcagccctcactcatgctcaaccaatcgcaacaccagcttcagcaggaacttcagaaacatcaagcgtacagagaggccgttctgcagccgatcgtctcccaaagactccggcaactcctggctctcgcactgcgcaagttctattcatatagaagacacagaaaagcaggacagtcgtacatgctggaagacccagtctatggaaggggagcgaagtgtttaacaagaaggtccgtttctgcaacggccgcagttccatgataccagtgttctagcaacgcatccgtagtgggtgtgtggtgaactgccagacaacttcgcaatgtattatcaagcgcccagaggaaaacggatgtttcttgcgatgcccgtcgtgttgacatagctgaatcagagaccgtgtacatttcttcaccttaactcaagtgatccagtggcttgctgcgttcaccagcatgtgcccgcaaacgcgctgaacggcctactgacgtgtcttcctttgttcgtctgtgccatgttttcacaatgtgtgtgcgtggtggccagcgcaatgctgccgaggtgaccgtgtgtctttttttccctcgtgtttcacgaaagagcgaaacgatcgtgtggcagacgattcatgtggaagggacaactacagtaagtaagcatcccacactaaaccgggagacacggataacgacggtcgtgtgtgccatacgcgatagagatgcatgagtaggccttcgcgttcatagaaacgacagcgaaacgtaacgacgaacgcaggtgaaaacatgagcgcacatggcttcagatgcagaaactttgcaggagaggcaatctgtgtatcatgagcgaaagcatggaacgagacgcaattgtgtaaggataatacaaccgggagggcgcagcacacaactgtaacagcattgttcctctggcgcccccctacggcgaaagagacgccagtctatcgttgcggcactaaacagtggtgtctaatgccgatcccgtgttgcgctgtggggatgatccttacgaagggtggcccgaaaggactgccgaaaagctggaaggggatcagctatttcttaaaagctgtcgatactcgccaaattacttccgaggataatcccgttctgttcagtcgggactgcgtctgttgtccaacacacagagggcgaagtgaatgagagagtagacatagggtactttcgcagctcccgttggttttcaaaggacaggagcgagattagagcaaaatgttgtctggggaacagcctgagtggctgtgtgcaggggattcatgctcgtccgataggccgctcgccaacgggttgaggtgtaactacagctagacgaagccggtgtgtctaccggggagctgtgcagtggcgcgtcattgtatagcttactgttgcctctcttttaattacgccagtgcctttttctttagatcataaacgtggcgacgtcttatcgcacagaaaccccttctgtccaggtctgtctctcctgagacgccaatcggacaattccttgttccggtatcgtatgggaccgctagtgaacaagttagggaagagtgactgacagttggaaacctttgcgtttttggcaaacatacttcgaacgacacaggcaggtttccggctgctcgagacaaatcagggga

SEQ ID NO: 2214 - DNA, 1928 bp, Toxoplasma gondii
  source 1..1928: mol_type = genomic DNA
gcttttgttttcgctcgaaaagaagcgttttatgtctcaaaggctgcagatgtttgcgatttgcagcaccttagtggggattgtacaggaaatggttcccctgtggacaggcgtcggttcttggtgcactcgcaggatatcccgtgcctgcagtggtaggggaaacagggcgttttgagggagaagaactccccttttttctgtcgcctctggtctttccgagtgtctctgttgtttcaagcgttctgtcgcccagagagaaacgccgcgtttgcaagatgtatttgcaagatgtaccgacgccccgtttcgtcgcttcggatcgacttttccgacccactgacgaattttcgagttctcgggtgaatgtgccgtgtcaccagagagaagcgcttcgggctctcctgccctcagcaattgtaattctgttccctggaactgaaaaggagcgtcgagacgcttggcttcaccccgagatccgaaaaccgcattctcccgccacagacctgtcgtgcggcgtagccctctcggaagccttagcatcgcagcacacccggggcagagagagcagaccccgagactttgttgcgcctcagagaacagagcgcgaaactcaagccacgttcggtcttcaaatgcacagccagagaaacggaaacaaaatgttcgtctcgccagcttccggagagacaaccaaggggcacccgcttatacgcagtggggttgcttatacgtccttctactgactcaactctgtagagatgtatacaaaaaagtatgaatgtgaaagtagagatagaccaagatatataaatatacatgggaggcacatgcatatatatatatatataaatatgagtgcgtatatagatatgaacatgactccggttgtaaatagggtattttaggtgcagctagtaaagggctgcctgccactagacgaaaatgcgtctttccgggctccaggagatccgccgacttccctctcggcgctcggcacctccttctcttctttttgtttctctgtctttttctgcaaactggatggttgccctgtcctcgcctcagcttcacacaagatctttccgttcgtgcatcacatcgaagaagcatgccttggggcttggcatttgcagagacacgtgtggcgtggcgttggatgaagcagagatttttcctcaccagcacaggttttttctggcagacggctgatcggttgcgctcccattcttcctcagacgtttacggtttccccgctttcttcgctcctcggttcctcgtctttttcggggcaactcctgacttttctgttgcgacatgccccttgcgtttgtgtgtgcacagtgtcttgagttttctctgaaacgtcgacttgcgaaacttcggctcttctgccgtctttctagtgttttgccgtctgcactgggacttcttcgagactgcctagacagcgaaagtaatggatttcactctcgtgtatgacctgtggttccacgtttgttgggttctcgacataacctgcatggactgccgctatcaaacttaacagcgagagaaaacgactgttcagatgctcgtgcgatcaggagcgtccaactgacgtcaacagtttttcccgcgaaagcttcgttcctcgcaacttccaccacaaccccgtttccgacagtcgtgggatcgattcttacacccccctcccccctcctcctcatctttttggcgctggcaaaggcgtccgctgcgcgggcggctggcccctggcgagacagaggtcgcttgcttgtcttccacgttcgcctggcaacggggctagtctgcagccaagaactgtgcgggcagatttgtcttttgtgtccgtgttgttcatgtcgtgtgcggtcgccaatctgtttgtttgttccggagaggacgctcttcctgcaaatccaaaa

SEQ ID NO: 2215 - DNA, 3845 bp, Toxoplasma gondii
  source 1..3845: mol_type = genomic DNA
gttctgtttgcttgtagaattgcgacttttgatattggctgaggaacgcagccgtcttccgttggttttgtgttgttctacctggacgacgcgaagagcgccggaaacaaaggagtttccgtcttctccagtgtacttttggttcctcttttgcatgtttctctgttttgcaggcgctccgtgagcttgcgcaagagctccaaacggccgcggtaatcgctgggaaccctgtctttgtaagacccgcgtttcttcgagaaaaagctcttgtcccagtgatgcgtattaccaattcagtggtgcccaaacgtaggaagcctgtcttataaggtagaacggggattctagcttcacatttttatccgagcggtgttgctctcttttaggggtcttcaacagtccactggattgctcgcgtacagcaatcctaaacaaggctactccacatcggttgtgatcgaggcgccatttgtgggcggtgggagtagtcttctgagacgggagtatttagaagctcttgcattgactgaaagtttcattcgatttccatgattcaagattagctgtacgattcaagaaatgcacttacaatgtcaccgtcgcatatcgatcctgattcgcaaaaggcattcggctttaataggagttcaagaggaacaaccggtgaagactcagacctttttccacgcgcgacccgacttacttgaccaaggttttacattgctgcgggtgattcgctgtagaaacgtacttttatgtcgaccaaaaggctgcgaacgcttttgccttgtgaggcgatctgggcaggtgcctccagtgtatacatgtgaccacagttgctcagatagttgttccgatgtggagacaactggacgttcttgtcacggaagaacgcagacaatcgatttttcgaaagcttcacacccacgggggcactttccgccgtttttcgttccagttgtctgtttttgaatctgctttgctcgattggaggcctctcgaccaactcgtaggtttttgcaggcgggatcgcgcttttgaacgacggttcgcggctttgctgggaatcgagatcgtcatcttgttgttttttccgtagtgtgttacctgctcgttctgcgtcctttctgccacaagtgcgtgtctcaggtcggtcgcgattggatccgacaaatctgccgggttctccgaccgtgtgcattttcaggtaggggaagttactcacactttcagccacgttcagcacgagctgaaactgttctggatagagagcaacgatgccgagacgctctccaacattcgagcgactccggacgagtgcaaacaggaaaagcaggtgaaacggagcggcagcgacttcaggagacaactggaatggatcccactgaaacaagcatttgtgagtgcgaaaaaacgcagagaaaacacaggcttcgacgggtttccggttcatcaacggagaagtaggaaatacagataggctgcgtagattaaagttcggttaccatctgttttcgttaatatatcccgctaatttaataaaacatcactatgttgttcattgtaagagcgcaacttccttgccagttagattgacgcactctatacagacacagaaaccactccgaatacgcgagtccgccgcgcggcgaagctcggagtgaccgaaatgggtttctcagcatttcccgaaatgcgatgtgaaacacttgcggcgttcttcgctcccgaaaacaactaccagatcgggagttgttgcgcgccttgagtgccggttcgcaacctgtttttcttcaaacacacgtttccgaggaggcgcgtgtgccgctttccacatttgtgtagaaaccgcaaatgatgaaccgtaagttattgacttcttgcggcacattgctcatttacgcagccctgctcgcatttcagacgagcgaaaaaggtttggcccggcaatttgggaaggcgaaagagttaaatgtactttagggattccccagaaaggctcacagaggcctgcttgcttgctgacgtccgctgcttgtgtgactcggcacaggatctttgtcactcaacgtacacaaccaaggtcctgcaggcgttgacggactttttacggctacgcggagattcttcgaagagaaaactcgtgaaatcgaacatcaagcgagaggcaaagctccagccgtccctgcctagtcgcttccttgggtgaaccgccgagtcgataaccagacacactgcgagttgggagaaatatccgtatctgtctcgaaaagtggttttgcacaacacttctctgtcgcagtgagtaccgtttctcgtcgagttccaagacttcttgccactgcagttgcgtgagtgttttacctaacctggacggacgctactgaatgccgaatataaaaaaactccagatccgtaaagttcgtctccaattcagaggccttcaagcgtcgcacacctgcgttgcgactctctctataggagccgtaactgtgaaagctggataaaaacgaaactggcgatggacaaacagagctcaccggtagctttagcgatgcttttatccaagaagaggaagtattcgcagacattttgcgacacagaagtaggaacaagggacagggaaccgttctaagatacgaaagaaaaagaaaacgatgttacgaaacagttgactatcttcatctgttaatgacctatgctgagtgtttctctcgtgcttgactggagtaatcttgcaagcggcttctgattcggtggaatcgggtagtgctctttcatttccagaatttccattcaccacgttgtatcgattgtttgtgaaaggacgcaaaactcgagagctaccagtacatctgcccacatatctctttagaacaagggaatttatagatttctcgggtcttcgataccatgtcatcttcagactgctttcagagctgcgatacttgctgtaggcccacgcctttcgcgtagcttgtaaagaaaacagcataaacgtgtaggtaaggccatatcacacacctttgaatctgcactgtttgccagctctgccgcagttcctgcagcttcctgaaagtgcaaaaccctttgaaaaaatacacctttacagcaagtgagtcttcgcaaggtcctgttcgcgcattccatcattctttcgcgcgatgaagacgctgaaaggtaatttctttagagacgacgacgccgtggttgatcgtgctctcacattctagaaagacgatactgagagtttctttttgcgagcagctgtcccagggggcaggctcttgacatgaattaggcatgaagaagaccacggcgaaaacaggtttacacaaatgagagtgtaccgcacggactggtaccacccagacaagcttcttgcagagccgaccaaaaacaagatggcaactaaaaagtggaaacgtcggctggaggtggcaaagcagtggccattcaggattcgtcttcagtcgaggaaaccggagaaaacggattttcttggatcaccacggacgttaacaagcggtgagacgtgctgcgagattctttgcttgccattccttctatgacaagaatgctgctcatgaaaccttttaattcttggcagtgaaaaacatccacctttggaaaaaacggattccgtcacgcgagcacataagcacatttatgcaaaaaaacgaatctcggtttcgcggctatacatacgccttgggccaaactatttgaagacctttcaagatgtagttcttgctagtctctgaattctagagggcgaatttcaagaggaaacggcaattccttctttcctcgatccctctttgtcgcggtgcgctcagtctcta

SEQ ID NO: 2216 - DNA, 4721 bp, Toxoplasma gondii
  source 1..4721: mol_type = genomic DNA
gcaactcaccagcggatttggttgtggtcgaacgtcaggccctggacacggggagtctgtcgagcgaagtgtctgtacagcttgcgctgctgaagcggcaggcctcggacggggcgcgaagtgccgcccgcagcgccagagccggttttggaggcgcgaccggcctggggcgagcggcgtggggctttggggcttctgcgacgggccttgcgcgcgccggcagttccccgtttcggggacgaggcgccggtggggagctgcgggtcttggggcaagccttgggaagacggcgagagtgcggcaggttcttggacgcgcgcgaaggcaggaggaaaggacgaggccgagttgtacgagttgtcggcagagaccgggaacgagaagggcgcggggaagcgctgttgagactggaccggggtgcatgcagtgtagggcgcggggcctgagaacgacggagcgaaggcatagccatagttcacgtttggccctgggtaaggcgttgcggactcgtagtatacggtccccgacatcgagggtcggggatgtgcaactcggccacacgaggcgtcggacggggctccggactcgggcggcagcgggtgcaggaaatttctgtccgtttcttgtctgggcactgcggggtcctggacaccctcaggcgagcggtagtcgtcgaggcagcggcccggttgttcgctttcagagtagcgagacacgaagggccggtcggcggctccgatcttgccgcggccctcgccgattgccggtgcgccctggctgggccatgcaggttgcccgcaagaataccctggttcgtaagtccagggaaacgcttcgcctggagaagcgtcctcaggcctgggtccgtggctgtggagaaaggcgtccttgccagctgcgaaggcgtgcatgcagcggtcccgggacttgggctgctggctcaccaccagcacggcgccaccctgaggctgttctcccggatagctggcgatgctatccaccgagactgggtgagacggatggccgtggcgaggctggctcggagaaaagcgggtgttcgggggcgaaccggcggggccagcagaaagaaccgccggtgcgggcggtgtgcagacagcgaacatcgatccagaggcggtgggtgtgcattgggtaggcgcgacagaggaaggcgagagtctcgagaggttcgcttcgatcgccatgggcgcggcgcctcgttggtgaggcggcgaagacacatgaatgctttgcatggtggcgagtttgagggacgagacgcgtgggcgcagcggagaactcgagagaagcgtatgggatgcagcgaggcgtagcgtcttcacagcagacacacgcctactgctcaaagtgtggcaagacagacaaactgcggacagaggcgaggcctcgagtcggcgggcaaatttctccacaaattctactttcggacgccactcatccttaggtgtacgccgaggtctcttgctgcgagtcttctttggacaaagcagcggtattttaggcgccaggcactgcgccgagattcatatggagtggtcaacaagctttttttgcggcagacaagttcacgtcgggaaccgaggcctcgctgtttcaagaccgctctcgaggtgaagcggggcgtataggcgcgaaacaactgcagatggcaagagaactggagacgaaagtcagacactggaacaacggagcaaaatgtgtatgtccgtggacaaccaggtgcacacgcagcaggcgaggaccggtcaacagcgccgaagatgggaagagagcgacagactttcctgactttagctcacttccctatttaggagtccacagagccgctggaaagcacccgcttcgtcgaagggttcggcaaacggacgtgagaagcgcatggttggctggagcctcaagggcctgccggggattctcctctgtgcctgaacacgcgagcgaggaaggtgacctgggtaagagaggtatcgggcagctgggcgcggcgagaccagtgactgtgcgaggtgagaaaagacacaaaagtgaaacgaaaaaagacaacggccgcaggggtttgcaggggtttcgcttcccgtcctaagacactgtccggaggaaagaacggccgcctcgcgggtcagcgatgtgtcggtcgttgcaggacacaggacctcgacctaagactgttgctccagaaccgagcagtgcagatccgaaaggttctgtttttcgggtttgctgctcgggtcagagcacggtcgtttgaacctgtgtgacggttcagctccaaggaagctgtgtgaagcagaggaaatttttgcggcatggggacaaatgcagtccaggtcaaccgatctgaggtgttgggcgacacccggcctcggtcggcgcgcgccgaaaagccaggcgaatcctcggaagacgcagggcgaacggttggatgtgcccgcagaaaaagtcgaagcgcgaaagacagaagcacgagacgcatttcaaaggaagaaaaacggcctcgaggaggccgcgcgtcacgcgttggctgccactcctgcggcagggcagtggctcttaccttggcttgttgcgcagcgtccaccgtgaggggcggagcgccagtcaggcagaagctcagacgaagacagttgccgcgccgtcctggacccccttcgcggcggaacaaagtccggagtgaagaaaaaggtcgcctggaaacaattgcagtgcgtactctacaaaaagatgttttgactggccaagctccgtcaaccaagatccgaagttccgttcggctgtctcgatggaaagcggcgcatggtgttgtagcctctccgtccgctcgacggaggcacgtccccctggccactacggcagccgaacgtgtttaccacgccaacgtattttaagcacacttctgcctttgacttcagacacaacttcagcggcaacttatggcgtggagaaccagcctctctcgtcactccacccagaagtccgtgtaagacacgacgcgaattgcacgtgctcgcacctcctctcgatcagctcgcacagctgcttgggagactgcggacagagctgaagtgacccaccagactttgtacggaacagactaatgcattttgtgtccggacatacagaagccacgcagggcccctttacagccattcgaaaggcaaaagaggactcgacacgggttgtacgcagaccccagcaggtcaaaatacctgcccatgagatcccgttgtgtctgaggaagtagggggccatcgagcgaaggcatgtttcttgtctagcgatacaaaaaggttgagctcttcaaatggcgttatccgctgctaagtggaactgggatgaagcgtggctttgtttttcgtgatggtaagaaggtgtatcccgtacttcaggaaattgtcctcgctttccaggctaacgtatgttgaggagcagtatcgttccagtagagtcacagaacgtagaacggtaaactcgtcatggttccgaaacacacatcaaactcttttttagttccagttgataggctggtcgagacgccctctggatctgcttaccactcgttgtgtcatcacctacgtctttttagccgattggcgaatccaagaatctcttcgagcgtgagagactccgtgcgtgtgtgatgaaggaagcagtgtcacttgagacgtgcagatgatgtttccgtcggtaagaatgtgcagttggtgtccgttgctggtacgcattcgagccctgtgtagtcgcaatggactaccttgcaccgttcgtggcaaattcctgcctgtttgtggtggcctcggcaactgtgtctcgcggggttggtgacccagcattgccaaatgaacaaggatgctgcgtatgtgttcagttgagtctgcttcagtgaaagcggctctgcattctatctacgttgaaggaaacgaggagcatttacgtccaggagcgctgtgacagacagtctgtgtgggggagctacccgctcactttcgcagcgacgctcgtggcataacacgagccaccaaactagacacaaatcggcttggcttgatgtcttggcaaccatcctacggcaccccgatgcaagaggcagtgaccctccggtcgcggccggaagtaagagctctgcgagtctgacaagaacagtgaacataacggcaggcgtggggaagccctcgcagttgttgccccacccgttctggaaacaccggacttgtggcctccatggcaagtgtctccttcttagcacatttgttacagctgaactacgtggtagagcgcagatgagtttcgcatacgggcatcaagtggacaaggaacgcggatcgaatgatagtgtatcccgcggccgtctattctaggctttcggaaacaaggttattgtctgagacaatggcatgatccacggcagtacttggggtaattttgaaacacttcggagaagctgttggtatttccaaacttgaaaaaacggcagaacggacaggatttccgcgttcagatagcccccgctgtgaggggcaccggaaagaacagcaggccttttttcgacagccccacagtgttttgtcggctgtaatgcacacctagcttcagtgcgaaaacgaaaaaaaatccttgactgctagcacacgacaaagctggaggtgtcgcagcttcgtgagcaaacactaaacagcacttccgcgttgcatttctcggcctca

SEQ ID NO: 2217 - DNA, 3099 bp, Toxoplasma gondii
  source 1..3099: mol_type = genomic DNA
aaagttacgagtcgtttgcttcacttcccgtttctctgttcactgctgtaactgccatggtcaggccgatgcagagaatgtcctcatgcatcgagacaattcttccccttgttgtgttacggacactcgagcgtcgcgctttctagccgtcgacacagacatagaaactggcaacaatgaacagagtttcagccttgttcaaacagaacattactttccagtcacggtggagagagaacgctttgggcccctgcgcaccggctgtgcgtcctagatgaagtgcccccgacgcgcgtgcgtcagtctctgcactgcagctgagacaagcgaccgtggaaaaaaggagctagagatcaaccttgtagaaacgtgagctccagtttacgagaaacaaacaaccgtgttcttcgaggttgctgtatatcgccacctatcaagacagctaaagtgctagttgcagtgtcctgcgacatcatggttattcctcttcggtcaccaagcatcgtggacatcatcgaaggagtcgagatatcaccagcgcgcagccgccacataattttatctccaatagggaacacgtcgcaccgtgggatgctgggatagactcttgggacatcataccactgacgcaactacttgtccggcgcaagattgtgaattggaggacggagtctcccctttgaagccagagttgtgattcccgcaacggaactgcgcatgcaactccgagagaagcgactcagatcaatgctcctcagaaacgaggggaacgcagacagaaaatccctgtgcgtcagtgtgctgcagcgtggtcgacttgtggtagtttacaacctgtttacggtttaagataagagtctacgcgcctgataatgtttgactgtgtcagtggagcagatcccttgtgcacatctcggcttctcgattgctttgcaactttttgtgaacacaggtctgctacggtattttttgctatggtgaatacacggaagagacagcatcacacgcgcgagcaaacccggttgttgattccaagggtactgagtccatcgtgtgcatctgtgtccaaggacagatgggtagtcatatggatatggacttcgaactgcttaacgagataaacgcctgcgagcgactgaacgtcttcgatgttgacacatgattctacatcatgatgaacaggcgctttcgaccagtcaacctggagcattgtgacacctttccacagtcttgtcaagttccgcttatctatttatattacttcggagtagtagctttctgtcgctgaaaatattgtcccactgcacaacgacaataacattcgtagtctctccaaatgtcttgccatctttgtacatcaccgcaatccattttcatttctgcccgttgccgtgcacatagtctcctagcgaaagaggtacaccgattttgttaactattcaaggcttgttctctgctagtaaactctcctgtgtgggccatgcgtatccacttgttcaaacttcaaaagtgcacattcgtaaaaacgccgtgagattttttcgcggtcctgcaggcagccacgatgcaagcatttccacatggccacgagaactgtggcggtgtctaaatcggtcttccctcggggtatgtgaacgggtgaaacatgttgctttctacttccagtggcgctaggtctgcgttcaaggagatccctttaaatacgctgggatagatcacattttcttgcatgcttgtgtattcgcggctagttgcctgtctaatccacgcttttaggttaccctgggaaccccttatgagcaaagcctcgatagtactactgcaagcacaggtgcccgtgttcacgacaggtgaacctccagtagatcacttgtttggaaagcgttggcgggggaaagttcagctgtaagtgaattttctttaccccaccaaaagtaactcgacaggcttggacctcctgagagaggtcccagaagaactccgtctgtacctccctgtttccgtagcggccgatgaagactccaaacataattgtccaaactggcactgtagcctcgcctgaatttactcgaaactgctgggggtaaacgcctgctccgttgccatcacgcagaaaatcttgggatcaccgaacaacaagcctgtggacagccggtcgtcccctcttttccgtcgaaatgaaatcaccacggccctaccctcgcctcaggcccacttccccttatcaaatatcgccagatccacgtggtctgtgcaagaagagtttaattcaaaggaatgatcatggcagtgaaaaaccttgtcttcgccacaagacgtaccggtggcttgttccgtagcccacctacgctagaagaagattttcgccacggcgttcccctgcatgcctttcgagtctagaagttgcactcgcgcattttctgcgtgttcgacagcgaaggataaaaaaacgactctagtcgtttgggtggagaagcatctcgtttaatgccttctccctttttttcgtgaaggttcacctgagggcatctctctgtcacgcagcaagacgcgagcaacacaattcgatccgtgtgtcgtgtctccgtctcgtacacggtctcgatgcttcattcgttgcctctgaaaagtatcactccctttcgtctcccggcaaagcttgtcttgctaagcaacctgtttgcttcttcactgcttccaaagcatccgtcttcgatgtttttccattccgacactgtactcgtggtatccttcacgcgtccgcattttcgacccggtttccccctcgtcttactctttgctgaaggcagcttgtctttgctttcctcgctctttccccatcagggaatgccaaagtcatgctcgaatttcgggcagcggcaaatactcatcgcggcagaaagcgaacctcgtcgcgcaggggtcctgcttctagattctcgccagcagactgcacgtttgctcttctgccatcgccggaagaaccaagaaaaacatccacggacgctgagagaacgagacgatggagagaaaatcgatacccctgagggctcgtcaacttcctcttttggatttgaaggcgcgacggacacgagaaga

SEQ ID NO: 2218 - DNA, 4727 bp, Toxoplasma gondii
  source 1..4727: mol_type = genomic DNA
tcgatgagaaacaagtccctctaacgagcacctggaaagatgctttctcttgacgaagacgccaccaggacagaccagtgagaaggaagaacatgttctgtcaacttacgcccgagagatttctttgaatttctcagggtcgccgcccttgtcggggtggtgcttgatggccagctttctgtaactcttcttgatatctgaagacagccgagacaccacacacaggcacaaggtgagttcccccggcctcggccccgctgtaaggtaaccaccggcaagttcgtcgattcgtcctagaaaggtcatcttcggtgtccggtgtacggacagttcggaggggtggacagagtctcgcgtccccccgaacacgattcgatcttgcgcaccagccgacagagaaaccacactgcacagttccgaacccacggtcgcgggaagcaccattctgccttccccaagcccgccagaccgagatggtctgagatcaggagaacgtacggttacccacggacaagacgcttctttcgactgctcatgtcacaaaggagaaagggcagatgctccgcggcaagagcactcgaacctctgcaactgcagactgagagaaaggacgccccacgggaagcaagaagcttttgatttcgggtgcgtgcagccaaattactgagagactcgcccgaaacacatttcaccggtttgttgcattcgttctggacggctcgggggtgaggggggacgtggttcgggccagaagcatgccaagcagaaaaatctgtgacccgcgacgcccggaagaagcgaagcaggcacagtctgcctttccgctggcccgagccagccattctggattacataaaccgcacacggtgccgagactcacgttacaaacagtgcgatcacaacggcggtggccctaccgaaggttttttgcggagttttctgcgcgtcttttgagtgctggccattatcaagtggtccaactcagcgacacaacacgcgcagacggaacgaaacacccaaaagatggcagattcggctcgcgacgtaccggcaaccgacgcagtgcggtcaacttccaggatctcgtaaaatttcgtgttgtttttctctttgctgccgccccgtcgcggaccaggtccacgcatgtcgtccccgaaggggaagctgccaaaatacattttgcaggaaaggtgtgggggaaggagagcttgcacggccaaagagttcgacgatgggaacggaagaggcaccagcaactttctcgagtgtctctcaaacgaaaagcttggaaccgcagttgcgagtcacgcggaggcagaaccggcgggaggaaagagcaggacgacgagaagcgaggtggcgcagcacgccgcccggattgggttgcggacccgtgagcacagtgcagaggaagcggccaagaaaaattcaacagaaaaagacgtgttctgcgggtggaaacgaaaggaccgcgagacgaagggtggggcgcactgcggtgctttttcccggccggacgagggggtgggacgccgaaacgactgtagcggaactagatcaacgcaggacgcacgaaagacgcgttcgcgagtcgcagacaaacagaagcaaaacaatccccgaaaaaggagaataaacgggcgaaatcgctgagcgcctgttgatagccgtgctcaaggaaagaatccgcggacgggggcaatctggcagagcttatatggaagcgggcgggggatgcgggatcagaggcaaacacaactagtagtgcacttgcgccatgcatacacacgatcatagactgcggaaagcggaggcgaccgtcgcggcgccgagcgcgagaaaccgctaaaagagtatttataaaggaagaagaaatccctgctctcacgcctctgcacactctggagaagcaccgagttcccgaaccacgcagcgggctcacctggcccccccttcccccctgggtgtgcctactgcagccagggcaccctaaactctacgcggaaaacggagcaaaggtacccccagcggatcttgcgccctcagctggcctttctctgggccaccgcagtttctccgttacaattaagcgtataagggaaacagcgttcccttgaaactcgagcgagcctttcagaatcttgcaaaaacgcactgtggccgccgcctgaaaacaaggatcgcgacgaaaggtctcgcagacacgcgttctcgctatgcactccgtcttctggtctttccaggaagaaactacagtcgaattgttataatggcctttccgttaaaaagttccttccaataggagagttcctggtcattctgatgtgcacttagaggcgacccaggggaagcgttcggcagctgcgtcggggaaagtaacggtggactgagatggcgtgtctcgaggctttagaactgagacaccgaattcttaaacagattttgtcttgataagaaaacctggctgcttagtgactggcactacgcttctcatctgtggtcgcttccgatggaatgggcactgaacgcacgctcgggtgctgcgcctatctacaacgcacgaaacctcgtcacaaagactagtcggagtcgatactgtggagatttagtctcgagtgaactgccggaggcgggctgcgaagctcactttcgcgaactcctctgtccaaaggcagctagggggtataaacaggtctgtctcagagatcataattcctagggcgatggtactggccgtactcgcgtaggaccagtaatcttttgcgctgtgaatgtgaatgacaagggtatcccaaatattgcacctcgaacgcaaaccgttttccgcgctattttcatggcggttctcggtgcactctgggtatggacgacttgggcgcttcgtatgtcgatggcagtctatcagcggggacacggaaagagacaaactgtctcaagaagaactggactgctgtgttgttgagaaaactaaagtgcatcggtccgatcagaagcatggtacttgctgacacgcaaacgaatggccagaaaagagaaatctggaactgtcaaccgaataaccgttcactgctgctgcatggagggagagggcacgcggaaatactcggggagacggcgacaactttttgctttcggaggcactagtaggacggtattacaacgagtcggggtaagggctgtacgtggcgtgtggagcacctcctggaaggaactgcattcccgctgccgttctccacggtttatagcaggtggagacgtgactctttgggagctccagcacgtcctctcgcagaaaatatgttgaattaagaagactcagtggcaagaatcatatgcgacttcccagaggcgcctgaatcgcagccaacacttgacgccaacttcacgcgcaacagtcaggtgtacatacaccccagccatatgccccgcacgacccctcgtgagcgtttttctcctttcttttattgattagaggctctaatacgtctgtccactctttttcaggtgttttaccaatgcacgtttgtcttgtcttttatctttcctctcatttgcgccttgctgtcccccaacaacctgtcacctccctggtctgctcccagacggtcttcccttcacttccccttgcttctgcaaagttttcactttttatctctgcagcagttcttgtcttgtctctgacgtctcccacgattcatcagctctcaaacgcctgatcgactccgacaagcggtatttgtccaccgcagatgaatgtgaaatcgcagagatgtgtacgtttgagcgctcgtcttggcaggcgaagaatgtgcttgcatcagtttagacaatgacaaacgcaagaacagctcaaacgaacctcacaatgagaaaagacctttccttcctcgcccccctccagctggctcggcgtctgcgagctgtgcatgcgttttcttggcgatgtgtgttactcggggttctgcgtgtaaatcgacacccggcggcgcctttgtcctcaagaacagtaccgccgatgtcttttcttcgcagttctcctggtgaggagtatttgttttcgtttctgcttttccctcgatcgccactgcacgcgggtacaccgcacgcttggcagactgcgcccttcttctcgccgcgttgccctgtcggttacttgtctcgacgcgctttcccttcgctgaccccatttcttcgccttcgcctcaactgtctcttcgaggcagagtgatggagcccagcagagatattgttctttcgtacgcggggagaaacacgcttctctcttcgcattcgtagactgcagcgcggcagtgcaggtcgcgaagccagccgcgacaacactcgagcacgcaacccagcctttttcgagtgcttttttccgacaggttttctctaacatttccctggactgtttcgcagcaatgtaaggcgcagataggcgccttccgggcgaagaccctcgcctgctgtggcctccggctcgcgcccgatctcgttatcttgtgactctctctcctcctctgcccccttcgcctcttcctctgctcttctctttccggcattcagctgtgtcatcgcagttcctctctccctttctctatttcaagggaggtttcgtctctttgtctcacctcgcctttccctgcgtacttgtcctcggtctccctttcttctcgcggggaaaggagcagagtcatttctggacgttccaagaacctggcagacca

SEQ ID NO: 2219 - DNA, 1847 bp, Toxoplasma gondii
  source 1..1847: mol_type = genomic DNA
tgtctaaaaacgacctggaagtgtgtctacctacctaagtgtcttcgcgacacaaacggatgctcgtaaagaacatgagccgtttccttcaggctgccgagcagccaccagcctctgccctttagtggaatcaggtcgacgatgacgccttcccgaatgacttcgagcaccaagtcgggaaacgcgggatgaccgcatgcctgttggatggcttcctccgtcgctgtatggacaccgccgagtccccagggtggaggctcgtagacgtagcctgctttcttgtcgacagtgccgggcggaagcagactcgcgttcccttgcggctggggagagccctgaagctccgctgaacttcccttggctttcgcggcgccagtctcggctgaatgttggccgaaggcgttcttgcggatgtgttccagagcctccggcactgcaaacgtaccggaggtcgcttctttctcgctttcagcaaggcatccagaatgctgttgcgtcgaagcaccacccggggaggcgttggcactggacgcctccatcgtctgtttagatcgcctcagaattgtaagtgcgtcagcagttcctcaggtagacacactgcctttaaaaacgtggaggtaaacgggtgagcacagcctcaaagactgagagtttcgtgtggctgcttcgccggggcatcaccgcagaaaggagctgtattcgcaaccgcaggcggtaagacgcaagtgagtcttcgcactcgacggaatgatggactaaaaacgtctcgtttttgtgccacctttacttcaaaaaagcagctacagaccatgaaacataaaaagcatggagttacgcccgaaacagacctgtgcgtggcacatcaaggacggtgatgaggaagcgaaggccctctggattcggtccagcgcctgcagcgggcaacccgtagagaaagctcgcaagaaaagggcagtgcacgagcgttgttcatgaggacgaagaggaaagacacaactaaaaaaagctgagtcggcattagttcctgtctgcaaaagaaacaacaaagagggaagaacttggaatgcctcgaaacccttcgactggttctttgaaccgtgcatgcggtcgggtggccttcacacgcatgcgcggtgaagatcgagtatgtcggatcaactacgcacttcatttctaggcattaccattttctggcagccagaggatgacgaagaaaaaggtgtgtttcggcttgtctattttctcgctacttccgtcatccgcaaattgccgacgacgcggaagcgcacgcagaactcggcataagcgtcctctgtgagcttcatccatagccggtagccagcatgggaagcttggggcttgccgcttaagcttgaacgctttagtactaccaacgccggtatgacttccgaagtttggtgtggacagcgaatcacttaaatatcactgctctatggctggtagggtctgcacagcggctgtagggcgctgtccgagtcattccgcacgctgcagcgagacaaattgtttctgcattgtggttgcctggtgtgtacgcgtgctctgtgcgtctcagtgcctcacgaatctggaagtgtcaagtcagtcaaagagtgttgtggttgaagctatcctcccagtgttgccccggaatgcgcgtgtgaaggtgtcttgctgtgctgttgctcatcaatctgcacactccaacgtggctcaatgctagtgcgtgcttgtgtgtggtaacctcgtctctatatatatcttggcgtctctcacggcatgaattttgattctgtctctattagctgcggtcatttccgaggcagagcagaggcggttcttgacca

SEQ ID NO: 2220 - DNA, 3118 bp, Toxoplasma gondii
  source 1..3118: mol_type = genomic DNA
ctcagatcaatcgtcttatgttctcttcttcctgagagcaatcgctgagtctgttctgcagtttccgttgtcctggtttgtctctttcggattcctccactcgctgaaactggcctcaagttcgccatgttttaggactcaagttaaacgttcgacggtgcggttcctccgtccacatgaactattttctctgaagggtgtcgactcttcgactgggactacatgttgacacaaagaaaagggtctttgtttccagatccgagatccactttgcgtttcatggccttggtgtgaagttcactgagcattgcggtgtccagcgtctgtgtgaaaaccaaggtgtgaggtgagtgagacggtggcaacgttcgcactggatgtcgggaccctaagcgagcgcctacgctcaaggagactgagacactccccctgtttcactcggtctggtgccagagaactcgccaggtttcgctggaatcaacgtcttggttcagggtacaccgaccatcaccgactttcgaaagaattgctttcagcactgcatcgggtgcacagcatgcagaaaaactaccatcgggtgcggtgtgaagtcgcgttgagaactcgttttcttgtgaaaggtggaattgtctgccggaggtatgttcggagacactctaaacctgtttcatgtaacgccaggctctccactgcacaggactacttcgtttgttgacttctggcccttgcatacacccagagaagccagctgagtgtgagaggccaaccgaggagccgctttttttcgtgagaaatcgaattcaattggatggtctttctgccgccgctcctgccctcgacaccgaaaaccctgagggggcacccctctgtcagcaatttctctgcctgttcaaacgtaggattcaaggcatcgtcgtttcctttttctttgtagacctctgagtgtttgtggaggcaactgtgtgtggatcctcactgcctgccactctcgggaagttcgaactgcccagctttcgctttctctgctgtctgcatcatttttatcgaaacctgttccacgttttttgagaaattcactcttcgcgccggactgaggcaagtaaacgagtcccgatcccgtggtgcagtcagtgacaagaaagctcttttatggtatcgtccggcgaccttaacgttcctccacgtcggtcctgttctacgcgcaaggtgtcgactactacgcaactcaccttgcagcgcccctttcactacttcagtgacttcctgtgttgcagaacatgcgagccgttcggacgaatccaccaagcgttcatcgagaaacagggcgcagggtgaaaacgaggcatctgcctcgcctccggataaacgaaatccccagcttcttcagcacaacttcctcgagtgtcctttcctttctcagtacactcaaacagattcggttggttcttttgtgggtttgtttttgacagagatgtccaggaagtcgccagatctatcttttcgcgtcaacacccgttctcactcgatttgaggatcttcttgcgtgtagccctatctcgtagtcaggcccccttcccgactagacaagttccaggatctaacttttttctggatctaactttttcctgtatttaactttatctagcatttaacgttttggtaagaaacccagaccactgccatgagtctctctgtcggagtccgcgttctcgtttgatgtagtctctgggcgtctgtaatgcctccaagttacttcggtacttccatagaagttaattttaaacgattcaggtgggagccggacagttcaccgtcagaggcaagaagtggtagattaaagagtccgatactgccccataacttgtgtgtgaacagctgaagaaagccactgggttctcggtaaacgctcggcggaactttctaagaaccccagaagacagtttcctccctctggagtgctctgcgtgcttgtaaccttgggggtccgtgcctgtgagagtgaaggtgcagattcacggcgagtaagcgacgagaaatgaccgaaaatgcacgaacaacacggtggagactccctgaagaactgcggaaagaaaaagagaagaaaggaacttgcaagcgtgagacactcccgaggggacgtcgaggcgacgccccagagcgagtgtgcggcagagacggttgggagtttgcggagaaactcgcctgccttgaacgtttcctccctccttttcacacgcaaggcaagaaaggaaagagaaatacaagacagatacaaatcttcgacaacgaagatgtcaggaagggaaagaagctcggcgagagtttcttcagcgcgccgaggctttgagtggaaaaccgcgcggctggttgaacgccgcaaagcgccacgaaaagtcggaagtcagcgtgtttagtcaaaatcggggacggctttctctgcattttttctctgagtctttctgaagatttctccactcttactccgcatgtccactgttttctgcgggcgtacaaccgaggaagaaccgcgactggcatgtcctgcggcctctgagcgcctttcccgctgcgtcgagtgtatgtacacctgacctcccgggatacggaaaaaagaagaagaggagctgttcatttttcatttgtagtcggtccagttcaccggggaggcttcgttctttctggaagaggagtcgagtttttgcgaggacacaaggggagagggggattctcaaaagtcgacttccacttctgcaaaggctctgcaagcggcgtcgagttttctcgagtgctgaacatcagaaggaaccctctgtgtgttctctgactcctttatccttcttctctctctccttcttctcttcgtcgcttccacgcttgttcgacttccctttctccccctcttccccctctcttctccctcttcttcccttcctctccctttccttcctttatacgctttcgttccttttccccttctgtctctgtctttcggtctgaagcttgctttgcgagaggagacagaggagatcggcagcgacgctcgactcgcgtaagaggggagataagcgagaagacttggcgactgagagagaagccgctcgaggagaagggcagggga

SEQ ID NO: 2221 - DNA, 2445 bp, Toxoplasma gondii
  source 1..2445: mol_type = genomic DNA
cgaaactgtgtacacgtttggccctttacgtttgctgcctgggtttcccggtggggtgcgatttgctgccgcggacgtgggggtagtcggatactttgagttttttttcgacctgcggattctgtaaaagcaatgctctagagaagagggaaggcgacatcgccgtcgtgtatagggcgtttcgttcttttctcgcgtctgtctcgggtccgtcatttgtatcggcgctgcgtgcaaagagtgtgttttggtccactcaccaacacaacaggtctctcttgattagtactggtttccctgcgaaatgccgaaaccaaaactgcttctctgcaggcgtgagccacgcgaacaaattcaaagagcagcggtcacagagtttcggtgttctgcgtcggcttcggcgccaaagtccggccgtagggtgtaaaggcgcggtgcaagggggcctcggtgcgagtggcgcagccttccaactttttgcagaactcaattcatgacaaaactcacatcaacctacactgcaggctagtgccacgatcacgaccagcctgatttgccccagacattcctttgtgtcggctgttctaccatagcagatactgaacccacggtagccatttggcgtctgtcctcagcacatgagtataaagcaacttaaagcgcgatatctatactggctgtggtctcctggttgacgtcaaccactcgagcgagttccagaaggaacattttatttgcatgagacggcgatgatgcctgttggaaacttgcctctgttcagttgcgtgtgcgagcgtccactgcttcccgattttatcacgggtacggagaagcaattacaccgctcacgaaagtgggagggaatacgccgttgtgactctatgagatcagtgctcggagaaaaaggaactcatacttcgatcacgacggtgcgagaagcgacgtgagctcgagcagcctcttgaaactagccgtcgacacggggctgtttcgagaatccagttttgtacagggtcaagatttctgcaactttccatgcagagaaacgcaccggaatgttcaagaatactccccccagcacggatcaagaaattgacagacaccgtacgaatatcgagttcgaccttaccagtagtaaccccttttctatcctatactttgtcaccccggcttgaagccgttcacgttcaggagggcaaggcaacaaggtggccgatttgtgtacactttgagcgcctgaggactcgcaagcggctgagtgcccgtatataagccggcgcacaaaaaggcggcttcaactttcgtggttctttgcggtagaagcagcaactgcgaaacacggttgtttctcgggactggtaaacgtgtaatgattgcgttctcagcctattttcactgttgagtttaccagttccttgcagtttcaccctcccgcccttccacccgcacttagggcgcaagctcttgttcggttcgacttaacctagcaagtttcagccaaggaacagcttgagcactccctaagacaaatagccaatcgccactgccacgccacactctcgaaaactggaaaccccgtgagacctctccgctgttctgactgtcaccccaccatccggacgcaagtcatagtttgcagcgtccgcacacaagggtggaaacgggaaatgctgcagccctggatctgtagctctgcttttctacgtggagactgcaggaaatctcaatacctgacacagagcccctcaacccgttttggaccctccgcaacagaggactcggaacatttaccaatgttctgcgagaggtggccgccgtgggcaaacaattcgctgggatcacgcggaagagaaagaaactttgcgacaggagccgcgcttctccgcaaagacgaacggccggcttctgccagtcgaacggctgggaaccggaaaaccctgcaggtccggcggcggccggtcgttgacttttgtttttcggccaaaaagacacttttatgcgctctctttccggactttgaaaatctggtgccttttcacggaccaggttgcggattttttcgtcgaaaagacgcgttctcaagccctttgaaattattatttcgcgtgaactgcggcgccgaccgagctgcgcgccgtttttgcgtctctttgtattgtttgtgtgtttctccgtgtgttgtccgtggttcgcttctttcgtgagtctcgtgtgtgtgtcccgttgtcttcctgacaccgtgcgtgcgtttttgtcccccaaaattcagctccgtgcgccctgcccctcgcgttttctgtgccccgtgcgttccgttcagtgtacatgctctgcgtgtttcaaccaaccgtcctctgccaagagcctagccttttctcccgcttcttctgcgtgccgtttggccccgttgtcttcagcccgcctgcacctcgtctcacctcgcga

SEQ ID NO: 2222 - DNA, 4138 bp, Toxoplasma gondii
  source 1..4138: mol_type = genomic DNA
gaagaaggtcgctccaggacagaggaagaggccggcgttttccaatgcatcacgctgcggcttcctccacccacttctgatgactcctccgcggcttctctgctcttctgacgggtgtctccctcctctgcggagtctgaactgccgccaggagaaggcctgacagagaacgagagatccgtggtactttgtggctgtcttttgcgagcggcgattcgcccggaggagcgaagcagcgacataactctggtaagaacaccggagccgccaaagcggctgtcctgcccacgtcgagtaccacacagtgtaccgacacccgaagagaggcgcgacagtggccgggaggcggaaggcgactctggggcagaagacgaggacgtcgcggggaggtccgcgcctccgcctgcagaccggcttgacttgtggagggctctcacggagacaaagcgcccacaagcagggtgagaagcgacggagggagacaagccattcagagggtccgacagaggctcttccgcacctcccgcgtctccagagatcccgggacgctgctgactcctggcgagcttcatcgtggtgggcgacgaagagacggccggacgcgggagcgctggagacggcgagaacggagacgttgacggacggcttcagaagcaatgcggtagcaaactgtgttggcagcagcccggcgacactccgcctgttcaagcgaaagacatttttgacgcgtttgtggcgcgacggagagagagaggctttgacgcgacaccgatggcacgaaacaggtgacgaggaggtcgatgacaaagtgagtagccccaaagaggcaatccccagcacgaagggggcgagaagaggcttgtagaagcaaagacagacgtttctggaggcaaaatgcaatggaaaagccgagaaaggccacagtctccgggttggaaggagataaagggtcgagaacctcgtaaagcatgtacgcgttgcccgcaagcggagacgcagcgggggttgctcacagaggcgacaaacgtctggcgcgcgaattagccagaaatcgggaaagtgaaggaaggaaggcgtgaagcgcgacggagacacacgcgaggcgggcgggagacaacgcgggagattggccagagagactggcgaagaaaaaaggtttcagtagcgtggaatgcagagaagaagaatttcggcctctcgaaaaggcgccgaaagtcaagtgggagaagcgaagctctgtagagacaaaaaacgcgtgcggaaatacccgcaacgacgggaaaaaggagcgaggaagcgcgcgcggactcgagccgctgtggaacgcaacgcaccgggtgtctcggccgacaaaggcgaaagcgatagccttgacacggcctactcgaaaggacaacaagaatcaccggggaatccaccggaacgcagctttcctttcgatacccaaaaacgcgtttcctccatcgacctggacgcaatgcctgcgaagcgcacggcaaaccccgatgttcaacttctatggaaaacgcgtgtttacgttcacgggaatttctttcgtttcttctcacgcaatgaccgcacggaacgacactggacacgcaaacatcgtcgtgggaggagaaaatgcgaagggatagagagttgacacaagagtgtcccgccagttccgcgccggctgctgatgtggcgaatcgcggcttccggcttccctccagcgccttccgagcaagaaaaacccctcaccccgggaacaggacttttctaacgagagcttgcttgaagacacgacacaaaaacactgcgttcaacagaaaacgcagaaggggaaaaagcatcgtccagtctccgcgcgcagcagacttggactgggtgcgacaccagttgagtgggggcaaatgcgtcctgtcccttgtttctagctttacagggaagcagtacagagcgtgcgcccacaaactggaaagaaatccgtttgagagatgtgattctcatttatcaatttggtacggcgaagaatcaggcgtgtaaagcgaaaagagttgcaggcccgacgtacccacgaacaccgcggccgacaccttgcgcgctgcgggcacaccccgaaacccccctttttaggagcgacacgaaaatgccacaacagaccgcagttcgcggaatgttgaaactgaacgctagagctctctctgttgcagcaacgaagagaagaaatagcctcactacgagggtcggtaaaagcaaaagctgcagccacttccgcagcgccccgtaacaccgggatctcgactggtgagtcgcgctagttttacagagttccggagcgccccggatccaccgaataccagctaatgcagtgtatctgctaccaagacagattttagagcttgctgaagtggtgaggtgaacaaatgtagggaactgcctgtcttcaggtctcctctcgagctgcggaaaacgtggttttcctgaggtcgcgagactgcggcgccacaccgcggatgttgagatgagcgggcgcctccccacgggataactgctcacagaaagccagtgttttcggcgatcagaaaaaacgttagacagaaacgctggaaagtggtgcaacgcacacctaaccatggaaggcgccggatttccctgaatgtgtagaaaaccgagacgcgcctaacccgtctgaggcggctgcgatggcaggaatctcgtacgcactggcaagcctacgagtcgagacattctgaatatcctataaagtcacgaatttccaatagctatcacctctcttagactgctagttccctccgtgcttccgtgactacccgcacacggggattcaaaaccgccaagagttgaacctcgcggagcgatacggtttgaggggggtagcatctgtgagtcggtacttgctctagttgtttcgagttccttaaactacaggagcattctgtgtgctcgcctccgtgttataactgaagcattcggacctagtcatgtcgacgaacgtgagagggaatcattttcgaaaccagtaccgcaacaccgactgcggactgcgatgacaaaggctggcgggaaagtcctagctgagcagcagaccacaagggacagaggctttgcgcgcgctcgtgctctcttcgattttaagccgacaaaacccccaaagcggagtaagtgagaacggaagaagtgtatgtatccttttgcgaaagagaacagggaaaggcgtctgggccgcgcgcgcgacgggttttaagccatgaccgagagaaagctggttctttttctgcttggttttgcgcacgcactgacagcagactactcacacacacggccgtcagaaaagcggccgcaatgaaggcctgatttcctgggtggagaaaagaaaaggagagagggtcgtgtcttggagcgttctcccgagtctccactgttttaccttcgccggagcgtgtgtcggggaaatccatctgtctcgtgaatgtatgatccgctgcacatccgcaaacttttcgggtgtacgtacaccgtataataagctttctacataacgaacgagccgtccagtttttggtctcgtcccttcggctctggacgaaaatttcgcgggtgacatcgccgagccacttccgggagcaggccttttcttgtttccgtgctccgccaccgcaaactgtgtcatcgttctgtcagttctcttgttctcaccacgtttcctcagggtcttcgaaaacgtgtttctgtgcgtatccgcataagccaaaaaggcttgcgtcgacctaaaccgccgtcttgctgagtccccgtgtctacctcctccagtgttgctgtttttctccgttcgagtatcctttacgtttcactctgacttctcttcgaacggatatttcccacctcagatgcagcattatctctaattcggaaccgtaggcacgtccgcttgcccgttcctccgttttccgcagtagcgaatcccgttttttccctctcggcgaagaaccagttgtcttgcattcttcgcttcccacgttggcacactccgcgtttcacctacctgttggctccggtacgccgttcgtcaatttcgtctcttcaccgttggtcctcctcgattttctttgactttctgccctttccagcaaaa

SEQ ID NO: 2223 - DNA, 3749 bp, Toxoplasma gondii
  source 1..3749: mol_type = genomic DNA
gtcgttttccctcccgccttcgttgtctttctaccgcatcgttggctttctaccgcatcgttggctttctctctcgttgctctgcgtgtctcactcttcctcccggcgttatttctcttggcttcctcagttctttgctggacgaactggagcgatcccaggcaggcggcagtgtgcggtcaatcgtcgtgcgccttctgagtcagccggtggggcttttttcagccatgccgagacacctgagagctccagaagcggcggcgtttgcagagcgcgaggcgagcatggagttttcacgtgacgtttttccagaaaagacttcctccgacttcggcaccgatcgctcagcggtggctgaactcagtcctttgagcagtcggtcttggcgggacaagtgctaagggtcgaacgactaaacacgccgctcgctcctgccagaggaaccacggctctctggaggaatggagcctcagcggcaacaccgggagggggaacgcgcgggcggtaacggagcggtcagtggggagagaagtggaacacacaacgtgaaaaaaactaaatggcgatccaaagtaagaggaaccaattgtgaaatgacacgtgcatcaatatatatatatatatatatatattcatatgtgtgtgtgtcttttgagatgagtatgttggagatagacaggagtgttggagtgtgggaatgcaagcagttcgcaacacgaggcaaagcctcggttttgtgagttttctgaaggtcagagggtccacagatagctcatatggattcctcgattcggaacacgtgcgactgcaataggaggtgtctgtacacagtccggggaaaggtctgaacagaggggaaagaagcgcggcgttcatatgtttcatactgcagtggaacgcctctaaggacgatgtgaatgcgggacgataatacacgagactggataatacttgtctcacaacacaacggcgacgcaaagtgagaaagaggcacaagcgttttcgatgggtccctcagctagctacaaaacttttttatgggttgccgtacgcagttaggtgcatgcgaatatttgacacgttcgtccgatgtcatttgctttcaagcgagtggtgtcgtctcccagaagacgcatctgtgcgggtgtcaagggatatacgtcgagggttctcccttatacagtcttatgttccagaacgtatatcaatctagttcgtgcgtacacacacgtagatcggatacgtgggtgctaactacagatatgcgtattttatccgaatgtgtgtaactgtcgcacaagatgtgcgacagtttggggaaacgtgtccagatgcaacgagttccgatcaagttcttcgttttctgcgacatgtagctcgtgccttgcgagtagagcctgtcggattatgtctagtacccctgaggatcagttccttctgactccgcttctgcgtgtcttctcttccgacaactgttgtcttgtgtgcttcatgatgcgcgttggctgacgacatcacggcgggtggatcacttcagggattcgttttttgtggcactctttggctctcgtgtgcgggacgacttcgggctgtttcttttccttcgttacgagacagggcactgtgtgacctgctcgctgattgtgttcatgtctgatgttcgatgatttgctacaactcttatgggcaggctatgctgcctcggtaccctgcactgccgggtccgtttttcattaatgacctcaagaatggagatacgaaactcgaggttttgtgcaaaagcgcacgttgacagcacgcgaagaggcttcatggcttcgacggacgaaaatgctgtttagcgctatgcgacggatgctgactaagaaaaaaaagaacactgacatgcgttgcggtgcaaaatattcctggtgacctgcaaacagacgagtgtagacggagatgagtattgcggcagtttctttgctgatgacctgtcccagtccatatttctttcccttgcaccgctctcaccgggtcggatgcgtagtagcttgacttgtgtgcaccatttgcaccccttgatatcggcaattttcaaaaatctaaagcgcccttatcgtcaacagtacgttgtagtagagcaacgaatctgtggtactgcgagagctactgaaaacggtttaatgaatcgaacttttgtgggttcgggtttctgcgtgtactgaaaggtgccacatctgtgcagacccgtcttctgtacacagatgctgtcagcacggagaagctttaagctgtggtaagtggcgcttgcctggtgatgacttttccaccgccaaaaaagtgccaacggacaatgatgcggcgtactgtcaccctgagctgcgtcagacagtttgaagacacgaaatatcgagtagggaaggcaggcgtccgtgggggaacgcctgttttttttggaagtggaactggtatcagcagcaaatgaaagaacggtcttcctccgtaagggtgcctctgcccacgttctgtgtgacggtcgctatcctgcttctgtgttgtttcagtatttcagtaaggcatggtacccgttaaaagactccgctctaaaccggtggaattcagcatctcccatgtttgtgtgcttctaaggggctccgaatgcaccagcttccgcatccaagaagcttctgtatttctttcgtgtgtacacagacaagtcttctggggtaggagcgccgtgtgtgttgagtgacgtgacacaatgtcgtgactatttgaagcttttcaagaaagggtctttgacgcccagagagatctagagagaccgactagcgggatcacgcccaaacatacgcagccctccggaattctttttgataacttccgttctataagatcacctttttgtgtaatggcagctccctgcagatcccgaaaagcagtttaactattgaccttgtccccaccgtgtgcgaagttggaccagcgcagcgaagactgtgacaaaaaactcgaccggtctgtgggctcaacgatgcaagtgtgccattgggatccggaaccgcgtttctcagctgtttgcgcttgccaactttggacgcgttttccagttcttttgctttcacctggagattctactgtcgctaaagagcaccgtcctcgttctcccgtctctctccaagggaagtgacgcttgacggagacgaggaacagcggctgtccgcgccgcgggtcagagaggtcctttctgctagacggcccacgggtgccacgcgcgcgagccagccggtaacatttcggtcaattcgaggaggttcgcatttttctgacggcatacccttgtgacttcccctccttctcatctaaagtcaaacgatctgtgcttttgcctctgttttcctcggtttttctgctgggcagtgcgcgtgtagcccttcgaggtgtgcatttcggccggagagcgtccctaggtaactgcagcttttcggagccgttcgtgtgtggaagcctctgctacttacgtgatctgcgtatttatcgtttcgcagatggttttattttcgtgtttacaaagtcgactgggaaagcgctagagaatcaggggtttagctcactctcatcaagtcgctgtacttcctgacccgcgcatcgtctagcggtggaccgagacggtttcgtctagaccgtcgagagggtgaaactcgagactgcttggttcactcaaaatccctccgttcttcagaacacactaaccgtttgaaacaaca

SEQ ID NO: 2224 - DNA, 1924 bp, Toxoplasma gondii
  source 1..1924: mol_type = genomic DNA
atatattatgcattgaccgttgcaaattgagaccctgcaaggaaccgcgtcttaattcgggatcttcattgatattttcctgttatgggcatatccatgttcctgatggtggcgaaagcagccgctttctcaggttcgtttttttgcgattgaggcagctgagacttcgctccggcgtcgtgctccacagttggtacacttgcagaatagccagtgggaagcgccgtagtcagctggaggaaccttgcaaaggctgcccacagaatcccaccgacggcatgctttaagccaagccaccaaaagtcagaacatggttcccgattctgcagttgtgctcccttacccctatcatagcaaactgacgcccaagcagcagacggagccgcgcgcgctggccggccggccgctacgttcgtcgaggaaacaaacgcgtccggaagctgttaagaagcatccaaacggttccaactatgtactgaagaatctcaggcagtcgctcttccatgagggttggtgaccctgcttccatttcttgctgtaccggaaaacaagaagtctgcacaagcggaaagtcctgtgctctgagcgctgtttgctgcatgccgaggtccgatacgtgcgcctttcccagtcaaggacccatggaatttatcctctttgcttcgctcaatatcaattcattcatagggcatggcatactcatgctggctgccttattcattcgtagtcacgtgcacggatagcaacgcagaaagacagccgaccagcaaactcaacaacctaggatagttcccctttgccaggcacgtatttgaaaatggagcagtcctggatatagcgtccgtgttttgaggtgtctagaagtgatcggacagaaagctgaacactgccaccgtcccgccctcccccactcccgtgttgagcgcacaccgttcctgagccatcgtgtggccaagaaatatgccagaatcacccttatttggtaacgcatgtgtcatttaaggcctttgattacctaagagaaactaaatttgcagggaaggattttctttctatgttaccgaattcgttcattatattcaaaagtgagacggtaggttttagtaaaacccgccccgtgagcatgagtagtttgcaaagtgcggtgtggctggtagcattgacagaggcgctgtgcattaacactgatcttgacaggctccagctctaatgtttccaaggagtcccccaagacagataactagaaatttgaatgtacctcctctgagtaacgtcgtctcaaagcttttaactaactggaaaagtgaaggttttttgtgcgcgtgcacacgctgtcttttgcatgcattcttatcgcccgcggaagtaatcgctcaagcatttagcttcattatcgagttctctgagagcccggcgagacacggttctgtttcgtcatctgtcagcgcggccgatctcaaacgcataggaacagctctgtacaggcactggccgctggagatgaatgaaagtcaacaagatttcatttgtcgtcccaaatgtaatcacccacctcgcggcaactaaatttttttactttcacctcggtgtaccatgtgggttggctgtcggctgcttctcttacgaaagctccctgttcttcatgtgtggtttcgcaacacaactatcttttgaagagaatttgattcgggctcaaacggcccacagacccaacaagaggatttgagggcgtcggtgtatacgggagtctagaaaaggagtacaatgccagtgacatgcttctttactgttttccgacacggaatgtggacatccgttgaactgccaaaggaggagggcctctgtttaactgtgttcaagaaactctgtgcgtgtatctgagagagcagaaatagccacccgacaagacggacgccggcaacga

SEQ ID NO: 2225 - DNA, 3593 bp, Toxoplasma gondii
  source 1..3593: mol_type = genomic DNA
atgttcgtgactcctcaggacttctgcgatgcctttccaccgtcgaaagccggtggtcaccacgcttttagacaactgggaaaacaacttgcagcaaaagcagtagaccgcatcgcgagtccgggagtacaccagccagcttctccacagcttctcacccgacggtaacgtgcgccagtagtgctggcgaccgaaccgtctctgagtggcgtcgcgagggtacgggaaatcgacgagttgaacagggcctttcttcacgaggctccatcggagttcctcggtgatctgtgagggccacagggccaggtcgtccaactcgtcttcgtcctcaggggtccccggcgacgcccgcaaaggcgccagcgccgggaagcccccgtcatggacctgctcatcccgcctttcacgtgtgcacacacaacgcgcgacgagtcggggagaactgtggggcgacaccgggcctggaccggaggactgtcgcgggagtcttggaggcgaagacgggctcaccgaagaggtcacgctcgacgcgtcatccgagaccggcgagagaaacggagaaggcggagaacagcagctgccgccgctcccgtcgcctctcaagctcgaacaacaactcgagtggcgggtgctacagcttccgcagctcccgttcgagcccccgcacggcgagaagcaatctatcaggcggtctcggccttctgcggtcgctagaggcgagagcggggtgcctggaccggtgagggacggcagcaacggccgctgggtagagcactcatctcccatcgtggctcccgcgcttcgacaccgctgtccatcacctccagactctgcagatctgagaacgtggctcaccgcggcgccgtcatcccccgcaccactactccctgtcggctcgattccgtgcgcgtgccagttcacatcaactctctctgcgccatctttgttttccaagacatccaccgcttcgaggctgtcgtggctgctccccctggtgctcctgtgactgcggctctcgtccaggagcagccgccacgactcacgcagtgtgcttgcgcacggaagccgtaggccgcacgaggtcggcgaagtggcagccgagggagacgtcaggcaagggcggtgaccttcatcttcttcacagtcgtcttcgtcttcctttcccgactcccggctgctgacgcaccagttccgcgtgctgctgtcgcttcttccgcttgcgtggcaactcggagacaggagcctttcttggttcaccggcaaccgtctcttctcctcgtcggctccacttgaacagcagtgcttcttacgctcgcttcctccctccacgcccgaatcttctagtatgtcacagtgacgaggtcgtttctgtcctcccgcgtcctcgtctgcgccacacagtgtcaccgaagacccggcacctctctcttctgtccaacagacaagcgccctagcgcaacagcagcacccgccccctgtggatgtttctggttggctcatgagaggagacgaagcggacagggtgcgagcttcatagcgcgcagactcctctcggatggccctattcaggtcttgccagttttcgtagatcgcctcggaagttactgtcgtcgagaggaaagagaacagggacgcaggttctacgcgattcttcgccaacagttcccgctttcgctttctcttctgagcaccggacagctgcttccttcgcaccaccccttgcccagttccggttccactggtgctcgagttcggactgaaggcagtgctgccgcatcccgtgctggagggacaagtggcccccggtgtcagtgtgtccgccgaaatctcgcgcgacagatctgtgtgcagcaccacattctgttcgggagatacaaacgcgcacggccctgtgactgcggcgagacgagacgagagcgcttcttcttccacggctgcgtacgctggagtggagaccctcggagaggcttccaagggagaagaggcccctctcacccggaacgccgaaaagaacgaacagacagttgacgagactgctgctgacatcatcgaggagaaactgagcaacttccactgatgcgagaaggatacatgcagggatatctctgtgtcgccagtggaggcgcggccgctcgctggcaactaactgcagggagttatggatcttcggagatacccacccacgcgattcccaaatagaaaactgggaagcgtccacggttctaaattagaaaaccgacgaaggcgcccacgaccccgctttgtctcgcagccttcgtttcgagagacgtccagaaaaccggaaaaactataggatgctcaaccacggaaaatacccacaggtgtgccgcagctcggtagcgctggacgacgagtctcgtcccctgtcgcaatccgctccgcgagacctcgtaggcagctgcagttcttgtccctcaaggacagtcgatatatgtaaaatcctaaaaatggactacagacatgtacgcggtggtccgctgcgattcctgcgactctccctccgacatcgcctctggcaacgagccgggaaaacaatacaatacagtcggaggagatccgtgaacacagaaagagcggcaggacagcgaccttcacctgcccaccgtaagatgctagtaggtacggaacgcaccggttctgagggttcatgtattacttcgccacaagagaacgattcctggaaaacagtccgaaactgtttacctgcacaaagtccccccgtgccatccctcggactggtccacggacagttgcggttgatcgccgagttcggcgctatcccggaggatgtcagtaacacgttcttttcacctctagccgcgctggggaacctgacgacccttcctctgacatacacgcggcggcactcaccgagtgcagcacaaaacatgacagaaacggccggtcccgggccagtttctcgatgaagtgatctacggaaaagagcgaaaacggaaatgcgaaagtgagatcaaggccaattcggaaagaggacgagacacaccgaggtcaccctgggagagaggaatctggccgtttcgcccggcttgtaaaccctgtcttccagcagtcctggccaccggcgcggctcaccggggtgagttcagcaatctggagtgaatccagcgttccttgattgccaacgaaaacccccaacgaaacgaagcagaagtgacggtaggtatgaggagcctccggcgaatcggcttgagaacgcgcctccctctaccggtcgtctctacgccacactcagaaaatccggattgtccgccgggccggaagagacgccgccgaccagtccccaaccgtttcgctggccctctggcctatccaaaggtgcgcaagggtccccctctcacttaccacagcaggctaccggggtcgacgcgcggcagaaattgtgctgagaggcagacggggacttcacacgcgcgtcgaacctattcggacctactcggttccctaggaaaaacttcgatgatcctccggaacgctggacaaacaatgacaggccagtagctgaccgccaagggacacccctggaagccgttttcagagacgcgctaggacaa

SEQ ID NO: 2226 - DNA, 2405 bp, Toxoplasma gondii
  source 1..2405: mol_type = genomic DNA
cgtcctgtgcatccgtttaaagtagcgcgcagaaggccgtccttctcgtacggctgtcgatactttcttttctccctccttgcctcggagactcgcggccggagaagatgcgcgagcatgctctctcgctctgcccgacttcgaacgtaaaaccccacaggctctgaagacgctccccagaaagaagaagaaaaagaaggaggaggctctggaggcccggcgctacagaagaggtcagcgagcgcagacaacgagaaaccaggagagagagagtcacagtcaagaaccgcggaacgccgcggttgaacggagaccgaggagtgacccgacagagtggagcaggaaggcccagaagacgcacaagccgagggggaaaaagaagaacaaggcagagaagaagaatccgccgaagaggaagaatcacaacaaggcagagaaggagaagagggagagggaggagacgaacgagggaaacggcaaagggaagaacaaggcgaggagggcaaggagctgcacttcggtgtgtggctgatcgacagacttgacgaagactgcagtgctgtacctgccctgagcaaacgacttgaagaggaaggcaaagcgacgagagtcgctacggacgaggcagcagcagtcacatcgcttccgacggatgacccgtatctcccgcgcttcacctgcaactcccccgtcgagagtctgttcaccgctcgcctcttcctctcctctctctcttttctctcttcttcttctcttcggttcgaggagtgccgtccgcctcgctgcagagatgaaggagacgcgagagcaggttctgggcgcagcgagagaggaagcgagtagaaactgacgtcgaagcagtcggcttcgccctctccctcgctcgtgtcttctggactctctctgccggcaatgcgtcgcgtgtctctgcttcgattttcctcgtcttctccaatgagctgttcttctccgctctcacgtccttcgttgctgtctccggtggcgtctccttgtgtctctccctcagagggggcgatggaaggcagtccaggcgctgcgtcgccggctgcactcactggagaaggacgagacattttttctcaacggcgaggaagagcctgtcttgacacagtgcatgcacttcccgccttcgcctcggcgagaagacgaagcgcggcagaggagagacgaccaagtccaccaagtcgcgagtctcttcggatgtttcgtggcgcaaacactcaaagagctgcgcagagcgcttggactcgaaacagagacacggagcgcatgtggaaggggaaagcgaggatatgcggttcttcctgcggtgtctccgcagatcgctcaaccacggactgaggcgggaaactcaggaagttgacacgacgccgagaaccaaggacgcaaaaagcttcctcctcgttcctggtcctcgtgtctctcttttcttgctcgggtgaggcttcaaaccgtgtctctctagagcccgcgcgcgatgaacgacgagagagccgccgaccccccgacaggagagcatgcgcctgcgactctttttttccctccgtttccttgcaagacgtcaagtccaagacactgctcacagacagttgcctttcctgtcgctgcgccttcggcggaaaaagttcgacagtgcgggtgtcgatacacggcgcgtacgcagcttcttcgcaggtgggtgcatgcagagggagacacatgaagacagcgcgttgggagcgccggagggacgagaccgttcctgttcttttccggtgtctctttcctcttcgtctccttgtattcctttgtgttctcggagcgtctcccgcctctctcagaaagcagggatcccgcgcgtgagaacttgcaccgctcccgacaccgggtacacgctgtctcggtgtgtgtgtcttctttcttgttcatttgcttcgctctctcgaatgtccaggcactcgaaagaggcgaaccagagcgcaaagaaagaacaggttgaaattctcgaccatttggaacgtcacgcagtttccgaccctcggtgcggccttctgggctcccgttcccctttctgctctcggatccctgcctcaacttttacgatggtcttctctgtcgtttctctttaaggctcttctccttcttcagtgctgtttcacacgttcatcttccacgcttctgcctccttgtcccacccttttctccaatttccttcctcttctctcccctctctccggtttttcctctctctcctctctctcctctcctctctttcctctctctctggtttttcctctttctgtttctctacattttccttctttccccgacgagaatctgtccaccttgggtgcgtcgagtgccgctctcggttttcttcgcctgttctcgcctgctctccagca

SEQ ID NO: 2227 - DNA, 1538 bp, Toxoplasma gondii
  source 1..1538: mol_type = genomic DNA
ctgcttctccactcgagacgttttcagcctacgccaacgcagttcttccgtgcgaagatgcgcaggtcgaagaacgcgttcatgacgcgtgtttcccgtcgacgaaactaagtctcgccgtggacagggaaatttttttcagaagacatgccaacgtcaatgctcgttcgtttacgtagcgtgttacagtgtttcatcctttgtgtcattgggtaagggaacgcgccgcggtcattactcgttttttatgaacgtgtttgcgctgcattttcagcttgttgttttgcagcgcaacacggttgccagcgtctccgcttcggtcgcagtgttacgctttttttggttgtaattgtcagtgcagtgcatgggactgtacagcgttgggcatccgtgcttttccttcaccggcaacaagcgcgtgaaactcaaaagatggcatcccgcttctgtccttgcacttgagaaaagcatcttacaaggtgatcattgcgtaggtgtgcacgtgatcaacatgtcatcgaggaggcatggtgtgtttcgtattcttgtgtactgcgtttcacatgtttttttagaaacggttatagtggctatgggtgtatacagagccttggtcgttccgtaacaaactcgatgcgtcattgcctagatcgaagacgtcatgctaaacagtgctgaaaggcctgttctcatttatcacgtgtacgaacaatggcacagactgttgaaaggacatgccacggccggacccggacaaggcgactctgcgaggaggctcagaaagtctgtctagccatgatcaaacgcccaattgtagaatgcatttgcgagtgtgtcacgtggtgctggctcgtttagacatcgaatgataacaattgggttgacacttgctggtgccaaaactgtatccggaaagcagctcgaaaaccagctttttatttctgcagcacatcctttgatggatacatagatgcagcaaagagggaaatgtctttggcgcatcaccaggcaggcgctgccatcttcctgtcagctgcttcatttcttctctctcagaaagagatcgaaacgacaaacacaacacacatctgtgcaatatagggggtccctcacgcaaaggcgctattgcacggcgtaggcaccgctgcttgcgcgaagacagttcccactccggcacgggttcaggcgctgcgattcaggaattccgcgcgggttttcgccccagtttttatatgtttcttcttttctttctggaaaatattggcgtcgttcagattttttgcccgtggcatcttttcctgccacgttgctttagctttttctgccgttccgcgtgcgtgtgatgatctgacggactggagaggcagatgaagcaccacctgttctgtgacgtctcgcgagccctcgtgtccgacccccaggccttgacttgttcggtgcagacattcccctcgactttgcacacatcttactgcaacgaggcctttgtggccgtcattccgaatgacaaaaatcgcatctgcttctatccattctga

SEQ ID NO: 2228 - DNA, 2944 bp, Toxoplasma gondii
  source 1..2944: mol_type = genomic DNA
gtccggaacttgtgcggcaccgaaccttttggatgacatatgatcagcttatgtcgcgtggttatgttcttctgtttatcagagacgccatcatatgtgaacgaagaagttcttgatgtactgtcactccttttcaaaccgactgtgtggtgtgatgtcccccaccgacggcaatattatccggaagtgtacttagcgtgcacagactttcactagacgtggacgtctcctctggttatcgaatatcattttctactcttggcgaagcgacgctgaatgtgcgcaacctgcatggaactgggctagatgtgcttgcagtagcagcatgcttcagctgggcgtcactaaacttattcgtgtaaggctttggatggcaatatgtgacggggagggaagtcgctcgaaaacgtccaccgcttctctacacgggcttcttgtgcaacttaagtttgtattgctactcgatggagtgccccaattttgctgcggtttcgcgacgaccagtacagtaactggcggagttcctcgattcgtatcctaggtggtatgagaaacaccttaagaagacgagcatgaactcttcaataacaacacaaaaccgaatgtcgatcgtcactggatcgtgcatgctccacagtggctgttgggtaaacgcggctgccctcaagcaccaagaaatgagtgtgtccgaagtgcacgcagtagcgccgaggccagcagctcctgcattttcacgttagcagtaaaattatatactggttcggaccacacgcaccccaaggcgccgtacagacgacggcagtgtcgttccacatcatctgcgcaacaggcctgttccgcgagaacgtgtggcaagcagggtgaagcataatggctttgtacaattgggaaaaaatgatatgtaaaacggagctgacgccgtcaaggtgctaatgcacacgtaacgacgaacccgtcctcggggaaatgcttcgctcccaacgaagaaccgctgtcgcccgaagaggacgccttcacatcgagaggtttagtcctccagcattcatatgttttcgcagtcacatttctgatggactacaccaataacctatatccctaccagcctcatggaggacagatgcccagagagagtctatgacgaggacgcaagtccagttgatgttatccttactttccagcggcactatcgtggggaacgaacttcaacaccacgctgcgccgtgaaatgcgcttgccacgacgggaggcacatctcctcaaacctttgcttgtactccttgcactcagcatatgagtccccgccgtgcttgtccaagcatgcaaaatattcgtccttggctgcccaacaggcagaccgggagaaattgtttgctcgcccttgttgcagaccatcagtcctgtcctcttttgtgctagtgatagcagaacccattccgtcggcggtttctctaaaaacaaatagcccagcgctagaccttccgaaccaccgtttgcgcagacggaatcaccgttcaggcgagggggtctggttgcgactgatgctcacgttgtacggggagaaggcactgttgtactattgcactgcagacgtaaacaggcgtcccaatactactcagtacacagatcttccttactggaggcgcagacgctcatacgaaatgtgtttggttcgagagaaatgtgtttggcgacacatgttattatgaatgccgatgcctctggcgaacggctagcgcatgctcagcgtacgacaccgttggagaccccctgtgacgaggaagttaccttacctggcaccaagcagagctgctgtatccaaattaaattaaacgcgtaaaagagaggctcaggacactcaagtaagacaggggtctttcattttgtcggttcttccggcaatccgtgtgctcgttcgcaaaaagtatcctcggtaagctgttcgtttagcgaccgttaccacaacgctgatgtagcgctggaaccgtgacgatatcgcacaacagaagacgcacagacgcctgcatccggcttcatatttcgaggaactgatcctaacattcttgcgcgtaaataaaattctcgtagcgctgtctatgcctacgactttttcactcggggctgtcgcccggatgatagcgtaaatcgcttgtccccagtcatcttcgcatggcagtcctgtagtccaccttcaagccgggtgactagtagactcgagagtgaaatttcccgttgctcactttgaaaacgaagcatcgaaaggatgggtggtggttccaccctcactgtcttgatgaatgagctccaatggaactgaactataacaacggcggccgattgtaggaacccatcacggaaacccaagagaacgcaaggcgaacctcgctaatgctcaccctcagcaggtgagcgtcggtgtttggctacggtttgacgatgcagtgtttgtttgttgatgataccccgtgctgctcctcaggaatgcaacctggttgtgagctattgcctctaatacccccacgtggcgttgctgcatgtcgcatcagtgtacctgtagcgttagtttcgcagtctgtcaatggaaaaaaaataggtgcctggtgcagtgagtgcagttcgagcgatgaaagtgttttccagtacacacacacccacacaacggcagatgtttagcctggcttcagaacaaataccggcgaaaagtagaaatcagaccgcataacgaaagactttgtttcccacacggaaagatagaactacgtccgtgcccagtttggtagataagatattgcgatgacgataagctttgaagtgcgtcaagggtcggctgtctgtacaccacccccctcagaaaagcatcaaggccaatgtaggattccaagtgattgctcggatctggaacgtcttgctgacgatcatcgtttgtctctttctgaaaagccaacca

SEQ ID NO: 2229 - DNA, 2316 bp, Toxoplasma gondii
  source 1..2316: mol_type = genomic DNA
gacgacgcaaacctattcacaaatctgctgacaatgaggcggtgcacagcatgagaggtgcagtgactaaccgggtcgtctttccaagtcgctgcggaagagtgtaggaaactccacgcagcgcgtccaattgacatgcgatcaggagggtcgtcgtcctcatcctgtggcgcatcgtcttttaagatccggtcgcggcaagcggcatctacacattgattgagtttctgtggaaagacctgtgaggcaagcagtgcagccgctgctgaatgtgacgccggcgcgcttgaccgaccatttggtgtgggcgtcgaggacgccggcaggtttcggctcgcctgattaccgtgtgccaaatccagagaaacagcagcttcggaacctggcgaagagaatacgtcccccttcccgcgagaagacatcctgcctatgtagaccgtggcaacagaaacgcaaacacggtagtagggacgggaaaatgtgcttatctctcgttcgcccgtgtaactcgtaaaagtgcgtcggcatacaaagtattttcttcgacggcggctgctgttgagcctcgctgttcccctctgtcagacaactcgtcaatgaacggacgaccaaatgagactcttacaaaatggccgcagagagcccgcttctagttgtttcgcaataacctcagcagtacgtctttcatagatgttgcttcgcagtagcttgtcgcgtagacggcgaaaagtatcaaagggcatacccttgttctggaccatatacggaataagatctatcgacaacacgccgatgcttgctactgcaaaagagtcttgcattgtaggaaataatgaacggtttagcgatttgcaccgaaatcggtatgagtgacaaggggagcagcgctttcctgcacgctgctgttatgtcggacgtagctacacacagccaagcgctaataagctggccgtcgttctactgtttgcgttttgcaaagaggatttgaagggaagaaagaacacattccaccacaaaaaaccttctgagtggcttggactgactccaccgtgttgctcgcagagacacgtagatcgacaccactgagggcaccaaacgggacgggaattgagtacgcaggagcagcaggcagctgcgccaagtggagagcgcaacactccctgagaagcagccgataaaacagttccacagtacgtactgccatattggaaagcagcacttcggtgatctcgcgttagggatttggcacatgcgcgtgcagcgattcatgtcctgcagcagctgcagttctgctgtaagagctgtctcgcgcgtcacaacgtttgtcgcatgcggtacggcttataatcaagttcggattcgagaaactgcctaggtgcgccgccacgcgttagcggaaaaggcggtcgagagtgactacgaggcgcaagagtccgagcgtaggaaccacccatcagtggcacatgaactgttgccgctctagcaccttcgcggtcttctgctaatggctgctctgagaaacagcgcctggcctgtgtggtggtcccaaaggacgatgatgcaggacggcctgcgtccactgccggggcgactgccctcttcccctcgatttcttcgctgatcctaccgccgacaccggttccacttcccggtgcgaaatgcctgcactcgacagccagcaccgagctttgcgtcacgcaccggattccgaagccatgcatcccacccgtgtaaagctgtcaacgcctgctctcccctttttttgcatcgtcgtgttttcttcggaaggttgtccttgtcctgggaaggcgacccccgttgacacagccggtcgctccgccgctgcgcagtccaagtgttcacgcgcgctgccccacgcgttgcattcaccatctccgttctgctttagtgttcagcagattcgcttattgctctgggtcgattgcttcgtgcgtgcttgtttattttctgcgcacaccaagtgctgtttttcgaacccgtagagtctccgtttaagaccggtgaaaacagttgcttggggccacaggtttggcaaagttagcgtcacctttggaggcagcgtgaacgactgcaaattcattttatttatttcctgattgaagagacagaggtccgggaagctacgtttggtacagtgcccgcattaccttcaattgccgcgtgacattcgtctgtctgggcggaagcggagtctccatgcgtatttggcttggtgagttcgtgtctcgtcaatctctctcatcgcagcgctacttccgtgtcgctacagtcgacgtgtgcctgacctcttgaaaa

SEQ ID NO: 2230 - DNA, 2380 bp, Toxoplasma gondii
  source 1..2380: mol_type = genomic DNA
agaagtgacgaatgcgagcacaagagacagctccatatctttcgcgtttccagccttctctcggcaccactcccttctcgatcttctcctctgcatctcgattcacttttctcctcatccctgtctccctctttctctccagctgcgtcccttcaatggtgactgtctcttgcaacaactgaaacctgctaagaagaacaccattgcccttctcatcttccgcttccccgctcttcgggtgttgaagtgcctgtgacctgccgaccggccgtcccggttgctcgcactctgtttctatccgacccgcaactgtgaggcatgtgtggacgttacggcctccggtcctttagaatgcctccggccggagtcctcagtccgaatcgaggcgtctcctgcttgaggcgtctcgctgtgaatctgcgcctttttctcactcgagcgtggtatgcagctctggggacgcggtcgcagtcgatgaggaagaaagtggcgttgttgctcgcgctcgcggcgaagtcgaggaagggctggaggaggactttgctctggagggagaagcgtgcgaaaaacagacagacgatgggcttcttaaagctttcctcgtacaccgcggcttcgtagcgctccatggtggagacttcttcgacgtttttcagggcgttagtcccactcgcgattccggaagaggcagacgaaacagcctcaaacactggcggcggggtgggcgtcgccgggagagggtccgcgagcgctgcggcgttggccggaggaatcgcgaaagaaaagtggcgggcggtagcggcgcaagggtgcgacatcacagccgatgaggagcgcgaaagaaaatttgtccgcgaggaaaaagcagagacagaagacggaactgacgacacggcggccgcggcaggcagccggcaggcgtttctggggtgtacatacaccccagacaccgcgaacggcagtacgcgggagggcactctgttgagggccattttcgcgaagtttgggggtggaaaacgcagaactcttcgctcaggagagagaggagagaaagcgtgtgttcgagacggaggaaaaacggaggaatccggggtttcagggcggcgaactggaccagccgtcgcccgctgcgaattgcggcctagaccttcaggtttgtggtgccagttctacacgctcgaacgcgtactgaagcttgtgagatggtgttgaatccgggaacgaagaacagcatggaaaccggcacgccaaagcgagcagactcttcgcaacttcgcaacttttccgcgggtaaagcacgccagcggcgccacagtgggaccccgacacctgttgtacgccaggggaaactgccctgcagatccgtgtgtgttgaatttttcgcgggcgaaaaaattcaaaagaggtatctttggccaccagtcgccgagccagagaagaaggcactgtcgccgaggttcgcagggaagcccgcccgtttgtctccggttttcgacgcacgcggaaagtcggtctccgaatgcggtacggggggacggcgcagactacttttgcagagacggcttggctcttgctgcgaaaatgtcctcacattcccaacgagttgtgttcaggaaacaaagtgtctggagccgacgcctggcggggaaacggtcccttgctttgaattctcctgtcgcaaaccgcgttgggagtgaatcctcggttcgctgcacgactcctgccttcccgggagaagaagtagctgcggaacccagcgagacacgagcgagcgcaacatccttttcagagtctctccagggccgcagtccggcacacatgtatatactcgcagaaagagagagagaggggtgtgcgtccgtgtcgagagtgttgcctcgaacgcctttctcgatctcgtcttgtgtgctgtcggtctcgcgggctgtcgggctgtctgtgtatctccccgtcgcttggctttggtccgcgacgaaacagtagggagttcaggagacgcggcggaacagtttttatttcgcgaggggtgacgcttttttctcgcgtctcgacattgcgtgtctgttcgctttctcgaaactcgccgagcgccgccggcggccgagttcggcctctcacacaccacagcatggggaggacgtgacgctcgagtgtagcgattaggcacctgtagctgcccggtttttctgtgttttctgggtatctgtagctgttgcatcctcgagggctttgcagagctcacctttctgcgttgtctctcttccctttcctcgtgtgtcgcctcgcgcgccacgtctcttgctgctggcggcttgtttcttctcttttccggtgtcttcctccgcgcgcgtctgtccagcttgcggtgtgttgtgtacga

SEQ ID NO: 2231 - DNA, 1403 bp, Toxoplasma gondii
  source 1..1403: mol_type = genomic DNA
gacagctcttcaaacaacaggatacttctcacgtgtggcaagatcatgaagcctgactttcgtctccctaccacgtgaattacacgaatcaaatattcaacagtatctctaaattctcctgtagatggtacttccctcgctcgattgtaaacatcactgcgcgtaaacactccattgagttgggggatcctatcagcctacgtggtgcaaacggtttgatttaacattgctcacgattcacacgcgattatcttcaaagtaattccctgttcgtcggtgctgccgttcgacccgccgcttcctcccgcaaagcacagagaaaaaaatatatacaccggaacgcagaattgcgttcccgatccctgtgtctttgtcgctttgtaccttgaggcgacactcctgaagcaaaagaatcattcaacactagtcgtttctttacgttatgtgtagctgggactgcccgctccgaaacctagccggtcggaatcttcgggaggctacacccatgttacatccctccgccgggtgccatttctgcgttaaattaccaggcaaacacagtgaagacagcggatgaatatagaggtaagggaaacttaccaaaacaatcgaactctccgggtgaacggctgcctggcactttgtattgcggttttatttcaggggaactcgctcggtttttctcttcatgcgccactctatgattaccgcggcttgatagtcttcgtattctgtctggcaaccaaccttccccgtggactgttcggctttcgtcactgccgtggtgaagatggaacaaatgggttgccaatacacagtcattcgggacgttggtgtatcgcgtagtagctggacagaggtgtcggttttcattgcacgcagactgccaccgatcttggagataacctcgtacccaaaagcaagaataacaaatatggagccaaatcactatacctcgctgtggtttttctttagcgtctacatgcacacacggttggcgatttcgatgctcgtggctgtacatgcaactggctctcgctgtccagcaactacctgaacacatcgcattcctttctcaagcgttaccacttttccacgcaatcaaagcgcgactagattccttacctttcatttgttaaagctatgaattgaaaaaagtgcttcttcagacgtgtatttccgtgtcttggcgactgcatgcactcggcccaacagagaacagtaggcgtttgtatttctctgagtccgagatcacacctgactctgggtccatgtcttcttcattcatccgtctcccggtctgtttaatgtgacgcgttgtcttttagtccgaagcaactctgctgtggcacgtgatctgagcgttcttccccgttctcccgcctgtcccctgcatgtcgtca

SEQ ID NO: 2232 - DNA, 2684 bp, Toxoplasma gondii
  source 1..2684: mol_type = genomic DNA
cgagtctctgtcgtccgcttcccacaacgtcactgaggacaaggaaaggcctcgccctctcgtctcttcttctcctgatcgagttcgaaacctcaactccccctcagccgcgtcttctctctccctcgcctctccttgccgtctctcttcctcttctcgttccttctttgccctggcgaggttgcgtctcgtttctctctcttctcgcctctgttctctcctgcgctctctctctcgatcgaggcgctctcggaggccagcgagagagaacaccatcacatctccggctcgcgttgtgcacagaagaacttcttcgcctgcaagaatctcacaggcaatgtgagtggctttcacgcgcctgtcgctcgagagcctcgcggtcgaccatccttcttcagcttcgaggtctgcgtcgcgcgcatgcagcgaaaacgcgcccggccgtctgtggtcttcgccggggagaagaagcgtgaagcgttctgggaggaaggcctgttctctaccgaggactctgtggttctgcggagctcgagcctcgccgtttagagctgcgaggaaggaccagacgcgcgcgtctccgtcgtttcgcgagtcgccgcaggctccttcgtcctcgacctcagacagcgtctcctcagagctcgacgacagagactcccagtcgctctccaccaacgcctgcccgcgtcggtcgcttcgccatgcgttcgaagaactccaaacctctccagactgctgtcgccgccgcagttcgtctgcactcgcggggactccccacagagactcctggggtcctggcgtccccaccacttggcctgcaatcaatgaagaagaaaacgaagaagaaaacgaagaagaaaacggagatgcagacagagaggtggaaggagaggtggaaggaagggcactgggagacggaggcgcgaaagacagccgctttgtgcgggtgaagggaggagctcttcgatacagtttggccgtcggtgttcctcgaggagtgagagggagaacaatcagctggccgtccgttccaacgacaaagagaaggtcgcctgaaggcgacagcgccagcgtatttgttgcatcttcggggagggtgagggggtttgaccgaagaggcgagcatcgcgaggaaggcgacggcctgagcgagactgaaaacaagagtgagagactcttcagctttccagagaagccaggcgcagtgcaggcagaccgggaaggtgaggagacagaggacgaagcggacgaagaggacgaagcggacgaagaggacgaagcggacgaagaggagcctccagggagagaccttggcagagcgctgccgaagagagaaggaagaaagaactccacagaaggcaccgacgcgggcgcggcaaaaggatctgcggccgccattgcaactcagagatgggaggttcagacagacaagtcggagcgcgaaagagacaagagagtgagagaaagaaagaaagagaaaggaaggagaggagacatagaaaggacgacagggacggaggagtgaagaggaaaggtggaggcctgggaaggacgcagagaggctggacagagggagggagaagacacaaaaacgaggaggcgactctatctagcggctccgacgcgactcgacagaaagcgaccagtggagttttccactcttcgcatggtcctcgttttccagcgtctggacggtccttgcaactccgtgaaagacctctttctgaaatttagagcgcctcccagtctcggaacgcccagcgagtctctcgtcagctctccctcccaaccgcgtcttgcaaaggctgtctctccggcgtcgacttcgtagcctcccgccagcgcaggatttcctcgcgtcgcgcgttgccaggaccagtgtcgctctggaagcgagaaagggctctttcttctctccgggaaaggcgctcttctcggagaaagaggcaaaaaagacgatgcgcgacgctctccgcctcgtttctcgacgtactcctgcgtgcgaccgccaacgctctccagcgctctccagcgctctccagcgcgcatgcacctcgaaaaacggctaccagtagcttctccggactcgagagcgtttctgaggcaaacagttgcttaccgcagagatgagagaatgtcgagggagcttcggagacttcttcttagcagaggaacctcctcgagagacgaagtcaggtgcagcgccctgcagaggcgcgtcaacttttcgaggcatcgcgagcgagtgcgagacacgacgccacagaaagaattgccaaagaagaggtcctttttggaaaaaattcttcttcttctcgtgtctgtgaaaggtactgtgaatttctgagtctgcaaacggtgcattctgcatgatgttccggcgtcttcccctcgcagctcggctggagtgacagctgatctcgcgcggtgtctcttttttctctttgacgtctcgaccagtactgcttcatctccgtttccttcatctgggccttcctcagattccccattgtgtctgctcttcctttctttccgtcgtctctgttcttcttccgctccctcttctctttctcttcttcttctcgttctctctctgcctcacctgctgcttgccgtcggctcttctcttcttcttttcgtcggtctctcctcctcgttcgttttcagcgtctgcggagcca

SEQ ID NO: 2233 - DNA, 4167 bp, Toxoplasma gondii
  source 1..4167: mol_type = genomic DNA
cgcctgacacatcgctctcttcgtcaagactcacgagggccgtcttcgaagagcccacagaaagcttctccactccttgcgcgcgcctcttccccgatatcgaagaagcatggctggacacgccctcggcatgcgctttctgcttggaggcaacggcgagcgacgtgagaaaagagagaggcgacgaagacgtcttcgagtccgagtccggccccgcctgaatctccggcctcgcctctcccgggttggcaccctgagcatgcgtctccgcgtctgtatggccatggccactcgccgcgggaagcgccccgtcttgcggcggagtcgcctcgtggagtcgctgcggcaagaatgtcaaaagacgagggccctcgccggccttcgacgccacgcctgacgaagaagcagaggcgcgaggcgactcacgcaaagaaggcaaactggaggcatgttcacacgtctgttggtctgggtccaaagagctggtggacgaccgcgttgggctctcgtctcttgcggcgagtcccgcgctctcgatcggccccgacggggaagactccgctgccatcgcagacgccaaggcagacacaccgagttcggtcttctcgtcctcttccctccttctcttttgcttcaggaattgtctgacggctttgccacttccttcgcgccctcgatttgtctctcggagaacgcgggcttcagacccgtttcttcctcacgcgtttctgctttcgcacaagcactggaaagcgtggcaatggggaaaagatggagacaaaggccgtgttggggaccggacggaaaaggagatgcacgagactccacatgcccatgcccgcagatccacactttctttcaacttaaaacccgcgtgaaggccggcggcatcgggcggaaagagcaaagggagcgcaagagatgaagaagacgaaaagaagacgtcgtgcatagaagtcgtggggagacagtcatgcatacacagcagactgaccacagagaccgcgacaaaaaagcaagtgtctctctctccggggtcagagagacgcaagagacacaggcgacgcgctcatcggcgggtccgccagacgacgcgatctccacgttcacaggcaggaaggagggaggcaggaagcaagaacgcagtcgccgctgggatgcgagaagtcttttttcacgccgaaaatcccgcagctgcgaggtcgccactccaacagggaaaaggtgtctccactgggaagagacaaatggagtcaacgcaagaaccaggcagaacgcaaatgtgaacagcagcgtcggtgaattcacggaaatggagcgcgggatgaagcagtagagagagatccaacggaagttaccggacaagaaactcgacgcagacgtgagtgcggtgagtctgtcttccaggtaccggtgtcctcgaaacgacagcgcgggcacgaagacacgaggagaaaacggggtcttgctggaaagaggagaagcgcctcatactagatgaaaacggcataaagcggaaaaaccagacagaaggagaaagacgtttggatccagtgagtacgaccgctgaatacgttttctacgagcgaaaacagcaaagctgatagacgggaagagatacgggatcgaactagatgacatttcaaaagccgcgaaaatctttgaaaaacaagcacaacgggggtgtgtggttgcaaagacgtccccgattagaaaatccaatactgccttgcggtcacccaaggtaaagcaatgattccgtgccccatcgacgaatcagcgatcctgcgactcatggagggcatgcaggaccacagagaaagagaaaagctgcgatctcactcacttccggagaggaacactgaaaaatagtgggaaattcggtcagaaaccaattaatttttacggaagagggcaaaaggcatctttcggaagcatgcagtttgggcatccaccacgcaaaaagccatgaatgagacacgtgttacctcggacagccaggaggtcctgcatataccacatgctccgacttcagtaggcgctgttgcctttgaaatcctttgatcagagctagacgctcgattgtagaaagtaaaaacaaaaatagtctttgcactgcggccggtctacatttgccttgcttttgggcacgctctacaccaaattggtgtgagctggcgaggactgcatttcccctcgcccttttgtggaggaactgaagtgccgtatggatcatgagcaacgaagactattagattatccgcacatgcatcctttagggtatcggccgaaaacagacagcaacgaagaagtttctgccgcataaaatgagaaagttctgttggtcctgtaaggtgtcgctccactcctgttcgtagtacttgcgtctacgcaagaaccagcttactttactttgtaattggtgttatgctcgtcagcggtacgcacaacgcttttgcgttgctgcaaatttgattttggcactctcggtggagtcgagaatatacaacttgctttcccctatctcgaccatcggccttcatttagtgtatggttacgtatcaggaagtgggatctgtgaacctgaattgttgtggtgaaaacttgttgagtttcagacatattctaaggctgtggttgcacaagctctgcgcgtaggctgcctgccatacgaaaagaggggcccgtgtgacgcagtgtgacggatttcaccgatctgcagcagtctgtagaactatattctgtttggaaaagggccgcatcaggtcatccttcccgacaaacccagtcagtgtttcaaggagctgatgtgagtttctctcgctccacaggagacgaagcctggaattgtactgaaactttagccactgaacacagtgtaagataggtgtggtgaacatgcaggaagttagcctaggcgccagaacacgtcatgaagggatgccagaagtgcagtgtatccttttagaaatcctcttcgaatgaaaaaaacgccacacgttcatatcggatgtgtctagagttcgaagcgcaaaggctgcagaaaatggtgcttccatgtattcacgagcctaaatgcgttcccttcctgagtaaaacgctgtgcccttgcaagagagctgccggttgtctgcagtttggatactcatgtgagctacagtactgtcgaaaaaaggcatgattagtgaaaagcactttgaagtatcacgtagttggcataaagtcgtggcacaaagtgtaaacgaccgtcgtttatctgttgtgtcgcacgacaacgagtctgctttagggttgacatgggagaccaaattgataactagacggcaggatgcggaaagcgtagtcgttcacgccaagacaaagttactgaatgctgcacgggtgtcttgacaaacgcccaaagcaacggactgatttgggtcgagtatcctgtatctcgacgaaactgccccccccccccgccaccaaaaaaggcccaagtcgggacttctgctggcgctttcgagaacactaaccagtggtctttcctccgcataactgtgtgtcttcaaaccaaaacactagtcgagagtctccggataaacctcagacgggacttctttaattcctcagttgaccggcgctgtcacattttgggcagctagtctggggatcgtttggactgctgcctcgactctacacgttcctttccttgctttttccagaaatatgtgttgaggtgcttcgaacacagtgacatcgggtttccttttacgcacatctgcagctctgcttcagagccgcattacgaggaagggcactaaaagcatgcatcgcccggtcccagtgcgcgtacaacagtccgcagctacgagacgctgagaaacctgtgcttgataagcatgagtaacgaaaactggtttttctccttttacattatctcccactttgcaaaaaatctatcgcacaaacctcgcttgaaatatcagccgttttgtgcgagcaaaattttatccgatttggcaaccgcagagaaagccccttcagccgcttacctagattcactggatgccctgtcagacaaagagtcagactcaccacgaggtagaactcgaatttaccttgcgttcctctttctccgaaaccataagagcttggatgcaccttttgtcgagtgctctgccacaa

SEQ ID NO: 2234 - DNA, 1165 bp, Toxoplasma gondii
  source 1..1165: mol_type = genomic DNA
ttttgctggacgaggccgagggtggcttccaaaggctggaacacttggttctccttgcgtcgtctccccggagtgatcaagagggaaaggacctgcagcagatgtgaaggtgcctgttgtctcttttgaatctgctgggttcgttctcgtcacgtcaggtcttccactgttgtttgttctccaactgaagtctttcaacctgtctacacgcgctggcgcgaacgtgtctctccgtggctctggccgcctctctctagcgcaagtggccaggatgcgcttgtcaatattcgagaaagactaaaacacaagagcaggaggttcctcaccttggagtctatcgcgcgaagatgtgctgcgagtttctcctcccgcttacctgcacgttcacagttctgggatccatctggacacaagcgaccaggttattttccagacgcccaacgttagccaatttgcgaaatgcttaagcgccaatatagatgtatacaccgacatggaagagagtgctccttgggagaagttgttgcgacacaaatgacaagttcagagggtgaagatctagaaaatacgaaaattcaaggccttctctctggtgtaaactcctatcgctagctatatcgccagcgagtgttccaaatcgtaaagttgtccatctgcaaccacaaacgcgtatgtttacacatttctttgtagagatctctacagcactgctctgtttattacatatatatatatatatatatagacagtaagtatacgcagtctttatcggatgtggagatggctgcttggaagttcgcacagtctctctgtgttcagagagaaaccggaagacagtgagttggagcaaaagcaccatctgcagactgcatgtaattcgcaagcgtgtcctcttctgtccgagtcttcctttgatcttcggactctatctacacatctacatcgttttttcccgcgcttgttttcggatcagactcagtagggtgcgaccgttcactcctcgcgagcgtctctcagcaacaagctgcgtgtatggaaatcacttaatctatcgtcaaaagaggtggatagtgcgtgcgcgggtttcaagcgtcgcagccaaggcgggtgaaagtcctcccatcacatggcaaatgacggagtccacgagcactcacctgaatca

SEQ ID NO: 2235 - DNA, 1816 bp, Toxoplasma gondii
  source 1..1816: mol_type = genomic DNA
cgtcgaaaaccttcctcgcactttcacacagagaacctcgtgacggggatgcctccgctctgtcgtcgccgttctcgctgtttcctcgaccgcccgctcggccttcctctgtgtcctcgcgcttcttcgcctcgccactgcaaggggggcaagaagagctctttcctgcgtttgtcatgctgagaaacggctctcgaaaaggtttcctaatcgcctccttaggagtcggaatccgctcgcatgcgcctcttccgtgtgaagtgagaaaccgagtgaagcggcctttttttcttctaactcgtagggcgtcaagctcccccacccccctccccctctgctctctgttctcagccaggaggagagagtgaaaaggtctgggcaaggagcaggaagagctcagagctccgcacggaggaaacgattattggaaagcagcagacgaaaaagacgcgcggtgtctgcggagaggcgaggaacaagatagaagccgttcaggcatcgagggaaaaaggaaacctgagagagacgggacgggcagcaaacgaaagaagaggacaagggagaagaaagagacaaaggagcagacgaaagagataacaaaaagaacgaaagagagagaagaagaaagggatgcaaggtttcctgcacctttctggaaacgagaacgaagtgagacgtatcgccgggacaccgggaaaaaggcttgttgtgcgtaggagcagcgctgacgacagcgcgatgagaagagaggcctaaaaaacgtttgcaagaggaaacacaacaaaggaaggaaaaggagactcggacggatcttgagcgtctcccttcagaaaaaatcagttcccgatccacggcatgtcgagccagccccccgggtgtacgcacacctcgactcgtggtgctctccaagtctgtcgagaaccttttggagcgaggtaacaacggcgaatgaaagataaaaacagtgaaacacagagagaaacacagagagaaacacagagagaaacacagaaagaaacaccaggacaactttgcggaacagcgatcgttagtgtgcggcgtttgcatgcacaagaagttccgagagaagggcatgctagacaggtttgtcgctttctgcgccggagactcaccgagaaaacggcggagaagagtcgttttctcgaggacgaactccggaactccaaagacgtctcttccttgcgccgcttcctgtttctcctgtcctctgtctcctcggcgcctccagtgtgcatgtgtgtacagccagagacactggcgaggcgccgacgagaggaagagagagctccaggtttcgctgcgcttgctcacccttgtcagaagtcgagttttcgcctcctccatgtacacaaaaatcgcgaaaatcctcgggaagctttctgccagacgcttcgtgcagtcgctgcgctctctggacggcctgcgagcagagagacggcggaaaggaagccccccggcaaacagagtctcggtgggaggagatgcgcagcttctctccaccgtcggtccacgactttggaggacgtccatcctcctcggtagaggccaaagacgcgcttctgtcgactcgagttttacgcattagcctcgtccgcagctgtctgtacacctggggacagctgcctatgcaagagcgactcggaacgttctgtcgacaccgttgtaagtttgtatcacgctggaagtttttccttttttagggaggaaggtgaaggaaggtgagtgcagttgctgcttgtttttcttttccggggggagtgcagacacccgtctcttctcttctttgtgtcggcga

SEQ ID NO: 2236 - DNA, 2130 bp, Toxoplasma gondii
  source 1..2130: mol_type = genomic DNA
cgaacttgcgaaaattaagttttcaatggaatcaactgggaagaacaggcttcagcgtccactctgtgtgcttccgcattagtcccacaccaatgctacctttttagacatgtggcagtgcgtgctgccctcaatcagatgtatcagcataggtatctcgtttttttcgacctcgatgtgttccgtgagggtaaaacgagactctatgtcggaagggaaatgcctcacatttccacagacgctgcatttggctacagaaatccacggaaagcacaatcgaagttgaatccggtaggcaaagaccttcaaagatatctaagccaatagtacagctcgtagtatattctccccagaaaagccgacaaacttggttgggtatcccaaacgtagccgatactgcatctttatcgagcatcttgaaaacgtgacagctgggtcgcacggggacgcatgtgaacgcgcgtgaaaaaaagttcttccgcgcgagccgctgcgtgtccgggctattcggtgcaaattgatcttatggttggcgctctgtcgaaacgacagggtgagatattttgcagggactaacccaggagagcgaggccggcccacttagcgcccttcgtgagtgatgctaagaggtacgacatgctgggagtcgacgacgggtgaaattaatggtcacagaacgacgaaaaacgcgcaaaaaagagacgtgagacctggtcagcgggagcgaaacggtactggtgtgaagaagcggcgacgaaaagaggaacctggagacggaaggccactgcggagccaaggagaagggcaactgtgcattcaaggctgaagaggagacagacgatgcaaaggagaggtagagaaacggaaaagactacgtaaaatgggagagaaaatggtgggaggacataaccggcgagaacttcctggtttaagcagtaaatgggaagtcgatggatggatgcatgcaggggatgcaacagatacaacgatggactaggcacaaaggagacgcccagcgaagttgattcgccatgcggaaaaagacaaaggcgaaacgcgtttggcagtagagatgggaagtcgaaggagtgagtgaaggcaaacaaccccacgaacgaacaccctggctgctatgcgtcagcaacaaaccagaacacggaccggaatgccgagagacacaaccgggcggacggccacttactatcgagtgacagcttcttccaggtgtttccaagaacataagaacgtctcaagaaaccctctagaaagtcaaaacgtttcctcgaagagaagcatgtagttgagtggagaaagtcaaggtccgcatgcacattaagttaccaatggagagctcctggaggtcgctcgtcagcaatggacgaaggtgacctgcggctgaaggttgcaaatcttctctggagggacttccacacatttacctacgccgggtgtcccatcattatagccttatgtcatttgttatgaactggtatgtcatgttcggttttcttggggtagcgaatgagtagttggacacgatatttgtaccgcaaaggatgagcgacgttacatgacacgtaggccggaaagaagtgcctcatccatggtaaaaaacgtatacggatatattctgaagcagtgtgtctggtgatgagaaaataacaaggttgatgacggcttacgcatattccgtacctgaacgatgtaatcagaataccgagtttctccgagagcatcgttccgcccacgatcggctccatacagccgtccccctcctgcgttccagtccatgtgatcagggtttgcagcccttctgtgcccaacccctatccaagtcctgtcgatgaggcgtctgtttcgcacgcattcaactgatgtaatgtttcttgactttccccgtgtgaaatcctagtagctcagcaggcctacagttcctacaataaccctactcaaaaatgcgaacagcggtctttcgctctcttggcatcgtctactatatcctgtataatggccgccagtgcaacgccgtgtgtgtcggttttcatcttgggtggccagagccgctgagacgcacgtgcgcagcctgtagtgtcttgttgttcgacttcccccccatataaatatatttca

SEQ ID NO: 2237 - DNA, 2283 bp, Toxoplasma gondii
  source 1..2283: mol_type = genomic DNA
cttcggttgtgccagagacagaaaatcgctttgatttcattcgaagtctgggggcagtcaggggggcttgtgcatctttctctgcctccgcactccattttgagtgcgctcgtgggatgaaatgcttctttttctttcctgaccttccttgacctcagacgcttctttgttgagactacctcgcaatagactggcgcgtctctccttcacatgcactgccttgtggctcgggttggagtggactgagaaccccaattaggcacggcattttagcggaaaaaacaggatatatgagacacacaaacactgggaattggttgcatgtctgaagacagatgcgttcacaactctgcaagcaagatggaaacaattagaggtcgacagaactatagtgtgttgacagatatcaccgatgtgtatacatatccgtatttttctgtctatctatagaaattcaggtgtagatagacctctagttgcactctttgtcgtatcttcagctatctcgatctgcgcgtttacatatcagttacgctttccctttcgttggctgtcagcgagctgatccggaacgcatatccggatatgatgtgtttggccacacaatttaatgtctcggaatgaagggcctattcgtgtcttgctgtgtgttcatcaatcttttgtggagaaggaagagaagggaggagtggaaggcgcaaaggaacgaagcgaggaagtgccatgatagacgccgtggaaaagaccacaggagacggaagacagacaaaaccggagagacgaggttatagttgttcctctaacgcaatagagtggttcatgattgtcttcgccggagctgtgtgccggccgcatgttaaattcggtttctaagatccgagtattatcagaaaacgattctcaagtgcgttcgcgaccgcatttctcagtgtgtagagattaccccaagcagagaggctctgcactgactgaaacatctgcggtaggcacggttgtggtgtgcgcaggtgttcccgcagacacccaagctttatttttgtgcacgaaaactccgtgtagacaacgggtgtcatcctacgttcgcacgcctgccggaacgtgaaaagtgaaacaaatattgttgcacaaggaatctgtcaaccctaaaccgtatgtaaagcggaagtttgtgctggtgaacgtgactgacaagctagccgatgcattgtgacacgacagattgtatccgaggtcgtgcacggggccttccagattttgttctgccacgaattctgacgggtgtggctgagaactacggagagaggcatccactcgtttaaaaacaaacggccccacaggtgggcgcgaattcacctggaaagctgctgtgtgttctatgttgtggtcgcaaatagggcgagtgttcttaaaaggctgattgccagcccagtttgtcaaatgataaagttttcgtggaggcgatacggtagtgcaacaaccctaaagacattgtccgcggcaccgagctgctctgcagctgctcatcgtccaacactgtcaacgaaaaggagaaaaaaacggaaggcactgtggtcttggttatgtatcctcgctctatcaccccagagcgaaacctgcttcggccaccgcagcgtctatgctctccaattcaccccttattaatctagaaatactgagatccaagctttcaacgcccaaatgtttagttcatccaattcatgactacagttggagtgtgccgccaaaggaacatgaggttgggcagagaacgaggttgtacaccagcatgttttcatatgaagaaagttaacatcgattgtgactctcgaaaacgctgtcgtcgtatcatgatttaggtagctgcaccctgccgacccgggaacaagccggttaacagtggcactggtttcagctggttcatattttctgccatccaacttgaaaccaatacgaaaccttgaattttggtgtattgtttcctcgagtgcaccgccgttctgcacactgtcacggccagttgtgaagagattcactgagaatgaaaaagtgatacgaatatcactgaagtctgggagtaagccgaatgtatgtgtggtgattcttgcgttcggagagtgaatctggtcttcagcattcgagtcttgattttgaagggaaagtgggactctgtaaggcactgattctgcgaaacatatgattttcaggcattagaagcctgtcaatgaaatccccggacagtgttgctcagggtcaaggtcaactttttttcgcctcatactccga

SEQ ID NO: 2238 - DNA, 3275 bp, Toxoplasma gondii
  source 1..3275: mol_type = genomic DNA
cggctcccgcctaagcgatcactttgaagttgcaagttaaatcgttcacagggtttactgtctgctggccatgtgacacatccctcgagtcagcatggctgtcgccctctgtcacaattaaacctctcttgacactgatgaatgaaaagaaaccatgtgcatagacaaagcagaaagtatcaacacaaagccaaaaatctgggggtaacagcaagccaggacgccaacagcggataccgcatcagaaggcagcatggttcctggctgtcttcaagtatgcatttctatattctgcggagctcgcctcaagaggtgcagatagtcaactagagttgacgactcgtagttgacgatgctgtcctggtagatgcctgctgggtttcactgtcgcttagcaatactgttttaccttacggagtttatgcggctcgtccatcgaatgtctgttgctccgcgaatccagctcattacaacggtaacacaaatagcgtcaagtgcctcaaacatgatctgaattcaaaaatgtcgagacgagcgtaaacagctggaaatcaccgaacttaccaagatcgttgacatacatatgatgaatatggctacaacaacgtggagaacgttatctagtcctttcaatccctaatcgagataccggcaagatgcagttcctgttccttggatgatggtgttcattcctcacctggtgggagaataacggtaattgcaggatcacagcccatgaaatactaacaagaaggaatagctgaagtcccaaagttaaaaaacataccaaacggctccgggcatacttatctcaccaagctcgatagcgcaacaatactaaatattggactgcaggaggcattgtcttctcgatcgtaaacgtctggtgtcgcttcatgctcacgttatcatttcttgcaaggcgtattttttcatcagtcgatggtcatcaacaatcacctccgccatatcctacgatagaggagctttgtcacgtgaggaagcaaagtgcgctaatgcatgccacacccaccgcattacccgcgaaagtgcattcgaagtatggctgtttctgctcagccagcttgaaatatagaatgctgctgtagaacagtcctgccgtgagatatagcccccgactgccgtcccgccgagaagcatcgtggttctcacttaagtctttcagtggcgacagaacacgtagcgccgtggttgtccaccggtttctgctgcgtgacgcactgttttcggcctccagtacgttgatgactacagatggaaaacggcagaaacccgaaaaggctgctgcacatcactcgagtaaacttctgtaagtctctgtacaggatttgcattaccggcgaaggcaatcggggaagcacaggaaggtacggaagccaccgacgatatgagtgctcggtactccggcggtctgctgccgtctgtggtcatacgctggaacctgcactgggatttttatcctgcttttgcaagggcgagccaaattggtttaccatgccacagtacatttggtgcagaggaattttattaaagatatgactacaacagaaataatggatatttatttgcaactgcttcgacaggcagtcgcactaactagtctcggtctggaggaggtgagaaagtataacaacaccgagagcaactggccgccacgcgggtgccagaaagtccgtctcgacgccaaggatttccccggcgtcacttgtaagtggtttgggaacaggccgtccgatggtcaagactgcagcgcacatccacgcattccagatcacaagaacgccagaaaacagcattgtagcaatcagcgcagtaactaaatctggcatctcaaacaatgcttggattccagccaacgtcagcgaacgtcccctgcatgctatggataagaccagggcgtacttgcacacgctcaactaattacctctcgtacgaactggtgacaagatatcgcagcataccgaacgtaacaggcagcttgatctgcacccgacctcaggacgctttctggcaccagcaggtttcacataattagcgtgcttaccaggaagccagtgactacgacccacacagccgtcgctttcgtgaaaggggacgcttgcaaagtgaaggaggctgagactataaaaatcgctgacgaaacaaacggcaagcagtcaaccagaagaaaggaaactacacgaagtgaccttgcgagatataggacttttagccatccaaagcaactgaacacacaaacaaaagcgaatgcgaaaagaaattcggtgcttttggcgatatcccgaaaaacaccgtggacaacatccgtttgaagttgtgtggacgagacgaagtcagttgcattgaccctctctggcaggcaatattcgccaataacctagagcaggctgagagttgatgccttaaaaccgacggcataacgaagctgcgtaccagctgagaaggagagaagcggtgatccctgacaccgccttttccattggggagcttcacagttttgtttgtttcaactgagcagccagtctttaaccgtgcggatgatccgaaagccgtcttcttacctcccgggcattcgctcacgcacacggcgagtgccatgttccctaattcagggtagtagagaaaaacccgatctcctccgacggctacacctccacacgggtcagctgcgaacaggaaacatgtgacctacctcttgtacaacactcttgaccctcttaccgttcaagtcgtatggtgcgagtttttccacacccccatgactggcggcgtagtacgtgataagcaagcttaaagtggacagcagggtcattcctacgcagacgagagtttccactttggacattacggcgcgtttttctgccatttctgcctcctgctggttcagcgtttagactggcaattgtcactgtgggattctgtgaaagaaatcaggttcgctttgaaagttcacacgcatttgccactgcacctcgggtgtatgcgctgcccatccctgttagacacctggaagctcctgactgttgtactgtaccgatgagcatcactaaaaaaacgtgtttcactgaacagcttgcgttctcagtattcagctagtgtatttgttcatctcgagcaaagacgcgtggaaacacactgcagcagacggccggccctggggcccgtagcccagcacgttaaacgtaacggtcggtgacctggtctcgttttgacatctgtgttctcttccttgttccacgggacagaagcgggca

SEQ ID NO: 2239 - DNA, 4980 bp, Toxoplasma gondii
  source 1..4980: mol_type = genomic DNA
ttgctcgtgtcgcgacaaacacacacggataaaacacagacatgttcaggacacccgccatgaatgcatgcgtagacctgaagcaacccctagacagctgtacgtatctgggcagtgcgttgaaccctctgtcttggttatccttcctctgcctcttcctccaatccaaagaagttgtttttctctcgttgctcgcgactgcctcccgcatcccccccccacccaccccaacgcccctatgtgtgtgcgtgtcaggttttcttcacacagcagaagcgcgtcctcccaacatttgtttgcacgttttcgcgtttactctgtctgcggaacttgtcttttttttcaaacgaaacattcgcgtgtaccttgtgttgctcgagttgcttctggtctaggctgtccacgtacgtggcctcaagttcagagagagaaactttgccgtcgttgtctttgtcgatcgcctggaactccatgcggacctggtgctggtgcatcgcgttcttcaactttgcactccattctttcgcttcctcggtgtcgattgtgttgtcttggttcgtgtcgatgaggtcgaagagcgccagcatgcgttccttgatgtccttcacgtccatctgcatgagttccgcgagcttttctcctgacaacttgggcatcgccgcctccgcgaactgcgaaggcgcgccagagagtgcagagaaagcaaacgaaaaaaggaagagagaaaacacgcaaaggggcagagactttcggagtcggtgcagctcccgcgcaaggaagaccgcacccagagacacccggcaggtcggtctgtctgcgaaggccgccattgttttctcgagataagcgacgaaagtagaattgattggggggaacagtcgagagcgcgacgagaagaagatcagaagaagaggagaagaggacgagaaaaggcaagacaacgaacaccgccgaagcaaccacgttggagagtcggaaaactcgaacttttttgtgtggttgagaagggcagcaaccgagatccggtttcctgcagaaccagctaaattgttgaggcaaaagttgaggatagaagagacaccgaaaaagttcgagagaaaggagaagtagacagaaagaacgctgtgcagtgttcgaacaggcagacgagaggagggggggagaaaaaaactgaaaaggttgtctcacacccacgctcacccgcctcgccagccgactagcagccgccacgcgtggtggcttctcgtctcgtagaaaagacgaagtggcgcttgcgagaaaaagacaaagaagctcagacgcttaccccccgcaacttttttcatcgaaatcgcccgtcgttacgtgtaacatattgatgtgatggagcaactttggggagactcggccatggggcgcaaaaggtacctctcggcgtttgtcagaagccatttggatatcagttgcagaaggggcggtctagtgcctctgaggagaaaagaagttggaacgtttaaaggaaacttcctcagagaaaaccgagaaaaacacacagcagcagacactcggggtgtgtgtgaatggtgatgaggtcggaaacgctggtgtatgcacctggcagtaaaatcggagtcaccgatttgaaggaacctgaatgtcccatgacgtggaaatccaccatgttcagcattgcgtacttctaaagtcatgtgtaaacacgctgaacaagtcgtcgtcgctttgctcagcctctaggctatctgctggaaactacctgtcagagacccgcagccgcactgatggcgcaagcacttgcggtagtcaagtcacatgttccggctgtctatgcacagacagaaaggaaatgctcctgcagacggaaacgcgcacttagtgctgcaaacgatcccaccgctcacacaccaatttgcacataactccacgtcgactagacgtccgggcaatttgctaggcagagtaaaaatggagtcacccgtgcttgacagagaccgcaggacctttggggaagactctgaggtgttctttactgatgtaaagctttttaacttaaagcacatacccaggaggcaacgggacgcaccagttagacttcataagtgtgtgcttggggtgcttctttgcagaaaacgggatgcgcagcgtagcagcagacgaacgcctgcaaacagaaagagttcactgcgactgcacctccctaggagtttgtttctgcggacgcacaatgcaaatccttgaaacctgatctgcgttccgtaccatcgattctaattcaaatatgtgaccaagaactggcaatcgcattggggcatttcctctttcgggctatcgaagcagaaaaacgtttctcaactcttgaaaaagacaacacgacggggggtacgatagaaagtgacgctcgcactggttaactgctattcctgcatttacgcaccgccaaccaagagccagacaaacaagagaaagaactacctcaccagtggagagttctcttgaatgtggttggtacaccacatgagacatctcagtccacaaaagcaacgcatctgtcttctgcttttaggttagggttatgtcgtcgtatcaccaaaacggtaaaaaatggtgcatttgtgatctcccagttcacttaaaaccctctatccatggagaaaaaggtgtagtctctgcctctccacagcagagggaaaaaaacgtttgacaaccgcacaaattgagatttgaatcagcagtgtgtcgacgctcttgaagttgataaagcgctttctatactctcagcttatcaggcagcagcatacccaggcgaagcaaactcgctcaacgttttttgaaacgaatgactagtcttatattttgcaaagatactataatatctggaacaaaggatgacgcactggaagattcacagcgttgctttccgcagaggcacaaattgaccgggtaggtgttttggagctttcacagattttgatctacaaaatgctacacatgcagctcgcgggaaccactcagagaaaaaacaagaagcgggttctttggtcatccatcaaaactgtaacgctgcgtttctgtcgcagaatgaggaacctctgttcgtgacagaaacgcttgtctacgaggaaagagctttttccagccccctagtcgacccgcacactacgagcgtatctgcgaaaagaccctttgtcagaaacgaatagacggatgaggtgtgaacgaaacctgtagacaaatgtcgaaaccctacgtgcgttctacagcagaaacattacgattttagactggttgcttcagtggaacaaacctcccaaccaggtgccaggctgacaccaaaaactaaacctataaacatccgttcagacttccatgaggaaggcaacgccagcaatgaaaatggtagttgtacagcttgcacacaaataaggtagacacggtaacaacgctgacggcacagctgtgtgcagaccagattgggctctgtttctgacgcactggattaaagactttcgtctgtgcagggcaaaacaggcgggaagtcactctgctgaacaggcgacagcattgcgttgggacttaacagcccacgcagaaatccacttcttcgagtgtattgcttggacacgcgacttctgtgtgtggcgatttcctgtgtaccgcgtctcttcccgtccaggaatttctagaagttctgtttccatgtgcacttttctcgtgttttcgcggaccacccttcttttcacgggggaacagcagtggctgtgcgtgagaaacgcgaattttcgctgtcaaatcggccgagcagcatgcacccgccagcagctcgcgtgcggcgctttccaccagttttccgcaatagaaaagtgtcttcttccgtaaacgtttctgtcagattcgggatcggtcgctagaccgttttctgcgccgggtgtcgcctgaaacgacaagtcgccttctcgccgagaagttgaacatttttggactgcctcaggctgcgtcccgaacaccaaactctgcgctctctcgttttctggatttcttcggtgcacatcctcacgctgcttttctctcgtcgcagcagaccgacgtgcgtttccgtttctcgagctttgctgcatgttgtgtcgttccgatcgtcgtgaccctccttcgaacgactcgccgccggccgcctctcagtcgacgtgctcgtgcgtggctggactcgcaaaacatttcttcacgcgtttgacgatgtcctcttcacatcgacaatcctccgactgtccaggtagacgttctgggctcctcttgcttttcataggcgccgcgcgtccgcaagcgacatagtgctgtttcttttgccagtttgcggcgcgtttcaagggactggcgcctctcgaaggccatccagagaaagcatacgtcaaatccttttcctcaccgcgagaaaggtcgcgctggcggaaaagtgaagtttctgtcacagccgcgtctttggatctggtagagaatccagtcaaggtggaatgaagtaggcactcaggaggcgaacgcttcgtcactcgtcgccagaggagacactcgtcgatgcatgcgcgtttccctgtttctgcgaatccaatcgaggaagcgcacctgccctctctctctcaccctctcaggcgacttgtttgtacgtgtgaaaacgtccctgttgcgcgctgtgtccgacgacagtcgcgcggcatgcctcttgctcgaatcaacagagcgttcttcgtctgtccggaaagggtgagactcagtctctgcgttcgcctgacacctctcgaagcctcctgtcgctctgccttttctttctcgtcagagagtccgcctttctcgacgctgcctccagcttgaagagaacagagaggacaagttctggatcaagaccttccatcactgcgactcttccagcgagaactgtggagctgtttcgcgtacacaagctcgtctcctccgccaccggcgagactgacacca

SEQ ID NO: 2240 - DNA, 1673 bp, Toxoplasma gondii
  source 1..1673: mol_type = genomic DNA
accacactttcccgcgactgcgcagatccacagtgataccacgacttggacatgtacgtatacagctgtttacatacacacatatacatatatacacatatgaatttatgtgtatatatacatatacatatatatacatatacatatatatacatatataagtatgtaagtatgtgcttatagacagatagatattcatacatttttcgacggaggcatgcgcactgagatgcgatgaggcgagcgcctggctgcgaaaaataaaaaattggagctgcggcgttccccagacgccttctttccttctgtgcgttttgcgtccgcttcacgtcgaggcgtggattcgagtgtcgtggaagaaagtggaagcctttctgttttccactgtctctacccagtcgcttacctcgcatttcatccatggttgctctcgtcgaaaatagaaaacagagcctaagagacaccgaaactctggcaaaccgcctgaatggtcctcgcctcgctttgcgcttcctcttgctctcgctcgtgtcttgtgcgtcctgttgttatcgctcgtgttcttcctctcgttctccgcgagccgcgtggaaaacaggcgaggcaagctgagagagtgaaacgctggcgagacgcccgatacttctgtacgtggggtgtatgtccactggagtgtgtgtaccccacagaaagggcagggaggaggaggcgactcggggaagacggagagttgcgcaagtcgaggaaaaacgaaaagttgggagacaaggctccaccagacgttgaaaatactcacggagaacagctgaccggaacagcgtgcgtacacgactgcagaaaggcgagtgcagggtcgcggagacaaacggtcctgcccttggcttccctcctgcagacagtcgtgctcgactcggagtgtggaagaaagcgacgacgaaatcgcgcatgcagatctttgcacgtagtgccccagctgtcacccttccgtgaactggccgaggcaaaggaagatcgccggcgacctgctctctgccgtggaaggccttcttctcggactgcaggcgtcaaaaagcaaaccgctcgaaagacaagcaagtcgtttctgaagagtggaggagcacgcagtgcaggggcggagaacgaaccgagagaagagaaggcgcgcagagacggaggaatcccagtctgcggtctgcgtcttttcgcgcaactctgcgtcttcaggcaatttctgggtgccttctcggcctccccaactctgcgcttgccaaggcaagaactgccgcggagaaaaaaaaagagacaacggagacgatggtgcgcgcgagtcgacgaaaaatcacgagtgtacagagccgtcgagatggaggtggaagcggcgaaatccggactctttccacgaaggaaaacggagaatctgtgaagtcaacgcggaaagaaaccgcaggtttccccggatgaaaggcggaaaagagccgcacagggagcaacgagaagtggaaccgtacctggccgcctgtgcttcttgccccctacatccacgcctgttcagtccagctgagttgggagagacaccgagtctctggagcagagtttgcgcagagaaatcgagcgtgaaaatcaattcaaagtcctgtttcgaaaaaagtttgccgcgacgtctgccgagagga

SEQ ID NO: 2241 - DNA, 3221 bp, Toxoplasma gondii
  source 1..3221: mol_type = genomic DNA
cccgaccgttgttcggccgttcaacatgccgtgacgtgaaacggttcccgttggaagcgagtcacgtcaaaacccccgtgacttgttccacgctgtacagggagagcttacgagacagaaagaacacaaatgaattttttctgtgtgctggaagataaactggctgggcatgacttccataacgcagctatcgtcaacttaggtcacccgcagaagtgacggcggaacgtgccaagcgtagagcattgatagaacgttgaggtagatgtaggagatggtattctttgttcgcttgcacctatgttttttgtttcttgcaaaatggtagaacgtgcagacaactgaaaggctcccacagattccgtcgcccagagctgttgatgaagtgcctgggcaggactcccgtaaggcaactatcgtgactacttagactacttgcagagttagcaagaccctttagagactcgtttactagatttggtgatgaatgctgtccaatctgttctgtattccacggattatctgcagcgctgtttacaacaacccgtttcattccaaggcatggcaagccacctctcgatcctggaatagctcaatatgtaccatgggtgtaacttggcgcttttagaaatcatcatagtacactgaccgttttccataccagtttcacgtcgattttcaatcgaaatcaacagcatcacttcagcttggatgtggcctcgtatccgtcatcggagactctgagaggatgagaggaaatggctggcttggttcgagtgctcaggttcataggcaccacgcaaatcaatgccaagtgcgttgttgttacatcctctcacaagtgtaattccgaatcgctggtgcaatatatctgtagcaacggtaaattggctctgtttcgctcctgtggctgcccagccgtgtcatgtgaaacgtcttagtgtcatccatggacaaccggcattgagctgccggcagatttacagaaaaccattgtggggcttcgtgtagcccgcggaaagttgaaatcatatgctatggtaatttctatagttgtgcagctactccaaaacaattaagaaagcatgcccagacttccgtcggcgacaccggcaatatatatatatatatatatatgcgatagttaaactgctggtcgagtctaaaacgaccaaatgccttgcttgtttgtagtgtggtacacgcggcgtggcactgccgcatggagcaccacaacaacagatgaaatctgcataagtgttcatattttcggatgggagaaacaaaatagacgccgcgattaccaaacggcaggtacagcgattgtgttgctgccggcgaacttgtaattcggtactgcctcgggaacaaaggcatgcagtgtggtagggctgcgctcccacgaatccgcgaacttcagttatcggcgtcattccatctgcaaggcaaaaaacctgagtttatttcggcagcaaaccgtgtctcctaacagatcgacgagactccagaagtaaacaagaaaggtcctcaaactgattttctgcacgctgtctttgcctcattgatgacgctggccgcggatatccccgacgtctcagtgtcagtcaggaaaggcattgcggctggtgaaataatgcaaagtgctatggctccagacatcgtgaggccgtgcggctgaagaaaacgcgtcaccagatccgccgctttctgggtatcgatctctctggttttccaaggagctcctacgtgacctgcacaaagagaaggcaaaacggttcatctcagcattgccataaatgataagtctcgcttttcgaggacaaaaccgacacttccgaggcgacattcttaggtgcatagcatgatgctacacttgagactggacgagaaaaggtgctgacctaaatggggacgcccaaacgcaccaaaccctgtgactctcacttcaccacaatagccgttaataaggagaaatcgtccatccccacggaacccagtgatgcaccgaagcgtcggcaaacctgccggcttctttaagggacgttgcaaaaagtagcgtttgatgggtgtcttgatgtcggtcacaaagtgttgaataggatccctttaagggacagaaccaatacacgtacgtcctctgtcagctgtatgcttgcctgttcatggagcagcttgtcctgtgaacgctttccatttctaattctttcagtcttacccgcgaactcttccagaaagcatgcggggtcaacgccggtaagattacagtcgaagccggcggtctcagcaacagttgcgctggtctgtttgaactcgtcggactgcgtcagcatcgctaaagggatctgctgcagaacatcgcgcactcggtagttgtccgtgtcgccaagcagttcgaagagcataccggttggggacccgcccgaagcgaacaagtcgacgagatcgatgtcttgcgcggatgacgcactggtcaaaccaagcaaaaccacgaggacaagagctaaaactagagccatcttgtaggctgactttgaatgtaaggaggcgctgtccttgacagatgtgcaaacctttgcggaaacgtgttggacacacaggaaattacctgacgggaggaggtgtttcgtcgtcgacgcaggtgttttgttacagctattttcgggaaggtgaaagtggatgaaactctgtttcaccgtcgacaaatgcaggatttgaacgtgattctagagtgtgctggttgctggctgacacagacgaaaggtccgaaacgcgatcctatcctcgcttggcatatttttggctgcctgacttggactgctgcctccttcctagattaccagttgagtaatttgatacactgccgcggatagatggaaacaggtgattccctatgtatttgtttgtctgtctgtagagctatcttgccgcagttagccatcattccaggcatcacgccattcctagtacccgccttgcgccagtcagttgaaggtcccagatgggccctttacatgtttcacggcacttctccgagtaaactacgtttacccccgtcaccaagattccttttttgcaaattgaaacatcatcctattaatgcttttgagaggtgtacactgccgcaagcgtttgccgtattcttcggttcccaggtatccggttgtccgtctctacaggttcccaacacgtggtcaactgtctggtttgctatgttaacacca

SEQ ID NO: 2242 - DNA, 3373 bp, Toxoplasma gondii
  source 1..3373: mol_type = genomic DNA
gcttgaggattgcaagttatcgtttccgtccgcccaccaggatgctgctgctcgcaggatagtcctccatgttgttggtcttcattccaagggttcctcgacctcgttttcagtccaccaccacatgagaccgagcatgtactccattcttcaaactgaccgcaagttgcattaattggacacggtgaggtattacatgcttcctcctgtcgtagatctgtcccaggccacagtttggacacgagcgattcgtcactttctccgttctgcgaccccagtcctggtggcagtgcgtttctcactcgatgccgattgccaccgccacacgtgacagtgcagtcgctccatgcagcccattctgggggagttggcggtatagttatgcaaggagcaagagttgcttcttctgtctgctcctgtaacaccggcggatcctgattttcacaccgacggcctgccccctggggtggtgggtcattgtaacgcgttcgctctcgcttccttgtggcatttccgcaagacgcgctccaggcggaccactctccccagacgccacatccagcgtcaacagcacatacccccgcactgcattcacgaatttcttcaagtccgccttgttccacgcaagtccttcccatgggcgcagggcagtccggacatgttggtgttccaggttgcggagcagaaacctcagttcgcgtcctgatttggcttccgtcaccgcaggatacactgcaggggctccatgcggaccaatccgagcaaatggcatcctgggggagtgtcttacaaacctctttaagcatcggtttaatcgccgtcgcgagctgcccccagtcagcccgaagatacaggggacacggactgtcatcatcgctcgtaccactgcacccacacatgcttcggcactcactatgtttgacgtaatgaccgactgcaaggactgtgacgatgcctccaagctcacgaatctcctttgccgctctcacggtgcgaaaatcagaatccgattcgccatctgtcattccaatcactagcttcggcacatgttcgcgtcctgggcgcgaacctgtaaacagaatttgtttgcaggccttcagtccatcactggtgttggtactgccctttttatacggcatgtctagcaccgcatgcgccgcgagctgcttgtcaaccgcgttcggactctgtagatcccattgcaggtgaacgtccgtcgagtaagtaacaactgcattgttaacttcttctgggccaatgggcaacaccattaaaaaggtgtggaggaactgttttactagacggaaattctgtattcctatgcttccagacgaatcgataagaaagcaaatgtccagctggttggtgcacccctctgcggctccgatggcactctcagattgaatcacatcttcaacgccttcaggaacgagcacacacatatcccacaaagaacagcgacaacatgggtataatcatggcatatgcggccactacacgcagcagcatgatccctctgtgcgtagtcacctcgaagtcttcgccggtgaagtcacgaaagttaaaaacagaaaatacaagtctcttgggggaggacgccgactgcggctccacggtaaataacttcccatacgtctagtgcgggagaagccaacatcaacaacacgtagctgcagaagccagcaaccacaaaacatgctgaatgccgtttactgttcaagagagactaccacactctccgatatacaatggctgctgctgcccatcttcgaagagagggagacgagacgctacgagatacacaatcgaggtacactgttgtcgtcaccttacctgaagtatcgacaccgtttgcgtcgcctcctcgactcgtgtcgtacctttttcgtaaggcatccacaatactccaccctccacctgccacttcgctcggccacatccacataccgcaagcgaacatcagaccgaaaacggcctcgcgttggagtctcattgtgaaaacaactgcagcaaatgtcgcgaggcgaaccaaacaaccgaagtccacgatcgggacgagcacccaaaatgagagacgccaaagggcgggccggaaaaaacaaatgataaccgctgaaatcgagtagacgacgttgcacctgacaaacgaaactcatgagcacggtttcgttattcgaacaactcggcataccatgcggcgtcgtctctgaaatcgacgtcgcgtcgatccggctgtcacactcggccttggcgttgcttgcagataaagctggacggtcatttgagacgcgacactgctaagaggaactgcagaaagcgtgcgcacatcatcgttaatccctttttggcgccagcagcctcagtttctccaatgctgagtgtggtatacgtcgtcgttgagttgcgatttaaggtcgctctggagaggacactaatgaagaacagcattgtcgaggtagactgcagatacttgctaagcgtcatctcgaataagcgtattgttatatccgctggtccctaggcgagaacgtggtcgtcattcagatcatgcagaattttcccgtaaaaaaacaactgtgacgtcctgggataattttcttggcaacggtttttgtggggtgcgatgtctatgatacaagcataagcgacggcacggtggtgggcaacaaggaggagacgaaaggagagtaacacgggtacgtactcaatgtgggatttgtttggctgtcggtgtttcgtagacctgacaggtgactgcacaaaagcaagcgctttcgacgctgttgtaacactggttgagcgcgtctgcggcacgcagatgactgaggtaactttctgctagttttaggcaaatggcaaacttgttattttcagtttctgcgttacaaaggaattatctcctgtgggtagagtgtcttaaattacaagttttggcaaagaaagcgttgtggtgaagcaagcgagcgctcttttgacataacgaatgtagtcgtcagcttgtacagtctcatttagagttaatcaatctcactggcacggacgaacactatgcgttcaatatagagtgctcgtgtagcctatgaagctagtgtacgagtaacagtgccggcaacgtcgctcaggaagcacgagttacattcaactactggttaacagattccttcagcagttgtctttctgcatgtcgcaataaccgtgctggctgcgtcgttattcaccacgaagtcgtattcggcgcagagtcagaactgctgaacgaacgtctccaacaactgcggatgcaagtccactcacagcaggactcgcgtagcgctgacggcctcccacacgacccgttcctggtgtaaacttgcattacggctttttttgacca

SEQ ID NO: 2243 - DNA, 2025 bp, Toxoplasma gondii
  source 1..2025: mol_type = genomic DNA
gcatatctctgtacaaatcggcgttggtggtctttccctctgtcgcggtgggcgcgtccgttgtgacgtttttccgcttgttattcttgtacgacagaagctatgaagttctgctgtttcaggtattggtaatatcctcagcgccctcagctttgttggaacgctttatgtctgcagaagacaagggggctttttccatctcgtctaacgactacggtggcgctcggcgccggccgacaggaacactgggattgcacagttttctgaaatgaatgcctcttttctctcataatgtgtgcgtcggtatttttggccacatggcaagagttctttcactcagcggtctccctcacaaccactgagagcttttgcgcacacaaaatcagccgtatgtgcgtgggcatctatggcactgtgtgcgccctgggcagtgctcctaaatgacctgtagtcgggagttgaacacagagggtcctgccaaagaatagctgtcttgcagagacggcatgcaaacggtagcttccgtcctcgctcgccatgcgtcgatgtccactttcgtcggctgcacggtttctcaccacttctttttcaagggaatcaaggctgctcatactcgtgcccacgactgagcacgttgctggttgtacacgaaccagaaacagggcctctgccttgctcgcgtggacgcgttgttcgtgtctctcctatttctatttctggagtcgttgcttgcgacgaggcaccccgtttgttgcccagggccccacagtgtaggagataatacttggtcgatgttttccaacggtggagcgctgtctggtagcgacagaagcgaagtgaggttgagagttctaggatatcggaccactgcgaagtccctttatctgcgatgagatgaacggttccacgttccaatgtttacccaacacacctcgcttttccagttggcttgagccttccagtcatgatctgttctatatgaatacctacctacagcagcagggaaacgagctatttatcatgcgagttgcagtgtttccgagtagcgacggtcgccaatgtgtctgcaggtcactttacgatagcgtcactttgggccacgaactctggaaagcttcacggtgcgtggaagccagcacacggcccgtctacggttaggtgaagggacctgcgtactacaagaacgttcgtcttgctattgagaacattgagagccgggaccgtcttcgaaaaatgcaagcgctcgagcacaatctgacaggtttctttttttgcctgacgggcatggccaagcagagaaatggtgcaaacctcgtccgccgatgaagtgcacgtacatagcagtgtcgcagaagcctcctcgcatgcgaaacggaactacctgtaacgtatgtgtgtccaggaagtaccagaagtgacgtcttttggtgcgtgtcacaagcagtccacatcccggatggtgttgccgagtgactattcgcgttacgctgcgtgcctagagtgtacagatcctttcagtgcctagcgcctgcctgctacttaagtgtgaccggtcagtttcagtctttacgcaaacggtatacagcaaccacagcagttttacatccatgaaaagttggatgccctaccgggatttcacccattcgcggcagaatgcctgggcagcagatgccgcccctgggtattcgtctgctcaaaattcgcgcgtcgcaaatcccaagtccacctgcactgacctagatcattctcggagaaccacaggcatctgcagaattcagaaaacagccgaaggttcacagatccagtgcggtcaactcgcgacgtgaagatgccgtttgcgaacggcgtactccaccttcgttgcccccaagtgccgcccacgctgtggccagtcgcgagaagcccagcgtattgaattgcgacgcacaagacagacctgccaggagcggcagcgattcgatttgagtcgaagaaggtcgcaggggaacgactcgaggttgtatccgttccacggccttttcacga

SEQ ID NO: 2244 - DNA, 1559 bp, Toxoplasma gondii
  source 1..1559: mol_type = genomic DNA
cttgttcggcttttcgcatggcgatttctcgcttcagcttgtcggcacaggcgagaatcggcatgcctgtgcagtggaggccgaggggccagagaatgtttttgccttgcatgcgctggaaacgcgcctgaaactcggccctgcacaaggtgaagccatggcccagatgcagctttccattcatgtacggataggggaagctgcagaaatactttttcttctcggcatttgccgcatccaagggcgcgtcgacctcgtaaggattttcgcgggcccaccgagcctgaatcgcctcctcgatgctaagaagcttgtcgcggcgaccacgcgactgaggcgctgctggagctgctgccattttggaagaaagtccgcgaaaaagcaccggaagaggcgcggcagaagaggatgcagatggaggagatcgggagagaacggccgggagaggcagaggcgctctgagagaggcaagtgaagagaagcgcttcggagttggggaggggagactcggagaagcagccgaggaaacaaactgggagacaggctgggacagagccaggagagcgcggcgcagccgttcgccggaggggatcgacgggaggtgaaaacggtcacgaacagcttcgcccgcagacttgcatgaggccattcaggtgaaagcgagacactgaggaacatgcagagcaccgagaacccaagacaaggaagcgtcagggtgaagaaagcatacaatccgcggcggacacccagagggaagaggggagaggctttatggcggacgcggggacgcaggacagaagagaaggaatggtggaaaacgagtttatgccacagcgatttgtcaagagattcgcagatttgccgtggggcgaggacgctgaacggtccaggccttcaccccgacgaagagacacggtggcgacgacgggcgttcccgcggaagaagagggtcccctggggaggcaggtcgtatgacgacggacagcagaagaaccagccgcagggaagaacgacaagatctacaggggaagaagcgaggaacccaccatttctgttccactagaaggcgctgtcggccccagagaaaatcgtcgtgtgtcagcatctgcgtagacaagatgagacggcgggccgcatgcgagaaaaccagctgtgcatgccctctcgctctctaaacgcgcgacgccagctcgctcacagccatatgtttatgcgcgagtagcccggtttgagtttgcgcggtggccggttctcagtacggacgggaagttcagcgctgggaatggtctgccaatttgtataataaaaacggcaggataaagctgggacgcggcttacgcgaccagagaacgcgcggacgccgaacgtcaggtgggtgcggagacggccgccgcgagctgttctcccagttttcgaatgttctgcgggcgtcgcgaacccatttccgcggcgctttccctgatgaagcgtttttgacggatggaaacggaacgtcaaggctcaagagcaccgggaacgggataggtcactgcaggtgtcaatcttctggaggaagcgga

SEQ ID NO: 2245 - DNA, 3720 bp, Toxoplasma gondii
  source 1..3720: mol_type = genomic DNA
acacgagtagtatgcactggtggagagaggatcgcacgagagggagtgcctctcgaaactgtcgtggcctgcgggtgctgtcctgcctcagggccgacagaagcagcgtgagacgcagagggcggaaagtgggggacaggcggcggacatggaaagaccggaggcgggggagggccagatgcatgctgtgcggacatggaagcaacaggcaccacgagatgagaaggcggaggccggggagaagcggcggaggaagaggaagaatgaactgcatgtgcaggagatgacgggaatgaaggaccggaatacgcggccgatggtgacgaagaggtgaataatggagacggagaggaactggaaacaggcggaggcagaggagaggtaggaagcactgacgagttcattcctggaagcggagagaactcaggacgtggacgaactgcgaatgagggcatccagctggatgcacaggggacgtacgacggagaagatagggatggaaacaaaggatccgaagaaggggaaggcttagcagcttgtgaccccgacgacacgggggtcgcggcttcgcttgccgacagcccgtgtcgccggtgagaagaggaggaaacaaatcgccaagagacgcgcgcgacgcagtgtttggaagcccgaggggattgagaccccccattagcggccacgggagagaggacggggaagccggaggagacaggtgacgcctgaatcggcagcctcaccttcttgccaatctgagagaccgagaaaccaggccctgttgagtcctcgtctgaccataccgtgggcgaacggcagagacaggatacagtccgctggtggtccctcagcgggggtgctggagaagaacccacagcgaagcactgtgtaggcaaggagggcaacagacgacgtccaaaagatgtgggatgattcccgtaagacgcgcaaccgcgacacggcaccaggcgacgcattttgaaagagtagttacgaaatcaccagagttctgtctagaaggcagaaaagaaagtcatgaatcgaaagggaacaggcctcgctcggtcggcaggcgcccctacgccacggcgaactttatggtgtctctgcttctgaattgagacacgggacacaaggcagtgagagacagggggctcacggaaaggggagcaaagctccacaagatagaaggtaagagtggatatcgaacattccgaatattcaagtcaacaaatcagagaaggggatgttttcgcagagcgccgtcatggcaaactctcgatgatggggctgacggggggactgcgacacccaacacagcgggggcaccctgactcggtgttggaggcggatgggttactcaaaaagaatgagtcattcactgcttcgaagacacgataaaggcggttacaatactcccaccaacaagtgtgtatcaacggcagatcacggtcggaaggccatccacggtatccgactcttgggctgcgggagccagtcagacacgcgagaggaggccctcggcagcagtgacgaaggaggcttcaagaatgtagctgcagatgagaagtgactacagaggaccagttatttctcatggggcaagtgtgcaaggaaaaacgccagagaagttgccggcaaatcgcgttgcgctttcttagcgttttttttcgaagtctcgctgcatctgtccaccaacgcctggctcgctgcatgcaatagaattgcagggcatgtgtgcgtttcactccgatttcgcctgagtctccttcattttgttaaaggtacatgcatttccctttccaagtgcaacggaaattacatatgctacatgctgtattgtaactttcgatggaatcaacgttctgccaaactcagaaagaggcgttccgtgtcaagcggggtttcatatgggttacagacggggaaggaccctagcgacaagcaccgatatccacgggcacgccagctgagtttgtaagcgtcggagtcgagcagcacggatcatcacttttcatttcactctacgctggatgattgatgtctcagcagtatgactcgaacggcaaatgaatggggcgcgtcgtacttggtggcaagaccgttggtgtggagtcgtctgtaacgcagccgcagtgtagttgtgcactgtagttgcgcactgtagttgcgcagtgatgtttacacctgaacgtagccacgtcatgaaacgagcacaagcggctgaatattagtaaatcggcaaacgaaagagcgtgtccagaaagccggccctgatggctggtgccagaagcgcagtttccaccggacttggccaacacagaagtcccagttcgactggctgattagaatgaacacaaacactcctatgctagtgcgggtaggaacgacgctgacctttcagtttgcgtccgagcaagatccaggtgggcgtcctaggagaggaagcaaggtcttgaagtgtccggaaacgtccctcagtttgttacgaacctgcggaccggttctgtttgttggcccatagcaattagaacttttccacagtcaaatgggtacggcatctgacagcctcttgagatacattgctgttggcaaagtaagccagacaggaactccgataactggatggttgtactatcagtgggagtggcgttctcctgcgtgacttcctgcacacactgcaacctcacaggggacaaggcgcctacggggggatcgagtgtttgtgggttccaacgcgaggaatgccatgaaattttcggggcaattattggacgcaaccacgttaatgatacatattgggtaccgtgtccgtatgtttgatgtgaaaccaatcccaagtgcttcaccggcgtacgtggtatagacggagagagagcaaagggggagtcttgccggtgaaggctctacgaacgccacctactcgggcggtgctctggaagttgaaagatcgatagccatgagcaatgctagcttgctgaaagccaaatggttgtggctagtttttctgtgttcgtgttataatacttttgtcacgttgttacccggcccaattccgaatgcgattttacgcgagacaaggccagatgccagcacatcggccgcgcttcggtcgtgctgccggataaacggctcgtaaaaaccgaggtgaggctgtaatgctctcggtgatactgttcgtaaaacctgaggggttgctctaaaagagcggtctgggcgtatggcgactaccgtcgcaaagccccactccatggaaacgtacgaggatagcggctcggcgttctcggtgagacgagtcttcttttctctgagaactcagttaattaccactttgttctctcgtaggcactgtgcgtcaggctgcgtggtagtcttgcgagacagaaacgacgatcgtcattgattgcgggacggacaagaatgcatccgtgtgtgtatttgtcttgaacagttggcagcagatggcctccgcccaatcctgccatgacgtgatattgtttttcctacctggtcgctcagagtaccgctagcagtcgctacgtcgacacggccaatatggtcactgatacggggatgcgtgccggatttcacaactgaagcactggctggggaggcgaaacagcctcggcgtctgaacacttcatgacaatccaccactatttttctgctaaagaacatagcatgttacaaaaacaaaggcgtggcaagcatgagtgtttctga

SEQ ID NO: 2246 - DNA, 2065 bp, Toxoplasma gondii
  source 1..2065: mol_type = genomic DNA
ctgagggactccgagggcgattaggaagtaacgtgggttctgaaaataacaagagtgtgacgatcacggcaccgcacgattcgagaggtagccaagagagcctgcttgctgtatgtggcccacagtggactgtgggtgagttgacgggtaccgtggtgtcgccaggtgagggtaggggtctgtgtcttccctctccaaacagtctactcaaacgtgacgacttgtcgctcggaggtgtgaatcggggtgtgatagcgtatggaggcacacgggagacttccgaggcacattgtcatttcaggcgagcactcgattcagactcggcgggacgattggtcgcgcagtctgctgccgtgatgggaagtgcggagaagcatctctgcccagttgaaagggcgcaaggggacaagaaaacgtgtctgcgtaggagcgagagatctccgatgcgtctctctccccaggaagcctcactgaaaacagcgccgagcagcgtatcattaactgagcgctgaggcgagaaaaactggatctactacgctgaggagagcgatcagtccagagaacgttcggtgcgtccgtaaggccgaggtgtgttgagagctcactactgtgatatgcgcttttttttctcttgaaaggtcaaaagtaccaagaagctgttaggggcacccaagtgggggtgggattgtcttgcagtggtacaggggtaaccacctccccccaggtggtcggtttcttaacattcggggaagaacgtcgttcccaatatctgtgttacggtcagcgcaccctctctgtcaagctcaagcctggtcacagaacctgtgaatgttttgaagaacttaaaaccgcctggaaatgtcgcagcatggttgtcgttcaatggttcacacatcgatggcatacacactatcgttaaggagagaagcaaaatcgtcagcatgtagggaaaactgttacgtagttgtcttcaacgggaacaaaaacgtgctacgccttcagttcggaagcggtaatgcatgggcacacaatttgctggctgatagaggcttcgtcgtaggggagtgttgaacagggaaggaagtcccttgttgacgtaggccacgttttcggaccggggcaggattgaattgattgcagagggtcattgtagcgaaggcaaggctcacattgacacccagtatctatgaggtgtattttctacggagcagagaaatgaactcttcgttgcatcacacactgagttttaaatgggtgcttcgtctaagaatttcagaaatctaaggtatgtgcaacccggcacgaaagcagtataatatttctgtcggggagttgcgatggaactgcgcaatcggagctgacaatcttgttgacatacccagctcttctggccaagaaaagtgtctaatgtctatgaaaaacaaggatatgctttgagtttgtttaatcctgcatgcacatacttcaaggatcgtttcttctcgcgcttcgaaactgtctgtaaggcattttgaatgagagacaaagtattattactcagatgcgactcagccactgcagtttatcgccttacagtcttgcacgtcaggataaagtgagatccacgtttatacctcataacttgttaaacaaccggtctacctcgacagtttcgaacagccgctgagtagacaattcaacagaacgggatgagcacaccacaccgaatcgtgacctctcgtcgcatagcgccgtggccccaaaaacgcggcacgtgtatgcgacgcggagacacacaggacccagatgagacactggtcccacgcagtggtaggcaaaaccccatgttcgactgtcgttcgagaaatataacttttcgtaaagctcaatttgctaatcatagtcggaacgtgtgctgtcggtcctgccgaggccagcgctgcgccggctgccacgctgtcaggaagttccgcagtgtcgatgcgacggcgaaccgtccagaggtcccttttgttcacggtattttgttgaacagcgttattgattttcaggttggaatttggacgctgaaactgtttgatcaaga

SEQ ID NO: 2247 - DNA, 4340 bp, Toxoplasma gondii
  source 1..4340: mol_type = genomic DNA
acttgacactgcagatcttgaatgtatatttagcttgacgaacgacatcaaagcgagagctgtgcacgcagcgcgtttcgggcaggctaaacgacgcctctcctgcactgaatagaacccacgatttcctaatttcctctctacaatctctgaaaacacccgattcacgctgccattctccttcgcacgcggcgcctcggtcgacgaactacgcggatcgctgcacgcctcgcaacgaggctcagacgcagtgggctacgcggcgggggcactgactggactgttcggcgatgcttttgacatgctcagcagggaaggtgtagtggagggtgaccgaagtgagtggagggtaggcggagacggccaagtccgtgaagagccactcttttctggactggaggagaatgccgacgttggcaaacttgccgtcatttcgctcttcgtcggggaacgtctccagtttgattccgtcctttcgcataaggtccgcgagccccgaaccgagcgcgcggacggtttcgtcgacttgtgcgtaggtagtgtagtcaaagccgtcagcaatggctgcacttctccgttcgccaatgcacggcttctcaggccctgcatgcgcggacactcccaccaagaaaatgccgtacgcgctctcccaccagtcgtcgtctgtcaggggatcgagaatccgggaacctgcgaacgaagcgacttgcagatctgggtccaacagcgttctgtaggagctctcccccaaaggcatcgggcttgcggagtaagccgcaaatcccgtagactgccatgtcgcgctttcgcccggacctgtaaaaacggggagacagcgaataaaaaagagcacactcgtaccccaacgccgacatctctggattctcaaaaacaaagcaggaaccccaatgcacgtccactcgcggctctctgaccggcggtcccgataccaggcttgtaggacaaagaaacacatcgcaccatagaacgcctcacgggcaccagataaaaagcggaggagcgcgacgagcgtgcacatgtgcgaatccaactgttttcttacggacgcggacctactaacgcacgttttaacaaagtacgctaccgaatgagtcaactgcagacagtcgctccagttagcggtgagcaacagagtgggtctgaccacagaaacacactggatccgcttcagcagccgcgcctcgaaagagcacgattatgtgatgaactcttgcaggagacaacgggggggggcgccatgagtgaaggctgcggaaacacgctggaaatttgatgttgaacggtcgttcgcacgggaaaaagctgctgcccctccagagagaaactagcattcatcgaggaggctggaggagagccctccttgaagaaccgacgaggcaggtggcaaatacgcgaagaatagtgggaaatgggtgcgcttttctcacagttttacacacactcttttgtcaaggaacaccccagacacacccgagctatggaagccagctggccctattttctgctgcagggtgaccacccgcaggtttcacgggctctcctacagtttcgaatgaatcaaaacgtccgaacacgagaaaggcgcccattcattacctggactgccaacaggggtcgcgtatatcatcgtgtccagaaagccgagaggtttcctgcgccgagtttcagaacatctctggaaaagagactctttttccgacgttgctggccggatgtccacaagattgagacggctgcactcgttgacgacgcccgaggacgcggaaagcttccacccaaaaaccaaacttaccgcgtcaaaagcgtgcttctttcgcgtgacgacatcccccgcgctgagaaaaaaggttcgcctgactctagcgagttgcgtcgcgagcacggagtagctgtcgccgcaagaagcacgagcgcccgagacaggcatgcttatgtcactcaattgtacagtggtcgtgctacttttcgcacacggagcgcgcccgcctgctcctcaggatcgtttgtgtgccgccgcacaactggcgacagaacgttgtcggggtaccctgggaaactcatggtttttactatccttactattccaggctggtggctagaaagtgcacttggcttccaggaagccagtcaaaggcaaatttctcggcccagcagagtttgtgagcttgtgttggcacacgcctgcggtcacgacgcaggtgagacaccccgggagctttgggatccagaggtgcagttcctgtcttgagcacacagacacaaataccgagtgctgttcacgtcagtgaaacaaaaggaacgcgtctgtcttgacagaggtgagggacagagccgcaggaaacgcacgctcgtgatcgcagtgttaaggaaacgagcctgcgagaccgattaaaggttaaaaattaagatgatgcaggtgtgcagaccggatcagtgaaactgtgaagttacgagaagtaatgcgttcgtataagccggacgaacaaagaaggaaacaggatttccaagtgtagtcgatgtttgacaggtgccgaacaggtgcacactgttagactagtgtcagagagactccgctggtcgcagcaaactgggatttgcatcgctaaaagagtggtgtcgtgggaagtaaaatacagaagaagcaataggacgtgcgttcctgttcgtcacgaagaacgccatcagaagtaggcgggagcaaacgcgtagaaagtacagcagcagagggcagcaggggtgttttagcggtacagtcacccattgtgaactaatcagtataagggacacgcctcagcgtgtaatttatccagtctttcacttctacatgggttccgtattataatgtgggcaagaatgtttccgtttgcggctgtattagccgctatcaaaatatccacattcaaatatttcaaccggggcttgtcaagacagacgctgttcattgattcgatgtttcagggtttctcctagcattacgttcctctggaaataaaggcgtcggcagcatggtgcttcagacgatatgaacaatagcaatgacgccgttggcattgcggcaagctttgcaggctaggtccatgtgcgcattgttccacgtccatattatcagcttctctggtaactaacacgtggcactgtaaggtggtttattccgatacatgcacgattgtgtgaatcttttgacaggttgttagctaatcgttcatgtctttggtgtctaaacacgttttgatagggtgtactgtttgcgggtaccagagactagtgttgagggaacaccttcccgcctggttgagcgaagagttgccgttgaattagccagccatctctatgttcgtttgcagttctaaaaaataccagtgtcatccacgtgtggcaggttgtgtcacggacgactagtagcacgagtaggaatagcgcgaggtggatcagaaaaaatcccacccacgtgaacctcatcccagcaagcttggttcatcttgtttcatcccagcgagcctgtttcgtcccagcgagcttgttgccacagccgttacggcagattctttcgaagagggatatctttttcatcaccgtttcctatgtgacttctcaatgcgatgagaaccctgaggcctattggttcattgttccactgcgtcgtcgcgattggttctttctgttcgtggctccggctcgtctgggcagaggtataaagcggcactttggcggccgcagtcaacttttgctgctgtggctgtccacattgttagtacttttctggtgttttttcgcccctctctgttctctcgcaagtttttgctcctctcttgagcaaaggagggtcgattcacttgaatcacacctgtgttgttgttcatgtcggcatgtcaaaatatcgtgtcagttccttcgccttctgtgcagaaacaattcaagcataggtaacagcagcagatcttgtttgcacctctcatgcttcatcctccaggcaacagcgtggactcttctgaccggaagtgatatcgaggctagattttggcagtaccgcagtgctgtgagtcttgtcgcgtgctgttccatgcatacgcatacgattggtacggtggctacacactggacaaagttgtttgccagattgcctgttgttcacgttcctatattttttgccacaggtcttttcttttcaagggggcatccgagtgattagggtcatctgggagtttacccgtgtcatacgtcgtcgcctattgcagtctgacagaatagaaagcgttttctcttggtgaagtgttttcgcttcctggacacacctgtttttagcggaacgtttgaagaaa

SEQ ID NO: 2248 - DNA, 3127 bp, Toxoplasma gondii
  source 1..3127: mol_type = genomic DNA
gaacagatgagccagaagtgaatgatggattgccatgccggatagagctctccgacggttgctgcgcactggagttcgagggaagcgttggtggtcgttgcgtcgtcgcacagctgcctcgatcccctcggccgcgcccaactcttgcaccagcattcaaaacacctggggccaagcactggtgggggttcctggcgagagtgcacgcatctccccacctgtcaagctcatctgaaagtggctcttggccggccttcccgtgtgcgacggagctcgcagacttctcaggagtcggatatgtctccgcaattgaggcgcagggatcagactgcttgtctccagacaaaattgtagtattcctcgccctctcgctaaccccggacaaacatgtgtcctgcgagaatgcacggtctctaggagaggacgacggagggtgtcgggctggagtcagcctcggctgtgcacacggagttgggagccgtggcagcccctccaagtctcgctttaagacgacggcggcgagcgagaagcattcccccttgcagacgaagtcataaaacgtatgttcatacttgaacgggaaaagttcctcatgcagctgacgcagctgcgtgtaatcggacgctcggacagggcgaaagtgaatgcgagacagcggaagcttagagatatccgcatctttggcgaacctgtgaactggcgcagttaaaggtggccgagacgcacaactgggaggaattgccgaagaggacgacggcagcagagacgacgcaaacaaaagaccttttcgttcctgaggcaactggcctgcatcttcggtttccctgaagggctcctcgctaggcagtcgctctgctcctgaggggatcagctgacttggcacagatgccgaataaaccgaatcgtcctcttcgccgacctgccctgaggccttctgcgcacagccaggcacttccgtgagtctgagagtgtcagacccctcgactcgcaggcaagacattgagtcagaggggtgtcgaagttggaacggcttgcaaggagcgcagatcagcactgcatggttacaaaaaaggcccgttccggggatttctcgccgctgcgatatacccgggaggttgcgtttccgctggctctgtgtgttgacacttacttcagagatgttctgagacagaagaaaagtgagaggtacgcgattccgtccttaatgatttgaatccaccgtcgtggaggatatacgttgctcaacgaagtgtgccggtgtttgcgggtgacaacacaattcataaagagcgctgtaaagggaaaaaacgaggccagtatctcagccggggagactaaagatgatacaccaggaatgccctggtaagtgacaccgcagagaggaaacacaaactcgaacagtaccactatatcatttccactgctcgtaggttaccgatggcggtcgaggcttgcccgaacaaagaacgaggtcaactttgcttggcactgaaaaataatcgcgttgacgtcaaaaagaaacgacagaagtcgttgcacgaaggcttcggatcgacaagaatgataactcatgacggaatagctcaattttgtttaacaagacccaaaatggttgctctttccctgtcgcatgctgaggaaccaaccccgacggttggccgtccgagaaaagagtgcgcggggggcggtgtaagcggcgtgtcggtaaggacgcgtgtgttctcctttcttcatttcctcttcactacatagtctgtctgattcgttacagcaaaatcgcctgtgcggaagaggaacactgcattctggagacatgcaagagcacggaagggctcaagcaataccgcacgcttttgggcggccggcaaagtgccgttttttaagcatatccacaatttgggtacgcagagagaccatgaatacaaacgacaatggacgaggcagaagcttacgacagatgcacttgcctcttgcacgcagagacccccagtctgccgtagcacaagacagtctcgctggtgaccagctccagcactgaaaaccgctcacaccaaggaagggcgatcatcgagacccgcgctcaccatgcaagcggacacagcctgtgcaacgggacatccgtgcctgtatcgtattgtatgggacagcatctcgaattgtgggacttgcatcctctgcgcatctcgtcgtgctgttctaaagtggaaaaagcgaggctgaaacaaagagcattgatggtttcttgatgtttgtctatattcaacgaagatttgggtagacgagtgtgtagcgaactgaaaacccttgcgtattcgctcgacctccagctcattctgcatcgcgggggtttcccgataccgacccacgctgtgcaagtcgggatcttgaatgcgacggcatttgttgcagctcagggacgctgaatgcaacgtgaacagccgccctcgttcgtctgtttcctggtcaaccctttatttccgcaagaatttccgtcgtcacccgacggatttgttgcagttgctcctttgtcccgtcattctgcgtgtcacgaggggtttccgcggctcgagagaaagaggatgggctagctggcggtcagaatcgattgccgaagcgtgtgagtccggttttaaggaaaaccgaactttgcttttcacaactctatcgggcacgctagtacatatatactgctggtttgtacattgggaagcaatgctcgtcgtaggatattgtgctggacgcaagctaaaaacctcatttctctgtcaatatctgcgaggcccttatcagttgctctgccgcgtagagaactcgtgtaactgccaaaatacaatacagcgcctgcctgtccgctgtcatgaagtcgctgacgctttaggaagcattatgcctgtgcacagacctcgtgtccagaaccgaaaaaaggaggcgttggaacttcgctgcgagtgctcaaattccagtctagccctcatttgtagcactgtttgcctgatgtctgcagttcgcgacgtattctcctgctttaaagcgtcattcgttgctaattgaggactggagtcttcctcttgtgtttcgtgtggaccggaaggaaatcgcattaatccgttaccaatagtggacacga

SEQ ID NO: 2249 - DNA, 2473 bp, Toxoplasma gondii
  source 1..2473: mol_type = genomic DNA
gcggtccaagcttcaacactcaatgtaactaaaccttcgtggaaccaatccccttctgcgtgtcaatgacatctgtttttcattcgtataccgtcaacttccgtcaacttgctgtgttgtctgtgcgtcagtcgaggtgcatactcttgtcagttttgcaaaaatatcgagatccgatttcgaccatgagtgcttgtgagtgaaacaggctacgcgaactgacaccgggataggctgttggttcgtcactggttcggagttgtatgtgtgtgcccagacaatcccacaccgactcacgctttcatcaactcgtctccctggaatgtacagtcaagcgagtttgtgaagtgtgtttgcagtaaattgtatgcacgtttcttgtcctttgagttgcggcgcggtttcatcttgtccaggatgctcgttgacactcggcggacgtcggtgactgcactacggctgtgcgtgagaaaaaatggccccgcggagcgtcctctgaatccatgttagccatacacctcattgagcaaggagcctcgacagaaacactgcaatcgttacggtgcgagggaggtatagtgtacctcgcacgatgccctgaccttccgaacctcactggaacctaatattgcgcacatctgtaaacagttagatcatttgaaactttgatcccctgctgcctccatttcgcgtagagaatcagttaaggtgtcgtgcactccatgaaacgctgcagaagcagaaggcaacagcatggggaatgccccaggatcttccggaacaggcgtgcccggaggaacccgatgtggcctcatgacattgcgcaggtcgtgttcttatttcagtttataaaacgcgcggctgttttagtcatatctgtttctgagttcttctagtagcctcggttttcgcgcgctcgcgtattgaagagtgctagccgcccgacggctgcctctctacgccggcgggtgcggtacagcaactctatagaacactggtcatatgcggttattctattgattacgcccaccattaacttggctggtgtctgccgctacgcgctgcattcgttgttacataccacgaaaaacgagtgttcgctctgatatccactcaaccggcgcgggaccgcctgttcctgacaggcggtcccgcttcttgttgcatgccgaagatacaaggaaaacaacttggcgtttaaactcccaaatttgtatctggcgccaatccactagcaacccaaagaaccgatcgctgtctccggttctcgcgtgggatcgcagtcgactcaattggagacatggccgcatgcagattctccccctttgtacagtatctccaaggccgacgagacaagcagcatcagggaaggctgtgtttttggcttacattcctgtcttgtccatagatgcgaaggttttggccttttgaagttgcagatgtgccctgtgcctgtttcttcgcactgactcgtgccttggcagggcaacgtggcggctcgtgcgacttgcacacacggaagcgtgtctcacgctggactcttcgcgcgtgacacgctccacgtggtccttttgattttccttcacgcgctaaggttttatcgtccaagtctgtctactatgaatcactgcctgccggaaaaaacttgttttccctgtgatacgcatccctgatctccgttcatgcgtacctgttctgggcaaactggtccacgacacggaagcttgagcgactcgtcttttctcgcgggagaacatgcctcataagttctttgctttcgtcagtttgtgaaaccttcccggaaggcggtcgggcagtcctggcatgtgaaatcgagagctggaaagggatgaacacttcaaacgccgaggacacaccgcccggcaggccccgtccgcgacctcgtccgttctggatggacacccgtgtatactttccaaattacccaccaccccgcctttcttcccctcactttcgtgcctgcttctgtgcaatgtaactgttttcccctgcctctctgcagtcgccttcgtctcatgggagcgcgcgccgcctgcccgagccacgtggaacgctctttttcctcttccgtgaattgcgtccgtcagtcctcagctgtttttctcggccccctctccatttttgtcccgtcctctgtgccacctctcgagaggattgtctgcctgggtcgtttctctgggaactccaggtctacatacactcgagggcgccactctcccgcacacctgcgctcacccttttcgtgtggtttccacttctgttggccgtcgccgcttcgggagtgcagccgatcggaaggttccgttttgagttttcagtttcgcgaaataacgccggtggttctcacagggctgttaccacctcggtccggctcgtcgctgcaccttttcctgctctttgttcgtctcctgttttgccagtctgctcgtttgctgtgccctcgcgcccacca

SEQ ID NO: 2250 - DNA, 3580 bp, Toxoplasma gondii
  source 1..3580: mol_type = genomic DNA
acgataaaaagcgcttgcatagaacatcctctcttcctctccgtatttacttgcttatggagaaggttacataggtacaggcaaatgtccccaaacgtgtaaacatccgtttcatgcccctcgcagttgcgattgccttacgcctaggagtgttaccaaaagaccgatgtaccacttgagtaacacgaaacaggccctgcagaagacaagacatcaaaacagacagaacgaaatgtgacggtttgtactacccttcatggccccagtcgcgtctccatactgacggccatgcctcaccttgcattcaatgcgattccagtataccggtggactaccgtagccgtttgcacggagcagctgaatgagttcccacgtgtttcctcgcacgtctgaggatggtgcgcgctgtgctggtctaagatctgcatttatgtttgtgcccaagacatactcgacttacacaaagccacaaataaataagacggccaagagggtgaacagcccagtaaatagcatgatcgtctggcgcgtcttgagattgacagccttcacatcttgctttccaaaaaccttctccagcatcttctctttctccgacccacggccgccctccaggccgtggagatacaggattcgcggcggcatagtggaaaagtgcagtctgtgcgagagtctcctgtttcctgctgaatgtcatcacccaggcaacggaattctgtagtgttcggtctgactgtgaatctgataaagagaagaacgcacgcgttgcaccttcattatgggcagaatgccttaaccgtcctcacagtgcccggaccttggcgactgaaccctgcaaggtgactgtgaatctgccaaaacacaacacatttacccgtccttgcgacaatcagcacgtcttcccattcacacatgcggctgcttcttaatgaaaaggctccacgtgcatctatcctcccccgccttgttcacctcatctccccctaacgggcgcttctggcttgtttccgcaacctacggaactgcgagtttagaccagtctgtgaaacctacacatgtcttcaaccgccccaaacggtctacaactcagttctgcacaaatctgttctacaccactgtgatggagatgcctgcgtattctgtgacgtaatctagtactgttcatgcccaccaccgccgggccctggcgtgtggcatgcggttatcaccgttatacgcgttatagcaggtctatatcatgcttggctccgatgctgcatctgagattctgaacctcggaaaaacactaacgtcacaaacggtagttaacagcctttttttaaatggaagaagtcctccatctggagggcgcgcccgctggtggctccggcgagagaccgctagacataccgtggcttaaatcattctcgtcgtttacacccactgctggcacacgctgtccacaatgctacacgagatctccacagactaaacaaaacaaagacttgcgtaatttgctttcttcagtttgctcacccgccacaaagacaggtcaagaccgaagctggaccgttcggacacagtcagtctcttaaaaaagacgacccgatgtattgaaaaaagaggcctgtaactcctccggtattacaatccgcaataagcattcgaaaccaattacatgttctaacttgaaaacccttgggcacaggcctccagctcggcgacctgcttgggtttgtgacagccacagcccctacgagagtgtcgggggggagcgagataccgaggttcgcgcgctggcaatatcaaaatctcggcacattccactgaaaccggtcagatctgctcgcgaagtcaggagctgccgcgtctcttcacgcaaaaaaacggaactgcgcaagttctaatctaccgaaaatcgacaattccgatggacacggacggaccgagcgagccggggacaaccagttctcgggaagcaggcacggccaagggcaggatccagccacccgccttctccagagagaaaacttaggcctagaaacgttgtctgaatggatctcctctcgctcccactagcgcctaaactcttggggaagacagacagttagtacagcaaaaacccgagttagacgtctctcgacaacctcccctgggaagtccagagccaagccacaccgcgaacctcgacttcctcgatgatgctgtgagtctgcatgtgacagctaggctgtacatacacccgaccgcccctctcaggggggagagtgcctgtctgctcctgtcgacgcgcgcacattgaaacgcttcgcagtctgcgtcagcagcagcgcaaagagggtcggtatgggcggccaccctacccgcctccgccgcagaggaggtcgaggaaagggcgcgttgtgccggcccaccatctcccgttgcgcgcgcactttcttgacgcgaatatccgagacctttgttccccctgcgtgcagaaaggagagatctcgcatacaagtcgtacggtttggtaataagtcgagaaaagaaggcagaaactggccagctgacatgcaaaaaaaaaactgaccggataagctagcccagttttctcagccgcgctagccctagcccaacagcttgaacttgaatcgaaaacgtgcaggccgcgccattacatcttgccggactttatcttgtttgtcatcgcttcatctctatgaaattccagagaagaagacgcagggtaagcgaggagaaaaagttcgcgaggcgaccacgggagagacaataagcctctacgcagagtctgcccgctaaagcggagacgcgacggctccccaagaagactggcacgaacacgacgttttttccgaccccgtgcttgacgttcgagcccagggcctagttaggcgcgcgtctgctcatcttccatctctcccatacagttctttctagtacacagttttctcaccatctcctgccgtgttttcatccctccgacatttgtggagcccctccttcgcaacgacaggctctgtgcaagccgcatcgcttcccggacaaaaaaagagctgtgccgcgaccataacagaaagaggccactttttgcaaatgacggagaccttgtattatggtgcgcaactttttttctgctgcaccggggacaactcgcgaggtcacactgagtgtaccccgtcagctgtgtggcacgcatgtgtggcgagctcggatttttaacgacgttgacacaggaaagggaagcgaggactcgacagtgaatgagaggggaagccagggggaagccactaaggagagacccaccagggaataggcccacgaacgtatattcggctcttctagtgcgtttcggcaaacgtagttcagcaaggaaagaaatctgtccgttttccctcggtatacgctgcatcaagtggaacgcgaccggccctcgatttttccagggtctgtacatcatcgtcaaagacaacggcccgccacacgacgcagacttttcatgggtcattattctccgcttcagcttgctccctgagcctctttggaagaaacaacgtttgtcgttttttccagaaacgtgattgacgtagaacagcaa

SEQ ID NO: 2251 - DNA, 1734 bp, Toxoplasma gondii
  source 1..1734: mol_type = genomic DNA
ttccggtcgctgtcgcacaatctcccgagcgacagcaagcatgattgcgccagactgcccgcccaggcctcccccgtgggcctgatgtcgaaggcaagcaaaaacgtaggaaagacgctgtaagaaatcattgcgaaacatatcgactgtcacccgaacctagctaacgtggcttacctccgcaatgatatcaaattcattctccagctgcagttccatgagtggcgcgatgcaattatgaatccaccatggattgtcttgaagatagtcggttgcgtctctgttgttgatcgttagctttccagaaccagggggaagccgaacccttgcataagacctgcccacgcgcacaccggagaaaccgcgatgcacatattagttgttacggcttcctaactcccgttcagaagatgacagacagctggactaggttctacccaacccgcaagtcacatcacgggtaccctccggtcaaaagcgtgaacgctgcacagctgtacagaaaagatatacctgaaaagattgcagtcctcgtgacagtgtttctcacagaaggcgaaggatcaattctgagaaagcattctctcgtcagtaccttttccgggtgccccatgagaagctgttccgcggcgttccaggctcaggtagctcggatggaatgcttgagagtgtcgcatccgcccctagagctgtgggttcactcctctccacccagtcactaggaagcgaagtttcatggactgcatcttcgaaagaaggacatccttctgtgaccgcagaccaggccgtcacctggccgacactccctgggagtgaccgaggggagagtcccgtttgctgaaaccagcctttacagtgttgcacagctgcatctcctgcaaaccatcgcttcccaaccaagggaaggacacggaaattcctggtaaagctatgcaggttgcgttgagggactatgaaggcagttccgactgcaggcccgcagagaaaatacgcaagacacattacagcccaggatggaaggctgcaccgaacccctcggcaccaacgttcgagggccattctacccaagtccgcccttcaagcacatgttacctgggtttcttgaataaaaagaaaacgaggatgtacataaaacactgctgtagccgcgactgacgattttgaatcggcagcatgctcattcctcaccgtatcagctactttgggtcgtgtctgcagcgtgcatgcactgacgtcatcggcacgagcgtttctaacgaagacaggctagtctcggtttgatgtggggccatactttactttttggagccacgtggatactctagaaactgttcacttgatggtcagtaccctgattttgcatcaacagtgacatccttcgcatgttctggagtaaggccgcctctggggggtgtctccttgatgcgctgcctagtccaccggtgttgtccgagaggcagctgggcattgcagcttggtactcttgagcgctcgactatttaagatattccacgactgtgagtagtgtttttccgaggtgtgccatggattagagaactcagttttaccatgcgacacccctgaatggagtagaaggcccctttgttggagtcgccggtggttcggctctagtcactggggacgcgcttctgcattgaccaacgggaaagccgagacggcaccgcggctccacaccacaatggtgtccttttctctttttcatcagacccacga

SEQ ID NO: 2252 - DNA, 1619 bp, Toxoplasma gondii
  source 1..1619: mol_type = genomic DNA
agcgaagctgcgcgtaccaagcatagcaagaagtagacgcatgcatgcatctctgtatcagtgcttgcatgtgctttgtgcacagctgtgtcctcacagatgagtgtgtggaagagcagaagcgcatgcacatatatacatatagttatatatatatgtatatatatatatatatatacgcatggatatgctaaatgtgtctatatatgtaggtagatatatgcagatgtttatatgtgtgtatcacgttgctgaaagaggacaggagaaaggcctggcagtgcttactgctttctcgccgggggcctcggaaggcggaggcgaagggagagtcggccttcttctgcctcggcctctggagcctcgcgaggagagacgaggcatcgtgtctggcggtggggaggtcaccgacaagagagacaagaaggaaagttgcgcagaaggaggccgaatcgaaaaattgaaaggaagagggaagacggagggagaaaagaagggaggaataaagagagagcgaggcaggaacgccacagggaagaagcgaggagagagaggaaagcgaaggaagatgatgaagacacggaatagcaaagcagagacgaggacgaccgataaagaagaacgagacgaaaaggagagacagggcgggataacggagacgcagtggaactgaatggacggggaaagatctgcaacgcaggtgtgtcatgaaggaggaagaacttcgacttctgaagaacgctgagagagacagagagagagagaaagttcttgcaaaacgggagaaagttcttgcaaaacggagacacaccgccggagaatgcccttttacgcggcggagaggagagtgcccatcgaggcgcggagcctccagtgaacgggatacaagaagaaggtacatccgccaaaagatacttgtagcgtccaaagaagcttctgcaggaaacaaaagagacgccgcttcctgcattgcgccgtagatcttataaatgcacactgaggttggccttttctgccgttgcatgcgcatgcagtttttttcgcatctggaaggagaacttctgaacgagcgacgcgggaggaagccagccacgaggaggacgcgtttgtgtttatgtttcttgaaaaaagatgtctgaaggaacaaaattcacagaagaaagaggaaagtacgaggaaggtgctccgcgtttttctctttggagaaggagggggccccgcagaaaccgacacggagatcgtttccccaaagacctctgcccgctcgcttcttctttgtctcttcctttctgttgcttcgtcatagtttattcgtctcgcctctctcaactgctctcgtcttctctctcgcactttccctgtctgcttcctgcgtcggcttggccctttgcatgcggtctccgactttcaggcctccgcgcgcgaccctcttgtctctgtcctctctcttcttctcctttccttctatctcttttcgccttcttgctttgaagtttcttcactcgtttccagtgcccctcctgtcttgcagtccttcttcttctccttctccttctccgtcttctccttctccgtctcgctttctcactatctttcgtggagccgtttgcttgtccaaa

SEQ ID NO: 2253 - DNA, 1539 bp, Toxoplasma gondii
  source 1..1539: mol_type = genomic DNA
acactcccaggaagaagtgacgtaggatgcacgtcacgagaaatatggagtcggcctcacctgtacaacagctctgccgacggcggagccagccaccacgacgaactgagcaagaattcttccaagagggccaatcgccatggcggccacgtttaccagaggacgcgcggaaacgggatactaaggatacagtttgcgttcgtgtgcaggaaacgcagatcctgtccctggtgtataaccggacttttagtcaattctgttgtcagacgaatctccgaaaaaaccggactcccaagagtgtgtggagctgtcgttgaaagatgcctttctcgacgttgcgttgcaacgcattcggtgaatgtagaccactggcaaacacggatatctcccacaatctagggcgacgacaggacggttgtgtcagttgcagaaagacacaaaagcgtgcaaggaaacaacagttcacgttacgaatcaccagcaatgcactgtcgtgataaaagcgatttctgtagttacttgactgtcaggctggcaccgcgcttcttgatataaatgaaaccttccctccaccagctggtgccctatacctgcagctgatttccaccatgaaggattggaaaaaggtactaaattcagactggcggagaaaagccatgcggttcactggagaatggtacacgaactagcagcccggcagcgtatcctacatcttccgtgatcctttcgcacagaacaaaacaccaccgcgtcctgctaatcacatgtacacaggaaccgagaaatactcgggttgttttcgttgcagatgttcatacagcaaaatggcgccatgtgtttcggcgaattcggcaggggaagtggacgacacccgtcgctgagctttcgcctggagtggagacatctacctgtgagtgaaccaggcgttctgctttcgccgctcctttgcaggccagaggacaatgatacaaatataagtgacactcttctcttcgatatcggttaactgacaaagaaccacagcggagttaaaatagcagcgtttgcagttcaacgcatgcacaaactgcttaactcccacatgcttgcctttgagagacgcgacagcacatcgttcgagcttgcatgcagcgaagacatctagacagcaattaggagatgcctgccgaatttgtatgtaaggcgcaaacgtctcctcggtgcgaatcacaattacgcacatttgcccggacttacatctgtcttctactggggtctttccttgtcaaaccgtgccgctgcaactccaaactagctcgttagtgagatgctggcaaggttttgacaagaatcgagttctgcgactgcatcgtggtacttgacaatcccagacttgcaagttcatacctctaaaataaattttattgttgacaccaggctacatgtggcgtgcgagactcttcatgcgcgatacgccctagtcgcacggtctaatgacgaagctgtcgtcaacgcgtaactgccactgatatcccgaaaggccgcaaggtttaaggaaaa

SEQ ID NO: 2254 - DNA, 1653 bp, Toxoplasma gondii
  source 1..1653: mol_type = genomic DNA
atcggctgttcgcctgtctcgaaagaccctctccatgtttctcgtacggggacgggattcctatcgtgtggaattccaggcgacagggtttccgaggaaccatggaaaagcaacgcgctaaagtcgtctgtccctgagatgtagcggagactcgttttctgcatctgtgtgtctgcgtgcttttcagaggctggagaacggagggatcgctcgaattcaaagggccattgacactctctttagaattcgatttcctctttcctgccgcgctctttccgctgcgacactctctgagaatcagcgctcacctccatgcacagtgtcgtgcttcgcgcgcttcaatttttcactttcttttcccgaggcactgagaccatgcaatacccgagagcagctcgattcctttaaacaaagtgcaagagtgtcggcgacctgccgtcggccctaaaaatgtcctgagattctctttctcaagctaggttcttccccccttcaacagaacatgtgacaggtgtgtcgcgttaggtgaaacacaaccacccttctccagaaccattgagatgcgtttgctgaagaagacgtatctcagggcgagtccgagaactacagggctagtcgatgggtgaaaagagtctctctttctcccttccgaagaacactgttcgagcaggccttcgctggtgccctgcaaaagatgaacatgcgctcaaattccctgtaaaagagaccccgccccaggtggacggagatgttgcgcagtgccacagcctgttgacgaatctagcagacgcttcaccgccacaaattcctccagttcttgctgagctgcgaaaagatacattccatctgagaatcaaacgacgaaggcctcctccactgaagtgtaactcgaaaccggtgctgctggcaagaagactctgcccgtccatcgtgtgacattatttcgcactcttgtgtcatgagcgcgggaggaccgatgggaggaaaaggcattctgctcccgtttcccttccactttatcccattgctcgagtcctctttcaacagaacaaactgtaacaggcgcaaaacagtccatgttccacctctttcctgcggagtttcggagccacaccgaagagagagggccggaacgcatgcacgatttttttttcggcggcgggcggcttttcgcgcgacattcgcgctgtcttcgtttcccctttgcattgaagccttccttctctgttttctgctctcgctgctcccgcattggacgcgacatctctcgcgcttttgcttcaccaagacacatgcccacctgagagttcgagcgagaccataccctccgcccattgtcggtgtctgttcaactgcaaacgaacctcccgacaccgtggacctcaaacattgcttttcttcggcaaagactctcgcaagttgaatcgcgactgtagcttccaatctctggacacagcccccccccggtcatctttgcctcttcctccacttatgcgcgtcgatctacgccgtttttcgtcgctcttcttgcgcttaaagttttgagctctcggagagacgcgtttggggtgtcttgcctcctctcgcgtttgcagttctctcgcttcccaaccaaaacgggcgtctgccttcctctttcgccttctgccaaga

SEQ ID NO: 2255 - DNA, 1927 bp, Toxoplasma gondii
  source 1..1927: mol_type = genomic DNA
ttggatattcaacaaacaacgacagacagtgacataacctgcgttctgcacagcacttctgcactcctcatcggcgacaagtgccttagacacaggcagactcagaggggctgcatcaggtggcttggctgtgtcaccagccttcacagatgtcacgagagtcacattggtagtcttcttcctggtgttagtccgtacggggaacgtttgtctctctatttgtatgaacgataacggaggcttcttccattgaggtaaaccggagagccaatccctctgtgcgtaacgaaacccacgagtgccctagtcaaacgaaggaccgcgacgtcgtcggtgtaggacgacagacccgcggcacatggcagatacacgtgcccgacacaagacgacaggcgtttctctcgacacactggtatattcggttcgagtgaggccgtcacccgccatctgataatttcagggtaggaagacggcagagacttgaaaagaagtccctaacaaatgcacggactttacgctagccagaggaaccgcatcgtgagaaccagaggtgacgagaaggagcctacctgagagtcattgagataagaatcatcggcaccatagggatttcttcattcgataaggattacgcttagatcgaaggacggtggacgaatctcggtctgcgggtagagagtctggctggacgcagaagcggagtgaacgtattctgggcagagttctcacacagcaataacttcatgaacatgacagaatgcgaggacagctggcgtgtacagagtaggtgaggcaattgtgtcgatcgttctaccaccagaggaataggaacactgacctgtattcacaaatgaggatatgtgtgcggatattgaaaagacctgggcttccttgaaatttccgccacgagaaaacagcgtcgaggctgtgagtcgggagatcgcgtcaacgaggcggtgagaccagggaaaaagaaaacccggagttttgctttaagagtaaggcaacatttttggacgggtaggcagggacgaaggggcaaaacagagctcaagggagggaaggacgcgagatgagacaagctgcgaggcacacactgtcggcattaaccgttacactgagtcttacattttgcgccgttagatccgagcgcaagtaagaacaacacagagttacacttacagaactcgcaaacggcaacgcagatcttgtctgtctgaatgcgagaggggatctttccacgatctgtttgttctcgtcttttttcggcttgcgctcggttactgctgcaaaagagtctcccagccacttggcgcgaaacaagtgaacgcttgactcgccaagtctcttcgtgtaggagaccacgaaggaagtaacggaagaaggggaggacgaggggcgcgttccagtttttgtcacattcagaaaaattagtggagctccggacacattttcagcgatgtggaaggcgttgttcaacaaatcctttgcgtgaaaattccgacacatggaatcacagccaactacgacggctcgcgtcacgaggcgtcacatgcggcaccctgtacactcgaagtatcaaactgttcctgttccattttgtttctttttatgtaggctcagaaaaaccatggcctccattccgacgttgtcttgaagcatgcgttcgtccttttgcggtgctgcgtccggctcctcgctctacagaatggctgtttgcgctaggacctacaccgacgaacaaagtgctctcatttaaggcacatgttgatcccctcctcctcctcctcatttgcctggataagcctccactgaggttcctcggtgcagtccgcctctccatttccgccgttttcttctgatttttttgttcgccttcagttcgtttttctggctgtccatgtagtgccgaaggaggaattgacca

SEQ ID NO: 2256 - DNA, 4848 bp, Toxoplasma gondii
  source 1..4848: mol_type = genomic DNA
cttccagaatctccttgtttgggccgagcgactgtgcgtcgtcttcccgtctccgagcgacggaacagaggacagcggggaaaccgaatcgtcgaaattcggaggagcagaggtggggaaacagcatgggcgtctacgttctttgctatcaagacccgtgcagatgcggggacttctccgcaacattgaatacagaaaggatcgcgggagcctaccactccagggcccttcccgaggaatggtgaccacgaaatgcgctcggacaatgtgtgttgttcgtcgccaaacgaacaaacgcgccttggaaagaatctcgcatacccacagcggcgctacctggagccccgttcgagcaacacgcgtcgtctgtgcttttgtgggcaactctctgagctaatttcctctcaaattcgtccactaaaaagttacgcttctcctgatccaatgaaaagctccgcctctcttcgttggcaatacgtggctgctacctctagcgccacaagtcggcagctcctacgattctctccctacagcctccctcgtgagggacattgccccatgacgcggaaacacttctaactgcacgaacagattctcgacgatatggagagtagagaatacgccggagaaatcagagacgattacagagagcaacgcaatacgagttcacacgtgtttgagagcccacggagaaactgaggactactctccaagtgcttggcagcggacttccaccggaagtgcacgtccgctgaaatctcttggctccattcttatccccctcaggactttgaagagccacacttttttccggtaaagatgccatttctgagacgtgaaacacttactcccgcggctcgcagtgttgctgttgtagcggctggtgccacctcggctgtatgctccccgaaccattgtgtagataagaagcagtgacgaagattcgccgatcctagaagcaacttaatgccttttaattgatggattccgcgagttttagcctgcggaacaagcttgcagtttctgtccgtcctgcacatgcgtgtccaccccactaggctgctgcgacgcagtagtgctcgaaaattcttgctgagagttcgtttcctgccacgatgaaaggggtcagtgttacgctgaaaagtgaacaataacagcaaaagtgcgttcctcgctgaccacaaaaaacgggtgtaccggggtcgcaaaaagcggacgcgcacacggcagggggcgagacacgccgattttcatacggtgatcagcacagacacaaattgcattcttcttcaacaatacgaggttttatggtccaaacgtatgcaaaaacgagccggctaaaaggcgcagtttttagaaacagaatcatgcatcacagtggattgcgcgcggtgacggcgccgcgatacgttgaaacgagattttggaaagcagcgagtgccgagctcagacgactccgcgaaaacacggaaaaacctaataaaagcagtggggaaaaggacacggccccaccaagagcggttcacggaaggaaacagtattttgaccacagtcacagcgactcagaacggcctcgaggaacgacgagcgcaggaaaaacacccagcagcgagcagggtcgtggaagaggaaaagcgacggaacggccgaagaggggtggggagcacgcacgaagcgaagggtggaagaattttacgctggccagcagcgcctggaacctgagaaaaggaggaactttgagagcagaaaaaggacctcctgcagcagttagcaaagttatcaatcattctgtatttttgagctatatgcgcggaatctataccgagagggaaccgttcttttggatacgctcccacaaaagtgattctggacgaacggtgttacgaggtttcatccagaagatagctccgtagtatgcttaggcgtgagacatgacggcggtcaccttgatccacgtagagaattcgtgaggtctcaaaggacggctgatattataaatgcagtgttttccatgactgtttgcgagactagatggggatcgacgcttagccgaaaaattgggttgtgcacttcattcgttactcagggcaaccagacaagccaagcggcgctactcccagccatgcactcacctcggttcacagcgcaccgctctataccggagggaaggctgccattaagatataaaagcacagtatagctctgccacagagacagaagacatttccagcagctgaagacaaggggtgagtatctcgtggtagtgtgtggcttttaaaagggaggttccatctatcactgtgtgagagaaatcatgcgaaactgatgagcgggcggtttcttgcctgagcctcaccacagaaagccagcaaaggtttctggcagcatctgtgacgtactgcgtctatgatatatatcatgtcgtggagggctgtcaatgacgctacaacatcacgcttcctgtataccccagatcacataaattatgttactctccattttgctcctgtggagctgcaagcctcacagggcaactgtttctcactcagtattccttcgcaaccagacttccgtgaccgccgggatccaaggatccgcaccggtcgggagttgcgaggtaagattcccgtttcgatgtgcgtaagtgtatgaaatatgttggaaaatttggtatttttggaaagccaacatttctgtacaggctgtacagatctagtgcgttgtccaatcttcacagcttctattttcggtaactaagaacacagtcaggatggattagtgagccgatagtttcatttccatgcagaagtaaattgacattcactgcagaatataaaattcttgcctgtgcaaagaataatccaattaaatctgatatttgtacgcagccgtcattaagaccataacgagcacagatgtccctgtttgtgcggtttgttgtgtatctttgatgactgtatactacggacgacagcgttatgcgatcagcgatgtaactgtgtagtggtcatttggactgcacctgttttatgaaacagagatctcgggatgagagacagtcttgagtccaggaaggatcactgaggacgccgtggaagtatactcagcaacgtcagccaacggtaacgtaccacatgaagaaacggctacccattacgttgccacatgactgtgtatatgcgacgctgccgaagaagtagaatgctccatgcttctcaggatatgtcgaaaaatcgaacctgcgcgagctggattgattgcaacgcctatcgggacacgtactgcttcctgaagcgtctgcggtgcaacctgtcacaaaaattcgttgataagttcaatacccttcgttctggtaactgggagactttccttgtcaacggcatcagctagtgtgcggttattaatcattcatcatactggcttttgttgttcttttgtgcggtgtatgccgttgattgaaaagtgccatttctagcgtgctttgcccaaatgatgggatctggacatcgctgcggatcaaaagaccatacgacgcactggtcatgttgcgtgaaagaagctactctctgttttacatacccctccctactagccttgccctgccaatcactgatgtcacccatggtttcgcttttttctgttttaccaacgaggtatcgcgcggcagttctacgcttcctgcaaacgcacgcagttcagaactatccagatagtgttttactgcctgaaaaattagacctcaatgaacaagtgtagtacatcacaacgtgcggggaagaaggggacaggaaacggtaggagaacggccaggagggcaagccacacatctagtttccttctggagtgggttaggtatcccacggctgatgcagtatcttgacaaccgcactcgaattcaagcatccctagctgtctcctttttcgggaagaactgccttacgaaattgtcaacgcaacagtgaattttgctgtctcccgaagcgaccctggtgtcttctcgtggagggtcgcatgcagatacaacgagctgtgccagaagacagacatcggcagccaggcattcgccaaacgtccatttcacatttgctccacgggtttctcactctaccccattttcccaagaaaagtttgtctcaactcggatctgtccgtggcacatcctcttttcagagacacatcatgcgcttgcatgcgctgcattacatgggattcacgcagtcaaccaatggtggtttccatgcatcggagagaaggcgctttccaatttttgctccgttttacctaacggatgtgtatcttttttaacttacgtgacaagcacctctttcaaaagcccgacaggctgtcgttcgttgaatccactatcgcctgttgctcgtcgtcttagggcggcttcagcaagtagtcttcgccgttagatttgtggatgctaaacactgttggtggtcacctttttgctgagcatccagtgaaagtttcttttctgcgttcccctatcttcgcctgctctctcggtgtgatcctgcgtaagaggtacaccctaccggtacggcttgccaagccgatctattggcatttgtctgtttaagcacactttactcagccgttcgctgcttggtggtgcgtttagcgtgcacgaggccatattgtttcgatatttgcctggttcaatgcccgcaactgtctccagaaagacgccctctgttattgcggatgtcccgtgtgtgtcctatgtagagctgtaagacctaatccgcgtgccctcccgaaatttcaacgacttcagtgctcggccttacgttaatatccacagtgtagggtatgcattgtccactaagggtggagcaa

SEQ ID NO: 2257 - DNA, 1910 bp, Toxoplasma gondii
  source 1..1910: mol_type = genomic DNA
taggattcgagaggaactcgaaacgacgaggaacaaccacagaaaaaacgagaagaacaacaagagtaggaagagcagacagagggagaagaagaggaggaacaatgagacaaagagcgaaaatgagagaaacacgaattggaagaacaagaataggaagatcgaagaggaaaagaacaaggaacggacgcctcgctccagtcagtggagaaggccgctgcgtacgcccgagtcctcaacccagcaaattttcttccttcttccacttgtctccacattctgtcaagaacacccacccttcttttcatttcttcagcaaacggaaaaacactgcattgcgctcctttccgccatctcctgagctctggtcgtccgccctttactcggcgtccagactcgcgcgtggcttcgggcaagatcctcattttcgttctttgttcaattttttccgagacacaccggctgcatgcacttcgcttccaaaaaggagaaaggcctcggtttccgtccctgcggtgtccgcggccgtttccgcaagaacgactcctcaacaggcgaaaagagaccgaccttttgctcctccataaacacgagctttttttcgagaggaacgacttttcgaggtagactgcgttcccacccagggagccgtgtcgtctgtttcttcttcttgcactgcttcgctctccccgcttttctgcgctcgtgcgtctctacgaccgcttcaggccagctgaagaagcaaagaatattcgaaaacgcctcgctctcagggagcggctgtcgccgtcacagagccttcgcggtgaatggctcgaacattgtagttttactggtgtcaagtgaacttgggagcctgaccaagtcgttcccgccgctcgtggcaagagaagatggaaaacatctcctgctgaagcaggtggaaagagagcaagttcgcgaatgaagaagaaactcagggaagaacgttgaccggggaagagtgtcaaacaagtcaaggtatcgcggcaaccgagtgcatgcagagatactgaattcgacaagcgggagctgacgaaaaagttcggaccaactggaattctcacccacttgcaaagacgcatgcacatacacactgatttaatgtggaggaaccaagaaaatcagagagacagaggaggaaatcgtttctccgtctttctgagactcgcgacaagacaagaaaagccaagtggggatgtcgatggaaacgctgtgcaacgtcgcaggcgacagatcgagtgagaagaaagtcaaagaagatagcaaaagtccttcttggattgcagaaagatgacagaagaaagaaggaacgactttgcttcttgtgaacgaggggccttcgatgttttctgcgcttcgccccctgatggacgacctgctgttgttcatcccgtctccagccttgttgacgccctgccaaaacacttgcggacccaaggcgaattcagcactggccctgagcctgaagcgatttgaaagcaagtacacacttcgtaattcttgatgaagtttcgttttcatgtcgtcttcctccgcgtctccactcttttcaacctaccaacacaagcctgggttgagcttctgtacgtcctcccaactcagatgagaacaaagactctccaagtttttctcacgccctggcagttgcctgtcgagcgcatgttagacagctggagtcgaggcgaaccggaatacctttttcatcgagtgcgagacactgaagcggtccgcgtccttctttcgcttcgctgtcactggttcctcctttaattccactcctaaagtctctttcttcttcatcacctgtttcgccacttgcttttctccgttttctcccactgttgtgcttccacctggtcttgcctctctcccttcgcgcgactccgcca

SEQ ID NO: 2258 - DNA, 4358 bp, Toxoplasma gondii
  source 1..4358: mol_type = genomic DNA
aagagttcagccttcagcaagggaagcggaaggatacggaaggaaagaggagagaagcagaagtgcaaggttttttcagaagggtctcagagaagtttattcatcacgaggagaaaccaagaaatgtctttggaagctgaagagaagatgagtcgttctctccagaaactgctcctctcttcacagagctcctgatctgagagagagaagagccgggctccagcacgcggaggcggccaggacgaacagcacctctgcgtggagagcacagaagcacaggagtaagaagagcgcaaagtgccggaaaattctctagaccaatctgctccaaagaggagagatgtggagggtgtggagactagacagatgacacggggctgtcttctgatcttcctcctcaagcggtgtgcggcttctgcccatgcaccctccgtccttggtgtttccctccagcctccagaggcgaagccgcaggaccgacgtgactcgcctcggcgttccagaaacaaggacaacgcattcaggaaaaggcaccgagaaagcgtggatgaaatgtattccggcacaggcaacagcctgacagctggtggagctcaaaccgagttacgaggcaggggggagaagccgtttagacccccgtagttatttcgctccgagtgggagaaaaggtgtccagacgtacatacggtgtcgacgaaacggaaaacttgatgaaggtggatttggttgatgtggtggagaaacacgaggagagaaggaacgcgaaagacatctccccggagggggttgagtggcaggcgtaagaacaagcagaggcgagggacgcggaaaggcaggaacggggacgagaagtggagagaaagggggaagactgagaaagaacggagaggaagaaaaccagggggaaacggcgttaaaaaaagaccgacaggcctcttcggatcacctcgagttattcgaggccctcacacacagtcgcaaaaaagaatgcaaattcgctttcagtgaagcctcttttgggttccgcaaactggtggcttcatttgtggctcaagaaagggtgaacattcctttctttcagcggaaaaacagaacgacacacggggagactgtacgaaaagacgacatcgcgccaagggtcagattatcagccgacagtctcaaacaaagaacgcgtgtggtaggggtccagacagcaggaaacaccccaggaagaaatccaaagattggcggggaaagcgacaagaagccacgcagagaaaaagtcgctttttcgctgaacacagcgatttctcacatccctctttgttttcgagtgtgcatgcacagtcgctctgtcgtctcaggccgcctcgacagaggcgcgcgatctcccgtctacctgtggcaagagagtgtcacactatcgcgatatttgttagaaacaacagggcgtttgccagcttcgagttcatactggtctcgaacgacttctttgaaaagaaagtcggccacctctcttcgcgagtaaacaaatgacggctttccgaatgaacgcgccgcagaagacagagaaggctttcgagagctccccgaaagacaagagatcgacattaacaaaggagacttcgtttcagtgaagagtgattggccttttaaaagtcgttcagagcaaagcctacccgacgaggattttcatgtctaccgaccttcatagtacagctgtacgtgcagtgaactctgctaaccactcttgtggaggtggagatggaaatgttgtaaaaaagcagttttctgcgtatctcaggaaaaaaaagaaagcccggttcgccgaaacccaagaaagcgtctggtctagctgtgatctttacgttgttagttcagcttttctgcaggaaacggtgacttcgaaatcgtgttcctgcacacgttcatgactctgccactcgagaatagagtatccctctcctcctccagatccaaagtcacccctttctgtggggggatgattctgttaattctctccgctttccgtctataacaaacgccaggtcacggtatctcggagacatggtggcgaaacgccctctgattcggccttccagagcagctgcacgtatactcaccgtgtaggttcggttttctcacttgctacgactgctgcgcacttcaaaccctcagagttgcaattatttaacgaagcgcatgcaaactcgcggaggcttgtggataaggtgtggcggcagcaacacggggagggcaagcaactcttttgcgtattatccagtaccggttttcaggtgtttcttcttagttatgtttctacgtctgtgactcccaatatcaagaataaaacaagtcacttggcaagcaacttcaaccagggaacactttgtggaacgactccctgtgacaaattatcatgtgggagtcccacggctctgaaaactagcttcctctggagagtgtacactacaagcagaactgtgcacctaacttggtttcccggcttttggagacagacttcctagaaagcatcccttgtccttctgaagagttgtcggctagcggcgctacacttaaatcttcgttgaagccacgattcgacccgaaacctgcctggcggtgcatgacggaaaaccacagtttgtcctaaatcgagagagatgtaacgatgccagagtgtggctgaaaagcgtgttggaatgccgcaccggatgctattttgggaggaaagaacatggcgggagatgcggagagtccgaatccgtcatttcagaagagtcattgcgggcctttcttacgacaactggataccactatgcataatgcactggacatggtggtcacgattaccacaacagaaccttgatccggtggacaccgatcttcagaatcctggttcaactcgtaacaagatgtggctgtttaaactccacacgctgcacttgaagtcatgggtctcttctctctttgcggttgcacaagttgtcgtttgcgtctacaccgtcaccacacggctacctcgagtgaacccaactgtttgagcagtaagtcgctctattttcaccgaatcttgaggcaacctgtctttctcgacgactatttttacttgtttccattttttgagttcgtgttgatgtccacggtgtcgggagtcgagagacacagtacaatatgggtcacggtaccagtacgagattcagagatccagcgtcgtgcagagttcttagcgaagtgtataacgggtctcgctcaagctcttcacgcttatatatgcttactaacattctttgctctcattgtctcgatgcgtcgtacgacttcagtccgatctgtctacaacgagtaatgcacgcagtggctggctcttcggccaacagtttcactgaaatacaacacaatcgagtaccgcggttcatctaagcaaatgtacaggcccaccaccccgcagtttttccactctgtaaatatccacatggcgtgcgagcgaaagtctgaaaatggcacagacgccggtcccgaactttgccacactcggatttcgctggggtgtctgtacacccacagcggcggatgtctgtctctccatgagacggttcctcgccgtcaatttccgttgatgtgtcaaagatactgaataggatcctatttacgaaacacttgcagccaggctttttgtgattgctgatagtatgtggtactcaggacattgttacggcttcagttattttgaggtaccaacacccaagttctctatggctgctctgccacaccctcctggactgctgaagacagctgaaactgttagatttcaacatcctacggccctgagatttctacacaccagtttcactctagacgcgacagcaaaaaccgataaactgtggcgggaagccgaagtccaatgcttttcgttgtcttgaaaaacgcacttcagccctccgtgtcttccacgtctcgtcgcgagcaagcgcatgcaacccccgagtcaccgcagtcgagtagaagcagggaggaaaagcgattcgctatctgtggttttgttcagtatgaactttgtgggaatctgaagaaagcttaccatttccacttgctttcttagcaagcaaacgattcttttcacggtccaattcccgttttcctcaccgttcatgcattcactcgacgtcctgtcgcgcatgcatcgaatgtgcatctgcggagacgccgcggttccccggagagtctgttttcgcgttggcttttgtcattgttagttctttcccgttctcccctcgtctttccatgtattttgtcttccattttcttttcattgagaccctcttctgcctcttttcttccacacctccacctcgacagagcttcctcgggaggca

SEQ ID NO: 2259 - DNA, 2339 bp, Toxoplasma gondii
  source 1..2339: mol_type = genomic DNA
attttgtcgtcccaaactctgccttaggcattgtgtcttttaaacagtggggacctcaacctgtcgaagtttcagtgcgtggtgtctgctgacctccagagtcgccggcgtattagcccaagcgttccatacagtccggtgacactttccgcgtgcattcactacaggatatcggaggcaccgaggaaacgtcgtataccgggatgagcgaccgatcggccggttcagcgaaatgtaacgagacgaagaaacccaccagagcaccggatgcggatagtccgccgaaatctgttgcgttcagagtaggctctagcagcttcgtgggcataaggagacgccaacacggtgtgaaattcgcgccacacttcctgtccgacgcagaaatggtgaacatggcgaagtgatatcacatgtaacccgccgcggcgttaactgccacttcgcaactcctaggagtccgaagcttcaggttgtgacccggcgtccgagaggcttgacaggccggctgtaccgacaccgccgcccgagtccgccgcagcgcaccgttgcgaccgacggggacgatcgagggaaggacgtagaatgaatttgcttgggcaaatcttggccaactaaatgtaacaactccaggcggtcgaactaagtgatgtgtttccgaaaaacgtcgcctgttgtcaaacgcgatgtcggcacgttccttctattttacagcgcaaggttccgacttgttcagttcacgaagtggaaatggagcgccacaccatacggaccttactgaggaaggggtcaaaagaagatcaaatccgcctactacacagcttgacaatgtgcttgattgaaggcgtgcaatgaaaacacaggcttgaataacaggagcagcgatataggcgtccagtagggaaggattgcgctttaagattccacggctcctggtccgtagcatgtgctagcatggtaggactcttgccacccagatagactgagcaaaaggttcgcagacgcggaacgtttgaaacaatcttttatcactggactgcaggacaacaatcatcctttgtgcatatcttcggactggctcctttcagctgcatgcagctggcgggttacctccactcgcaaggtggagtttggcaccgagtcaaacgacagacagagtacactgttgaagtgtttcaagactacagccagcgcaagaatgtggtccgtcttcggtgacgagaacatggggagcaacaaacaagtgtggaactacggtgacgtcgattgactagcgttcgacgcgtctctcgtggatccgggtcgctaccacgcacagtagggtgtaaaagtgctaattcgaccagagctcttaaaagacagatcacatcgcgttcccgctatcagctctaagcctccaccaccctgcgtacttcatctgtgggatggtttgcctggacagagacatttcgtttcgataactctctctcgttgcctaagcgtgcggaaaccttcacttacgctgtagacgcgatctgtggcaaagtagtactgcgcgtattatcccatgcggccggaggggcgccatgcttccgcccgcgcccggttcttggcaggccactcgaaccagattccattggggtggtggctccgtttaatttcccccggaggtgtgcagcagttttgctggaggcgagtgttttgtatttcacctcattcggggtgcgactgttgtgagggagagatgaggaagcaaacgcgtggctggaagcactgaaccccctcttcatttgggacccaacagatttgtgaaccgtgcgaaggctggaagcgaacgacatcctttgtgaatttgaaagttcaaacgaagccagttcccgtaacgcctcttcgcagcgcttttccggagaaaggattcctaaggaaccagaggggatcgactgtgggtttccgggcttcgcgttccactgtctccacgtctccgagctccacgtgcaaacgtcctcgtcccgttgcctgctgggattctagctgcaaacatcgttttcgagcgctgttgtgttggttgtcattttcatcgttgctaaagggttcctaaaagtcaccggcaagtggtggaagcacagagcaggctgtgggtgggactcgacgcgctccggaaacccagcgtgtcggtggtatcgttggtatttttgcatattaatgtactggctttgtggtggtgtgcacacgcctgagtagctccctgcagtatgcgcgcagagaagagcgcgtgagactttgcgtcattggactctctcgacctcctgggtcttgtacaggtgctcagcgttttgtgtattctccgtgttacttgaacaaga

SEQ ID NO: 2260 - DNA, 2843 bp, Toxoplasma gondii
  source 1..2843: mol_type = genomic DNA
tcgagaggaaaaagatttcttcaggcctgaggttcgacgctttgagagcaaacgtgtgaaactcacttcactcgaaacgtcggagaaacgagcgtgtcacgagcacattcgcgttaaagagtccccagatcagacgcttctcgccgagagaaaaggttccagaggagcgcaacacctcgcgcgcagctgacaggaaacgcgcaaaagagatctccaccaaaatggtctgatcggatctctcgatgcgcgttcacctgagaaggaggaacgagaaggtggacgacgcctcgggtgctctgccaggagtgacctgtgaaccgcgcgtcggcaacgtggaaggcagagaacgtcagaaaaaacagcctgcgttttcaaggaggcaatccaagaatcagggacccgcgagcaagacggaggggcatgagagagagagaggagttcggggactgtcgaagggaaaggaaaaacggctgaacggagaaaggaagggaaacgatgtccaccaaagctgggcagaggtctccagatgcgaactctggggtctcgaccgaaagaagaaatcgtgaaaaaaagagaaaaatagaaggaagggagagcgagaaagtgtcgtgagagaaacctagactcaaagtgaaccgtaaaaaaagcacaaattcgcgaccacctttctgagacctcacactgctcacccaggacagttcagaaaaggaagagaggacgcacgcgcgagagagagacgcagcgagaagagaagagaaaacgaagaaagtgacaggaagaagaaaggaggaaagaaggaaaatgaagaactcgggcagtctacacaaaaccgacgtgcacgaacggttgagatggccagaagaagtgtcgggattgcgagaaacacagaaatggattaaactgaggatggaaacctctgcgatttgaccggaagggaagccaaaaagaaaagaagaagcaaacacatatgacaaaagaacacgaaaaaggaacccttgcgcttcttctagccaccgggggcgcgggcgtcgcgggatcgctaggaaagaaggcgcacaaccccgagaaggcgagggaaaaaccttctctgaactcgcgtttctctcctcaggcgaccaagggcatttcgaattaaaggagtgaaggaaacgactcaaaagccgcgagaaaatccaccggttcgtacacctagacaaaaggcagcgacgggaacgctctgccaccggggacacattcgaggcgcagtcggatcgtgcaagtctgcagaaccgggaaagaggagagtgaacgcggcaacagcctagccatcgaccacccgattgataaatgtaacgacgacgaaggaagagaggaagaaaaaagggaggaagcaagggaaaggaacggatggttagtcccctgggaagcgggctcctggtagtttcgcgggttcgctgttccgcaagtgaagaaaagtgacgaagattgggaactggagagcgccggttgtcttaaacggatttaatcgatgcacattgacgtcaaacacaccttcttttcaaacgcagcgcgaccgtctctgcacacttgcgatttttcttcgcggctcttctcgacagacccgtcgctagtccgcatccgcgcgcgctgttccgaggtttcctcgatgctgattccatctcgagaatttggtttcacgttgttgttgacgcgcggaagaggcctactgcagcttctgcgtgatttcagaaagaaagacaagaaaatctcgccaaacgaagccacatagcgacaacccgccctcgccctccgcagagcccccaaacgttcccgttggtccccgcatttttcatctggattctcccgcctcactctgaggagaaacgcgcccgaaaaaacactccttagcacactttagctgcttccgaagaaggcggcaccgttgtttctaagtctgctctgatgggcatcaaatagtgaagtcgcacaaccgaacggcgtgtgccgcgtttacgtggaagccacgccagtgtgccagtcgcgtttttcttcctttcgtcagcagactggtgaaaacgcagaacggtgaggtgtggagagagacccaagggactgtgtgtttttctaggaaagggaagtcgtttctgcgactgccggccgcgagcgacgtcgggttgctctccacggttttgtatgttaaagttgggaagtacggagttgcagttggcggaaacttttgcgattcgaattcccggaaacgcttacccgcacaagaagccttgaagtggtgggacctgggagttcaaagtgcttctcagtgtgattttcttcccttcctggcgttactcgcctggtatcagggaacaagccttgaaacatctgcacgggtggaacttagacgtcgtttcgattcgcgtgggggataaaaggagagtcagaccggttcgtcggtttcccggattcgcctggagtgtttcgcattcatgagactcaatccttagaggttttttctccttggtttttggtatgaagtgaatctgctgcggccggtggtatgccttgttttcctgcttcagcacgtctcagtttcgtcctctccgagttttcttgttgccgtcggtctcagatggattgacacctattcctgtgttttctttacacctctggaagccgcgcttttctgccgtttgcgttccaccactgcctgtattgcctgttgtcgcgacttctcagtcgttttctcgccaccagtttcaggcccttcaaaatttcgtttgttccagtgcatgccgcgcgtgcagaagtgcaccgagtgggtgcgtaattcgttttcagtgtttttcccgtccgacagttccagaaaa

SEQ ID NO: 2261 - DNA, 2124 bp, Toxoplasma gondii
  source 1..2124: mol_type = genomic DNA
cattccactccagtttgtcgagtctgctgcaacccaagcggaagatgcccacagtcttccatcattttctccacgcttcagaaaacaaagacagaattgcactcaccgaagcctaggtattttctcatgcactcaccagtcacgagcacctcgaactaccgatctcagtcccctgcactacgcatatatatatatatatatatatatatatatatgcttgtccatacacgcatacgagcatcatatgatctctctctctctcaatatatatatatatatatatatatatatcagcgtattcgcagattctttctgttcttgcagaagtttctgagaagcgtttccactcctgtgtgtcgggtggatgaggaacgtttatttacgtttcgtttctgcttcgcgaggagctctgtttcgagcttgagcgcgcgtgcaatgaagacaatctgtttccgagaaaatcttcaatcctgacaaccggcgcgacgcatgcaccaagcgtttctgtctcggcctccaaggttttcttagaggacgaagaaaggacattttcagccgccatcgcttgatttttccgtcgcagtctcccataaattgggcattgcctagggcctcgtgttgcttctcccgacctcgttttcaggtttctgtattttttgatttcgtgctcgctggcaaacgcgccagcaggatcgaggatctacaggcactggtttcggtggaatttcgcgcttcttggtgttcgcggcattctcccttcctccttttctcctcctctgcagctcttctgcacgcgttaaccgatgccctcgttcgatggatagaaattcttcgaccccccaacgtggacagccatcgattgccgctcaagggatagagagacatgcacctcagttttcgagcgacatgcacctgtgtttacctctggagatacaggttgcagtgacataatggttgcagtgacaagccgctctgtgccgagacgtctacgagcactcgcagggagaggcgagggaaagaagacgcagatatgcgcgaaaaggtaggcacttgcatgccggcatctacaggtagagatctgcgcgcgacattgagcactctctgattttccttttcgtgacgaacgcgtctctctgtgcaggacgtagctctgccctttttgaggagacggcaagaccagtacaaatttggactgagtgaccgtcttcggtggtttttccccgaggccttcttcgctgtcgaaacagatcgcggcagagacggatctcgagagcttttagtaacctcctgtgttgcggcctcggtcggcgtttctcgctctccgttgcttcgcctccccgttctcgagccttccgcgcgctgtcgtcgaaaccgatttcgctctgcatgcagcccagagacacgcaaagaggacagagactcttttctcgcgcgagtctcgttgagcgctcttgaacagaggctctgcggacggtgaagtcagggatgatgaagagtttttttccacttgcttcctctctcagtctcgcgtttctaccatttgttttccacttccgtactccccccccacagaaacttctctgtttacgtctcctgcggcgtgcatgcgctgcagcggatcgttgaggggcaaacacggagctccagacctcgcttcgccgctcttttttctcttcggctttctcctcgctctcctccttttgcaggttccgttcgacgacttctctccagaatctgcgtagcgagagacgccaggcgaaaggaagtcgtcacggcgaagcaaactgtcactgtcttcccttggctgcggggctcgcgcgtcgttgacagacgcttctgaaatcagtttccttctcctctcataaacacaggctcttcaggctcttctcctcgccttcttcctccctcacagcggctgcggctggtggtggagttctgcgtttgtcctctctcttcgtccccgctgcgtccaaacatttcggaggacgcctgccttgtgttgacactctggaaacgcgtcgcttcacagcgtcgagcctgcttctctcttcgcctcgaagccgtgagagaaaccgcaagaacagaatatttcggacgcgaaaaacgcgagcgcagtccccagca

SEQ ID NO: 2262 - DNA, 2378 bp, Toxoplasma gondii
  source 1..2378: mol_type = genomic DNA
gaataagctagtgcagattggatagccagtgtagcactgagagttgctttatcaccaccagaaagcttgaatatcaccacctgtactacaattcaggtaagtcgtgcacatgcagtagggtgcaattcctttcgcctgctgtggggctcatcgaactctggacaagcccagcgagtctgtattcagcctcacagagagcagacgacaatgtttcatacattcattaacagtcgcgccccagttcgtgcgcgtcacaactcatacacggtcgatgctagagaagtccgaggtacatagcgtagcctatacgtcgggggaccgcattgttcgaaatacgcaaggtatcatggcatagaaacctggatgtgagaagaaagaacaaaactcagttcgctggcgcctgcgggagcgacctagccggttcacacttctgaaacacgaacataatccatgctacagctcattttccccaagcaagcacgcaaatactggcaaagttaccacctgaaaagacgttcggttataatgagccacggggttcggttgtaaaactgcagaaagcggcagtggacctcagctattgacagcgccactgaagcgtctttggatcgttaatcggaaaaccaatcacagactcccctgcatgcagacacaagtgttcctcgtggcaagtgcagatgactgacgacatcactaaatgctggagaattttcaacatcaggttgaatgagcctgctgtccggcgaaacgccattgaggtatctcgctggaaacatgaatgcaaatggcttgccgtatcaattgaatacgaatgtcttacgaagggtgaatgctaaactaccggtcgaacctgcatgcgcacatgtaattccttcgtttcgattttcacttgaggggaacgggccgcccccgacaacagatgattcctcggactgagaccgttgcattactcacgtttcactattataaaaacaacacaggctttgaggggggggaactggtggtgcttgtgtaacgccagaagaacttagatgctccctcagcccttccagcatcgagaaccgtcgcctgggaaagaacagcctctgaatgaactggttcttcccgggggccagggtacttgataagcgcggtcctcgaaatgctcgtaggcgaaaaaaacccgcgctctttgctttcttgccttgtgtagcttctgccttcaacctaaatgctacgcgccagtctgtcgtcgcacggcctaaccatgtctcaagcagctggctacgcggaaaagaattgcttttcggaatcgcggatggtttccttatcaagacgaagccagtgcatcatccatcccatcggattgaaacgagtagttaatccgtcattactacgccagaagtgtggctttttcgtcggcctcgactagagtgtcggtctatgacggttgttgtatgatgccttccgcgtcgcgctggcgcgaactaggttcgtgcactggagatctacgactgcatggtcgaagaaacaacaaacgttatcctttgctgcgatcccttttcccagcttgcttggctagaacatggacagaaactcttccgtgatcgtaaactagttggtttcgactgtatgctctcaagaggatttcccgggtgtgcatttgtagacgggcaggtgttcagctgttgcatgccgcaaactggtaccttctcatgcgcgttttccagcatcgtcctcaaaatgtacaccaaaaatccgtctgtgaatcacaaatgaacagctttcgtccatctgcttttcatctcaaaggccgaggagatcctctagtagacagaagaacgctcgaaccgtctctttcccttctgccgacagctgcgaaaggcaggtgacttcgcgcgtgctctcacgcctgcccaactgcggttccgtcgctcgacaaagtttcctaaccctcctccttcactagaacattccctgaaatgtacagccttcgttcactaaactttttttttcagtgcccttctattaggcagtcttttcgagttcccagactgtgtgtgtgccttcgctagcgtcccggctcttcgccgtcgttcagcattctagcctcgcgcagcacagcccgttgcttaactggcacgtcagtgactttcgtccccactttcgtaccaccatcgcgtcgccatgttcacagcgcagtaggcgagctcgtctctcgagctataggaaagcttgaaacgctagaccgcgaataacgcgtagctggccttcgcctcacggattcttcggctgttcgcacacctgcatagacacacgcctttgtagacttttacctgaagcattcgtggcgcgtttttcttcggcgtccctaacttcacctggaggccaccgcagca

SEQ ID NO: 2263 - DNA, 4108 bp, Toxoplasma gondii
  source 1..4108: mol_type = genomic DNA
cctcttgtctcttgcttttctgttgatctgccgcgtttcccacacgtgccagccaaatgtctttctcgccatccttttttctttagacgcaggtttgaccccagggcgggcagggtgtcttacgaggaacgcgaggcgcgggcgtttcttgtgtttgtcagtttgtggcggtttctgccgccagcgctttgttccacttgaggttctgcgacggtaaaatgatcacaagagaactccgtgactttagacgacacacctgtcactcctttttgggcgttgtgcacagaaaacatctgaccatgacatattcgccggggccctcctggttcggggctttccctgtgcgtctcgggacggctagttttcttctcgtggcttggagattcccacggacagagcagaagggttgtgtatagcagtgataaagaactcggttgtctgtaccgcctaactggaggcatattcagcaccttagatacgatatggctttgcgatttgagtcattctaatctgcacacataagatcactaactattacattatgctccgaagtgtaacggcacaagtcattcgctgtcagcaacgtctctcctagcttccctcagagaagacaccaacgacaccggattggtgacagaaaagcgcgattgctacattcccatatcgaaagactattcgattcaaagaaatcggatttggtcactgctcgcacgccgtcgggagacgaggggtgcactccaagggtgcttaagaacaatttaccgtatgcgtgtagaaaggtgtggagaaaaacgtttccatactgcgaaacaaaaggaagtaccattgagtcgcgtcaccaaaacatacaaacggatcctgaacgacacatgtatcggcttaaacactttgctaaagaatgttacgaacaaccttgaacacgttggaacaattggacctcatccggttgtgtgtgggttggagcagcgtgaagcaggcgcccagtttagattgcgaatctatgctgaagcgagagtgttacttgtcttcgaaggaaatttacaaacagtaaaaaagaaagccatgcaacctttgttttggcggttcttttcgtcggcatgcggaattggcgcgaccgctactaaatacacagactgccattcgctgacaaaagtaatccttttatgagtatatgtgtgcagaaacatgcagaaagaacctctaagagaagtcgaaacgtagcatcagaagaggagcaaccttgacgcatgtactcaaatagttctatggtcagcaacacgatgaccgtatccccccccccttctccccgcctcgagggaaggttgtctgttcaccgggctgatggaaacggtgttgaagcagttgtgcgcagaagaaaaactacacttgcagtcggcggggtggattctgagaaggaattacccttttttcatgcaggaacttccacgggactgctgtgggcatagagagtttttacagagtactggttttctctgcgttgcgctggtcagagactttgttgcacacggacagttgtggtatggactgaaacggtgagatttcatggcacgaaaggggtgttttctcagcgaatcaaccgacccttggggctcggccgctgttgctgagtggtctttcgcgttgacagaactcgcaaccttccgcctccatggtttctttatttaatattcgccgagcgtcctcgccgactccccttgttgtcccactttctgtatttgtcattttagaaacccgcagagagagaagggacaaaaatccagaaacacctctaatgttgtgtggaagaacatgaaagaatacagctgaaggtcagaagcaggccaaggagaaaccgtgtttcatccgctggcctccagacttgaagaggcacttccctgtcctcatttccgttaatatgcgtacacatgttacatccacaagcacaagaacaaatgttcatgcaattctattcatgtttttatgcaccaccccaatatctccatctgcgcgtacttcctatgcgacatacataatctacagtacatgtctggttagatcatttttttttcttgatgcctctgattatttgaatgccacgactgtgtcaaggtccctcgttgggacatttggctgaaaaacccagtatactcgacggctgtttcctccgtatctctttatcggagtgagaagaaccgaggcatttcagctgcctcgattccttttttctcccgcccgttgtcgcgcccatttttctccagttctggttgaccgtggaaccagcccggagcgggcggctctatgcgcgcggtttccgagactgtgtgtgggagcttggattgtctcgactctctctctgcggggattacttgaccattgtgcatgtgtaattcgccgtggccaagcgatcttgcttgtccacctttgtctcttaagcccatgcggattttcttgccgtcaggaacagcagttcatttttgttcaacttcttgcatccgttgcttgtgtttcacagacgcgcgagcgcgcctgctcgcaacggcagagttccctttttacacccgagcgtcttgtctcgctttgaaccaaagtcaggtccgtctacggttcggagaaacgaagtcgctgcgatgggagggaagcctacaggtgcgagaaactcaggcttacaatttttgtgtaaatcttgcgttccatgtgttttgagttcgtctcttttctttgttcccgctgaggaaaaagacccccgttagcataccgcgtaacccggagcgactttctccacgcggaatcctcgggagaagtgcacatatgtctgtgtaccggaattaaaagagtttcgaagacgggaaagagggcatctgaattttccggaaacccagcactttcccttctcgctcaggcctggtgaccccttttccacccctctcatcttcggtaaaaggcgcgcgtcactcctgcgtgaccacggcgtacgccagcgacagcgcgagaaagcgtcacatgaaaaacgcaaaaacgactgactttcgcccctcgctgctgagtaacgagacagacacacgcgtgtgttttctaccacttgcgcgctgcttttcccaggtcgtcttccccagatattccgatatcccgacttctggtcgagatagtcacggtccacacagtccatgtagtggcggggggtggtcggagggctgccatactttaaatccgttgctgtcgcccccagtttcgctgctttttttgctttccgtccacaggtgaatcagcagacgggaacttccacgcttgagcgcggagcgcaacttgcggggagcaaaggcgagggtgaagttgcgtgggacgaactgggaggcggggcgcgagaaaaagcaagaaagggagtcgcgggtagaaaaaaccagaggctggaaaatacgaaagggccgaaagaaggatagaaggcgttttccggcagcattccgacgtttttcttactgtgacgagcactttgctccatgtgcggtgaagtgggggtatctaaagcgattccccgttttttccgttcttgtgcacaatgaattgtgcacgagtgtgaatcctcatgctgccgccagcgaccttttccacgtggttgcaaggaggcacttcagaaaactccgattccaggatcctatttctgttcagccccaatgcaggtgtatcagctgcacaaggtgacagagagtccgactgcgagcgtgctgttgcgagaggtgtcaattaacgcatgcaagagtaccaaagaggctgttgtggtgtgcaagaccctgaaaatccttgttcggctgctccttttctaggtggatgttcacgctcctccagaaagccaggtgccatgcagcctgtgtcgaagagagcctgtgggggaggagtgccgtagagaccttatcgtctttcgtgcggctccgtgatttgaaaggaagctcgtgcaagcgtctctgtcgaagaaatacagagaacatttcgcgttccacctagaccgggcgagagtctgtcgtgactcagcagccgcctcgaatctgcttctctgcggtcgcgtttgccgtctctctgccctgttccctgtcgaggagctctcttttcttgacca

SEQ ID NO: 2264 - DNA, 4674 bp, Toxoplasma gondii
  source 1..4674: mol_type = genomic DNA
agatctgcgaatggaggagcagctgcgagacgaaaagaagagaaaaaccagtggtgatgccgtgcggcgggtccgacctccacacccctcaagaaggtgatgcattcaaggatttttcgccgtgtttatcttggcaagtgcatgctcgcaaagacatgtgagtagaaaggatcggattcttgctggcctggcacctgtttaggaactgggtggatgctcttcacgccatcgtgaaagtctgggtgtaccggatccaattttgtgtgtgtttctgcgtgagttttcggtgtgtctggacacctgtgtaagggaagtttatgcggttgacgggagatggacatgtgtgcatagcgagagaggtgcatgcatagagggagatggagtgtggagagagggtctccggcctcggcgggcacgatgacagatcgtggtacgacaagggaatcagggcgcacagtgactgcggagatgtccacttcgtctcccgagttgttggcaaaaagaagacagtcgagagcggcagagaagagtgaagagaaggcgtctgagtattaacgaaagactggagttcctacagcttcagcgttgtccgcgcccatcttcaagctctgttgtgtttatttggaaacccccacacgtcagtgcctcagaatgagtttacgatgcgtggatctccaccctttcaactgagaatcatcgggataggcgtgaatcctggtaggttgggaataggcaaatgcacttgggtgttcgtcgggacgagcgacctaacgaaacgaacgacgcaaacgaagacagcgctctttcttgacgggttgtaacactcgaaaaacagaagaacaataaaatgagaaacgcatatggcggcacaacactcttggaatccgtaccacttcggtgttgagacagacacatcttcaattatcagtatcacctttcccactcagctgcaagttgcacaagacggtgcacacacacagaattgcctgattttcgatccggacaagactttcacaagacactgagtgttcgtcgagtcctcgagtggcctcttcgtgtttctgacgggacaaggctttgttcggcgtaacgcacggacgccgtcttgcttctcgcttgcgctccgtttgttggctacgcagcatggtgtcaaagatgaaaagagggggttccgaaacgatcgagaggagaatgagaggcatccaggtgaagaaagctttcccacattctttcttctgtccaaaacggaacgtgttcgacaagcgacgcctgtgtcattgtggtccatcttttttgtcaagacgagaaatactcacccactggatcggtttcctctacgagtgctggattcccaagcggcgcttcgttgcgctaggggatctctcaggcggaagaggaaaaacgaaggcacttttcttccatgactgtcctgagagattcttctgcttgcagtagaatgatgtaaccgcaactgaggtgagaaaaaacaaatctccaggcctagtgctgttccgaccacatgcccttttcgttgtgtcccctcaaaagggatggtgacagagggcgtcaggcgtttctgtcgtcttgaaagtttttgggaaggtaattgactacggagcagcaaactgaaaatgacgtcttcgggcgctcctcttctctccacgttccacgactaggtagactacacgctactcctgcttcttccattgatcccactacagaaaaatacggcgaacgcttaaatgactcagctgatgatggacaggcagtaagctgagtctaccagggatttgtctcgctgccacatgcctcttccggcgatgaagacagaacgcgggacttgggggtttagggtagacggcggcgacctctgttagcacttgagtcgcgcctgactgattcgctgtagtagttgttttgaagacttggagaaatatctagttactccccgagactctctcgcgcggcaaacgtggcgacgaccacgccgtcgaggagccctaccccgctagacaaaggaactgacagaccttgtccatgagggcccgaaaattcacatgacacatcaagacttccggaacgctgactggagcaacgcagaaaactatcaagctcagtgattgccaaattgtgttttagacgtctgggtccgcctctgcgatcttgccaactcatctgggctggggtgtaacgagagtcgcacgtgtcgcttgccagctctgcacttgtacacaatatgtgacggagccagaggcaggtgaaccgaatacgtttttctgcgtgaacagggaggacagtgggattttagtatcctaccggtattcacgtttgcttggatgctgtagtcaataacaccgttggcttatttgctgtacagcaccactccactgcaccgcttacgacagctggccatatccttcgtaggaagccggcactaaggacgtaagatcacagattgaccaagtaatgtaatcccgtaagaggtagataatatccctcgtcatgcctgaagaagccgcgttgagaacagtcctcacatgttcagcggggtcgaaggcgctatatgagctcctttacaaaacgcctatggggaaaactagtgcttagagttcctgtaaaacctttacaccacttccagatgactagcttctgagccgatggatagcccaccgcgctccaaaatgaatatgacaaggacagagttcacaccttttccactggtcactgccaatattacaaagtattgccttttcaaaggtccagttgccaggaggcaaacgccagaccgacaacaaagctaggtcgtctgtccttgcggtctacgtgcagagattacccggtgtcgcgagcttgtactgttgtcgagaaacagaagcagtccactccgctttcataaaatgtagtatccaaagggtgaataagtccgaggaaggagacaaagcgttaaaggcttcgttctgtcctattcacgcatcgcatttcttggtgaaagctgtgcctgtcgactgccctatgtaaccctacagctggcctcctgccccggagtctcgaactatgtcgccgttgagaaagatcgcattcactatttatcagtcgtagagagtctgagagaagtcaaaaaaatcgttgttttctgaaattgattccgcctatttcgtaagtaacccaccaccatcagacgctgccaacgtgtctcaaggcgcgcccaagcacaaacctggtcacggggcttcggaatgccgtaggttcgaaagtgtcccagttccttgtgaaactcggggttttcagtaaaactagacagtacaatgaaaaatgaaaggacggcagtcctccaaaagatgcgaacggattcttctgtgttcagcgttacggatgatactatcggggcttcctgctcaattgcaggtggcgggtgcgcgggtcggaccagcttttgcgctcgtttctgaaccgcattcttcctagtggcatcgccttttgaaaagatcgtaaaagcgagtcaaaacagacgccgcggctaccctggcaattgcttcttctccattgggtttcccagagtggcgcatctacaattgacagcgttgcggcttcgcgaaaccggtgcttgttcttttgtgtctgtgtcttgtcgattcgcgtgcatgctattacagcgctcttagctggacgttgcgaacgacggatttaaccctcaatacgaatcgtcgtgaataaagtaccatcgttttttccaggggtagcggtgtgtcagagagttctaggaaacgagaatcttctcagcgtgagctgcgaactggtatcctcgcggcttggctccgattgagcagttcaatttccttcgtaaaggctccctcaccgcaagaataatcggcaggaatctctttctttgatgatttaccgtaaatttcttttgtaaatctgccgtgcttcaccgtctcctgactcaacacttcggcgtagtttctttgccgctgcatatggcggcggaccgcttagcttttttctgttaacccgtctatctgtttcactcgttcgtcacaactcgttcccgtgtgcttgccctcttaaatctgtatctcgctttcttacttactggccagaaccgtcgcggaacgcgactgtagcaccgtggtctcggtacgatgacctagtcggagtcccggcagccgcagcacttgagtccgcttttgcttttcgtaacaaagaaatgccgggctgaaccccaacgatttgttcagagtgagcagcagctccggtatctggataactgtcatagaccgcgggacaaagcacatggtaaacactaatggcggatcgacccggtgcgggttgccgtctgatcgtttgtgccgtgtgccattccactcctttctaggcgcgcaggctgtattcaggtagtttttccgtgtgagtctcctttgcagacttattgtcgaaaccgttgcgttggactttcacgacgggagctcgacccgtctcttccgggtacccttgagtttttccctcactctcgctgcgtgcagcttcgagttttcatcgaacgcacgtttttccgcggaaccgcgaggccgcggcattcatcgcttcgcgagcaggcctctttccccgatggagtcggccggtggctcgtcagaggttgctcgtttcataccgacgccgctcggacatgagaaa

SEQ ID NO: 2265 - DNA, 2751 bp, Toxoplasma gondii
  source 1..2751: mol_type = genomic DNA
gacgccaaattgaggtcctacgtgaagcatcttccgttaatgttcaccataacgtggagggaagagcaagcgtacaatacgaactcgtctaccgtcagttttcacatacttctggtgacgatactataactgtctcgagcgctcctcgatgggatacacttttcactttaaggcgatgacctatttgaaggccagtgaaacatagtccatggtgtccatcgccatcacagatctacaatcactagacagtcaacagcggagttcgggtattcctccgaagcataccagataccaatgcaacaattgttctgttttcttaagacttgcacgtcccttggatttggatgctcgaggcgctggtgtcctgagacgacgagggacaacggcactgagtttggccaggtcccaccagcgtccactcttgggtaagagaaagtccttaaagaactggtggcaccgtgctgcataacaatccaggctcttcctggcatcttttaggagtattgactagtgtgatggcaaacgttctgcagatcgcttgccaatcaaagtgttttctcgcacgaaaccctgcgtgagactcgtttacatcgtgacgcagtgcaaacacttatcgcgaactctctcttgcccaaaccaccttagaatttcccggatctgcatgcttcaaactgtacacagatctctccatgaaagcatggcagaacagttgtaagggtgcgtgacaggtgttgaacatcggtgacaaaaagaagtacattgtcgctttgtcggcgtgtttctgtggcagctatgttggctttggggcaggcagccatttcagtaaatgcaaacatgcagtctcacttttccggggaagaggttttgcagtaatatgtgccgtcgtgggtaacattatcgagtttgctcaacgattgtacagaagcagggaccacggtgcccgggcacttcacttggccctaccttcggcgctttcccacggcagtgtggaagccaaagtgccaccaaaaagaactggtagatgcggtacacaaaagaggtaaatgtggtttcaaaaaatacacacgaataacgcgcacacacacagtgcaagaactcacaaaaaagttgaaacagtctgcacaacagcactcgattcactctcacaggtggcccgtgccccgtcacctaaagctggttcctgccaccgaaagtctgttagaatgcggtgcaaagttaactagcgacaaatgaatacatcagaagccttaaactacttggactgtccctcggatggtgttcagtaccgagagcacagaagccttttccatttcttgaggacgcgacatacggattgcagtacgcttgtacgacaccgagctgcctggcgctgccactatcccgggggctggacacacgctgcgttgtttcaacattatacggacgcccgagcaggaagtgtaggttcctgtaatttgagagaagccttcttttatggttttctccttggaaaaagtgttgatgcgcgggcagctgaaggggtggccatcctgtgtgtcttagcgcagccccccagacaccctctctgattcccgagtggagatggctgtgaaccacgtcgcccagcgctgtcccagcttcccgagtttcttttcgcgtttcccttggccacttcagtttcggttggatacgcggcacacgaggaaggaagttttcttgattttttgtttcaatggtcccacaggccatgccagtcgaaaggacttccgagcccgcaagcggctcgcacatttttttccgcagggggggagctggcatgtccctactgccgtgcaagaggccgtttctgcgtttccaatagatatacaatgtgaaatcttcttatctcgccttagtcatttttaaggatcacgcgaaacccctgctgagtgtatggtctggcactgctcttccagattcttgacttgcagcgcaattcgttcctgcgctgttagatcttcccggtgacgctacgatcgttttggactctggcgcgggcgtcagccccctggtgtttgcttggcaacttccgccttctttccctggtgacctcttctctcgttaccacacttattcctgctcgtttcttctcctgttcgttgattactgcatactaggggcgctcgattcacagaccgccgcctgtccgcccgtcgctgaactttggctaggcggtattttcagggacttgcttccatttctcgaaggctccatgctggacggaacgcggaaattgccggcatcgattggataaagtgggaaatcgtcaccacatctttaagagagcgtcggagatccttttcctctgccgttctgttccggcttctttgtgagcagcgctccaccgtgtctcggcttccacatcactccacagttttcttcccagcccactttccttcgggataccaaacgccctcttcttaactcttcaggcgtatcgtcaagacttttctttcaagtccgtgctttcttttcctcgggtgactcccaatctaaacctggggacgagagacagttctctctcgcaccccttcctctagagccggcctccgcgtcgacggcgactgtctctccacctctctccgaccaatctccttttttctccaaactgcgtcaagcgtttcttcctattttccggatatcgtaggtctggccgaggcaggctttctgctgggcaaccccagctgcacagatttcgcacgagagaacaccgtgtctcgtctgtggcggaga

SEQ ID NO: 2266 - DNA, 4847 bp, Toxoplasma gondii
  source 1..4847: mol_type = genomic DNA
acttccggatctcttatcatctccgacagtggccgtgttcggtcactgacacaggttccctggagaagggcctccaacgagaggtcgccttcccctagaggccggggaatttgggccgcggtttcggatagaaacggcatgatcgcgtagcagttttcgtttttcttctcatctcgaggtgcgagcgaagtgtctgcagatcgcctctctgagacgggctccttcgctccattccttctgctcgcgtaggcgagacatgcacgcgacgccagggtcggtgcgagttgtctcggaggagatcctccgccggcgtccatcatgtccacctcgacagaagaaacgctcgaggttctgctcagctcttccgactcgtctggaatgggtccgtggttcggactggctactgcgccagatggaacgtgagacgacacgggaaccagtccagtcgacgcggaggtagtcagccgactacccccggcaacatcgaccgctttaccctcatattcctcggaaaccaaccgcgagtgaacgtccggtcccagcagtcgtcgtcgtttcaatatgtctggatcaactgcagctgagagttctcgcgtggaagcctcccggcagcggctggcgtgggaagcggaaccggaggcgggcggacagctcacatcgccatggtgaagaggaacaaaaggatcgtcgtgctcggtccacgcaaatagccgcttggcagaattctgcccctgtcgttctggatggagggtcttatggtggtgtgtcgccatcaacgaagtgtaggaaaataggttttaagaaacaaagcatccaaagcggacccgccgggccccctcgcgaagaagcgacaaatctgcttaggcgaacaaagacgaagcgccagacgtgtggacgctagcaagacacgccccaattggtgctggcaaaaggacggtagaacgtttgttgtaagcacgaggaagttgaggacttcgttctccgaaggccgccctcctaaccagtgtttcttgacagacgaaaactaggcagctgtccacgtgccagctgaagcttctttttcaggctcattctgcgcattcaggagccgtaccacggggagagaacagccaaaaatgcaacggaaagaagccgtccaccggaaaaaacagtatgccctcaaacctgaagcaacacgcgaagaacttaccaagtccctcgttcaccgcgttgacgtgcaggcaaaaggagaggcgaaacgcagaaccgagagctcgaagttgccggacagcacgcgaaaacctggatgaaggcaagcgagctaaaatgcagaaccggccactgtcaagaaaagagttcccagcaagagacacacacacagctggacgccggaaagtcggcgcaaaacagggttcactagcaaaagcctcgatatcctgaaggatggcttcgattacctaacctcccgcctcaaaaactgttttccgcggaatttgagagtgcttttctttcgaaaacgcatgccccgcgcaccgcaggaaatgccaccgctcgccaactcttccggggcaaagccgttccgggattatgtggtccacggaagcgagtggcggcacgaaggtaactcacccagctgtaggacctcagaatggattcacctacgaaaatcatcctatccccataagtgtctcatgagcaacaaaagtcaccgtttccatggtacacaccctctgaggccaaccatggggactggaggcgttcggttaacaaaactcgggggagacacgagtcttacagatgtgcagctagttcgctgaggctggccaagatacgcgcatgcaacagcaaatggccgctgaaaaatcacttatatcgcgaatccaccttaggattccccaggattcttgtcccggacggtggtgcatgtcaagcttgtttgcagatggggagctcacagccgagggtctggccacccgacacgagaggtgagcgtttgccggagactgacaacggcaacgacgatgtgaattagacaaaaaaacagctcttaaaaagtaagcggcgaggatcgagaataacaggatcggcctatggcttctcggttgagtaaccggaaactagagcgcgcgccggaggagaagctgctggtaagggtacgcgtatcaatgagcgctcgacagtacccatagcgggacctcgcctgaagcaggagagattacctttggaacgacgctttgaatctgtctctgactttcttttaaactcacttcggaagcacactcacgggaagcgacgccttacagtcgccccagcttgccctcgaaagaccaaggatccgctgcaccgtgaaacgacgacgagcaggcaacaaaacatgttcctcgttatcgtggcaacagtaggtaacatggcagtggggtagttcctcatgattaattggtccattcgttttgcgctgcccagccttctggaagagtgccgtgtatcggcgtagacggggataacacggagagacaccagctagggcatccgcagtcacagtcgtccaggtctcaacctcgcgtcaagggcgagactctaaagagcgtacttatctctccgacaactgccgacaactaaaaagtcgtcttacgaggagagggactttgaagaacgatacttcccttgattaacggaagatctgtcacaatttttgaggcaggcctcacaaccacccaagtgatgttgaggtgatctcttgtataaggaatagcaagcgacaggctttgcctcatttctatttgcaatgatgtaccttctacaaggcgatttcaatgacgctgatacacgttcctaaacgttcggcgacggtgcgttgtcagctgcaccgagaacgattcaagcggtctctggaaaatagttcagttgattgaaaaacagactacaagctttctcaataaccctgtttagcgcttagggtccttgaaatccgtcgtacgaaaagtccttgtgtgtaccttccctctggcccctaacggtgctcagcgcaaaaagacacatacaagttgaattgtttaagccacaagagaaagtgtctatggtgttgctgacgagccatctcgcgtaagctcacgttttcaatcacgagaagcgggaaacgctgaatgcggtggtcatggtgatgtcaatggcagtgacatcaatccacggatggtgtatcttctcccttctccacctgctcacatcgtagcattcaaactggtgctcgcacacctttgtactttcgccttccatgaaaagagaccaagggctgaagttctgttggaggctgattatcacaatccggtcggctatggacctcacccctatccgaaaaacgtatgtggcaatatccgtgtgtctcagatacaaggctctggaggactttacgagtactgtaaagagcgtgttcgatgtactctgcagataagtcctcctaccagactgctgtgagtgcgaaagagctgtatgtatacctcttttcaagtcagttcaagcactgagcctgcggacactatgcttgcgaccccctgccacactgacccagtaatactaatgttcacttccgccagccgaaagggacgagaacaagaaacaacgagttcgaaacgactttaggcagaatatcaagggttacatttgcgttatcttccgtcctgaaacctttttgtggcggcatggatgtgtcgctgacgtgacaggtatccgccgcgcgatgcattcaagtcactcaccgatatctgggggcactggccccgcgtacgaaccgaaagagttgccaaagtaaccccgaatgcgccacgaagatggaaatgatatcgctgtataggtacgcagtgtgcgcggcaccctttacggtgtttgatttcgcaagaactcgcagacacgcctggacagcggtaggccagtcgcctcctggtttgcacgaaagtgacactcgggactgacagtgagacagttttaacgttgccgttatttaactgaaaaccacatgaatgaccagacttaatatcacgtggctattcttcggtcggtcttggagcttctcgaacacggatacagcgctgttgcttgtctgtctaacaaaaatcgcatgaatcgatgccgcgagagccgctttgcgatgacagtggggtcaagcgggcagcgctcgactgaaatttccacagacagttaaaaagcacagccggtctctacggaccgtttccccctctcttttcttactactctttccaacatctgtctcgttgtcggctttccagacaaatgattggcattttccgtagtcatgcggtgggaggccctttcctgtcagctttccgcgcagccccacaacattttctttgttcgaagttttttcgtggccttttcttggcaaattaaggtacttgcggactgcatctaaagttgaatctgcgaactggcttcttcatacagagcggacttggatttcaccgtctgctgagaatttccaaggcatttgagtgccgcgcggtagtggtctccattgtctctcatagcaatcgtactcgacatccgcgttctccattcttacctgttttgtccaggagttttacttgagctgtcgctgctccgatagttccaattttttgggggtcgactggcgtggttgagactgagctgtcactttcccttcaacccggtaactcttttgcaacttgacgcgtttgcgtatcacctccagctcttctgctctccagaggtttccttgttctggtcctcctttttccgttccttgacttcccttttggcatttttctcgtccccttttcagctctgcttcctgtctgccatcttttgtcctcggccctctcacatcgctgacgcga

SEQ ID NO: 2267 - DNA, 3009 bp, Toxoplasma gondii
  source 1..3009: mol_type = genomic DNA
gtaccgtgaaaatgacctctccttcgaaacgaaatcaactgccttcagaaaagtgcaagaacaaaagaggctgctttcactgacaccagacaggtttttccggtgccgacgcatgcccagcctgcctctcacggttctcacatgtttgccccgtgaaggcgtttgcttgtgtctactgtgggatttgatggtccgtccactgttgtctgtgccactttcagattagaagcgaggcgtcttcagctgcgctcgttggtctcaggaatcgtgcctacggtcgcacttgcatcgccgtgtactgcaaacagaagtttttctctgttgcagaactggcgcaccttcagcgcagttctccctctcccacctgtatgcatgagtcactcaccaccggcgaaaacttgaaagttgcttcagcttgtggcgacgaaaactttcctgtaagcgagtctcatgagtcaaacacgaacacggcaccttctgaaacggcgaaacaagcacaatgctatctgacggtgccgcgcaggagtggagtgcatgcagacagagcggcgttgaaaaaccttctcccggtcagtagtctttggtatggtcagcagagaccggaggagtttgtcccccttgggatgcggcgacagcagcttgttgcagaaggctggattgaaaagaaaccagcagcgggacgcagaagaacaacccccgacaaattgagggacgaccacgatccggaacctgggaagacccaactcgactaaggaggggtccgtgccgatatgcgtctacatttgtacgagcatacgcttcagaggcatatgcatgtgtatatataccttgtgtatcgggtcgtctagccgtcggataccccgcggccttgtgtcagtatttccgcttgtttaaaactgatcaactgttcgttagccggttctttcccgttgagattcaagacgaaaaaaccgctgagaacatgggccccgctcgacgcacatacccgtgatgaggctatctttttgacatatcagcccttctttgttttaaatttgcacgtgcctgcgcaaaattcatatttgtgaggaacgagacgaaagaggtcctactgggatttgaacccaggtcggcggattcagagtccgcagtgctaaccgctacaccatagaaccgacagtgagccttttggatgtggcgcctgcgctgtaggcgtctcattcccaacgcaaagttcatttttgtggaaaggcgaggcaaaactgcgcctttccaacgaggtcatgtttggcttgatgagagaaaacacctatggtacgaacaccccttagcgggcgccacgatactcttacggagagacgcgttttatgcagcctgtacgatatgtacagaaaatgtatcatatacagcagagatggattgaaagtgacttctccgaacaatctgagaaagggcggtttctgacgttcaacacttcttcagcaacttctacaacatagcaatccgccactacacttgtggcacagagactccagagatctcaggtgatttctgaacattgagaagatggaagattgctgaaagtctcttggattttcttggatagtgcagatcttaaagaaaggagggagtttcacctgagaggaacgaaagctccagctcacgagaagacattcaaattgaggcacacatttttctcgatctatcctagcgggcgcgggaaaaaccttaccccgttcattatctgatcggcgcattccctcatagatgtttatattgtacgtgtgtccatacattatttacaagtaagtacatccttaagtacaaaaggacacgtcgatgcttgtggatttgctttgcattggcttcctttcaagctcattccctgttttctacgcatacacggcaaatgccaacccagttcagccagttgctgctgtgcactgtaattttcgtcaagtcagcctggacaacattccatcgatttctttactgcttcgtaggcgtgcctgtagtatctcgctgcataaccgttcaggcgggatactacagaacccccgtgcaacagtggcagggaaaaataagtaaactgcaaagcgagttctgcttgctagaaaaccgtaaagcatggctgctctgcctaagaaaccagatagaaaggagctactactttctttctccgtaagacagagtgatttccggctcgaaacgcctttgccgcatgcaagcggattcctcaatagaaccaatgtgcgcttagaagtatgcacaatttcgagatcccttccaacaatactcgctctttgtatgaaaaacctttgttttctgcccaacattaatacgtctttggcttctcttgtccgaatcgctagcatctcctccgattctctagcgtctcagcttttgacctgactgttgcacctgccctatctgttacctgttgagttccaggcgcaaaagcttgagaccagagaacctccttcactgttcatgtttagctttcgacgggcagtgacccgcttttccctagactatttgaaacgcatgctattgcgtgaaaatgtatgtgcagatggccaaattacaaccacacatgtccgctgctgaccaaactgagacaagcgacccgaaggaaaacaaagcttgcgtttcttcgcttcgcatttgttaagagcttgttcacgcatgcatgcttagcaccggcacaacttttattgaaatgaaaaggtcgttcgagctttcattgtttttgtttgtcccaggtccggcaaagtgaaatccgtaactcttccctcggtctctccactgctgacttttctccgtcgttgtttcctgttctggacgtcactctcttcccgctttctcagtcataacgtccattccccaccttgtcgcgctgaatctttgtcctctgtcttctttgccgactcctcccggtccacttttcaagtgtctgcgtcgggcgttctctccccggcgccctgtatggtttgtgtgacttattcctccgatttagcctactcgcccaaa

SEQ ID NO: 2268 - DNA, 4263 bp, Toxoplasma gondii
  source 1..4263: mol_type = genomic DNA
gaagacggtacgccgtctcacatcaggcaacctttctcaagacaagctcagggccagtttgacgcagacagggtaacccggcatcaccactttcagcattcacgcacaaacgcgcaggtgttttctgcgccgtgtggcacggatttcgagggtggggtggtgcatggtgaaccggctttgcacacagagactcgcgaagctgaaggaaagaaacttacttctccaccgcctgcacctgccgtggcagccgccgagttctccggctccggcccatccgaactgggagcggcaggaactgaagcagcctcgggagatgacgactccgacggctggggcgcccctacgttattccggctttcctttgacggagattccgcgcggacctttttgggattctggtcacttggggtgggcgaggaagaggccggtgtcgcctgaccatcgcttcttcctgtcgatcggtctttggcatctggagaatcggtgtcgggtgccgaggcggcagatagcgtttgattatctttactggtgtctttctcgtctgttgcactaggttccacggtgctgtccacggacgcggtcgttgtggcctctccactccctccggcctgtggcgagtctccggacgcgcccttctctgtggcctcgaacattctgcctgcataaacctatccgattaagaatgtttgattaaagaacacaaaatacctcccggcaaagcaaggcgttgtcagcttatcgtccgggagaggaaccccgccagtcggatccgcccgctgacaacgcaggaactcgagttggcggggcgacagagctcgaagcagccgcaccaaggtagcttaccccgcagagatcagtccttctccgccggcgaatactcttggccgcgacgaaataagacgggtgaggaagacgaaagggatggggtacacgaagacaatctttaacgcacggattctgtatggtgagcgaggctgcaaaaattcagggaggctcggagtaacatgattcccgaagattggccttcaccagagaacgatcgagtcggaaacagccactccgccgtttggtggccttgcgcgtgggcagcagccacataataacggcgtgtaaacaacgggatacgtttcggaaaccagttttataatcggcatacgcgactagctgcagagtgtgtgaatttctagcaagcaagcccccgaaaaaacaacgaaaggacctctgtccgtcctgtagccgacctccttacgattggtgaagctttacttatcagaggtgcaggacttccggttgcaaagggccacgagggcctggatgcaagagcacagctcgttcaattcccccagtggcaacgtcgatgctcagaaaaaagcctaggaaaggactgtttatgtcagatttagagatgagagaaacttgacagtgcggacctgctgctgcctggcgcctgcgcactggtggtggagggacgaactagagaagcagtcatatcgggacagacggatactgagttaagaagcggtctaaagaaatcacgaaagaacggtcatatgccgatgtttgcgaaggagagggacggaaagggaaactaagtaaggatagagggacgattagtcgcgggtttgaccaggaaactcgggaaattgtcggcatgatcccgtgcgcgagtgaagcacggcgaagacgtcagtctttgagacgaaacgcagcagctgcaaaaaatgtacaaatccgctggaatgcccactgtgtgacttaactgaaaagaagacaccttcgattttccgccacggcatcgctgtgtttggagcttttccccgtagctcgatttctggcaatcgaaggctgagcgcggcaaagatctagcaaatggcgcgttccgcagccaaaaaggggagatacacacgacacaaacgggacaggactgaacataaaaaaagcgttagcgagatcagaaaaatgccggcgaagaaaattgtcgaagagtatgcacttcttcaggaactgtgtcgcgaaggtgagtcttgacctcgcgcatgttgtatcgagccaagcaacggaaactctcattcgcgcgaggggcttttacatgcatggtcaacggaacttccgggtctctattcgacggaggcgaactttcacgttggtcgactagaggtcacattacagaaaaatccaaaacgacggggccctctacgcggttcaaactctccagggaattgtccgcaatactggaaagtgtataagtgggtcgcagttgctgggcaggccctactgataaaaacgcatctgtcggtgacggagaaacggctaggactacctcgaagccgacagaacgtctggaggtggccttccaggaccatgagggaccatgttgcattctcctagacattggttaaatctcgttgattttttctgtcgtctgcgtgtgacgagttttgaaattgccagcttcccaaccaaagccattctctcacaaattcatgtcacggcaaaaatcctgaggtatgtgtgtgtgtgtgaaaccagagtggcttttgcagtcgttctgcttccaaaggcccagagttgggataagatttggttccacacgcttggttgttcagctccttcgctggatcgaaaaggccatgtgttcagtgaatgcagcgagtcgctctgtgcgcgtgtcggcctatccagtcagtcgcaagaggcaggcgtctggatgcagagaacaggcgaatctcgcgcaaacaacgtagtcgacgacccaaaggatattggcttttcaggggacttacacgagtgagagtggcgacgtgaataggagtacaccaaaagaatgcacaaagcccaggtagtcttccaggacctaagcttggctgatcctcctcaggtttcgttcctagcttagcggcgcacacttgacacttcagggatgtaattttgccccctgggaaccgccgttcagcaacgtacgtgatatctgtcctgaatactgaatggtcaaggtctcaactcatggcggcacaacccgccactaaaacggatgcagatctgttgcctccatgctttcttctgcacctgcttgagtttgctaagcttgaatcaatctaaagaaatcccctgatttatctcagagaggtgactcagtggtgacctggggctgtcaccgacaacggactaacgagcgagcagcgccccggtatttcaggtcacccattagttgaagtttccacggtacggttgtcgagcatgatttgtcctctatgcgaacggatctactggagcaaacctagaccaatcacaacgcgatacatggtggctgtcaaaggcactgattgtcacttgagcgtttgaccggcttacaatgcatacaggtagtgtgctgctcatcccttggacggcggtccgtttttaagaagtgcacacattcagcacgattccttccagactacttcccatttgaaatgcgcaaaccgaaacggtcagtcctctttaatgacacaacagcgcagtggacccttccctttgacgcggctgttgctacacatgcacgcagtgcagtcagggtttgcagcgctgaacgctggcgtatcaaaaacttgtaattgagcgcacacactttcacgttcactttgccattgaaacagcgggaccgttgtgatatttctcttctccatgcgttctcgcttgtcaaaaggcagagagagccataattttgcggttgtttccgtcgaaaaatagtaacacacaatgactctgacccttgtttggacttcgttgagtgtgcacggatcggtgacacatgaattccgaagtccttaacacttttccaagattcctctgagtggtttctcggaagtcggaacttgtacgcaagcgaaaactatgtttttgcagtcgtgttgttgtttctgacccacaaaattttggcgttgcaacattgcaaaccagctctgaatggggcaatgtctttgattccctgcatgcagctttctccgtgacagcgttactgtcattgctttcttctcgaccctctgacagagtcttgtttctttgacgagcagccttagcgcacacatttgttgcggaccattttccctactttcccctgtctccttcagtgggagcgcaaatccgcgcgagtttcttccgaccgtgcctacgagcagctcgtcacaaccgtctccgttgcgcctctccgtttcttctctccgtttccgtcattttcctcccttccttcctttttcgtattctttgttccggccttacccacga

SEQ ID NO: 2269 - DNA, 3224 bp, Toxoplasma gondii
  source 1..3224: mol_type = genomic DNA
aggttcgacggttctccagaaagagatgtttgcaccaaaatctgacgagaaaaacagagacgaaggcgcagaggggacggacttcgtccacacccgtatatgaagttcacacgggatttctacatgttctttgactagaggaactcggatgatcgtctttcagtgatcggggacaaggtccactcgacttccttgtgcgaaaaaccgggtgtctgtcggcaacaggggcgagtgtcgtggagagacagccacgaaagatacgagaagcagggagggaggaactgtgttgttctggcacgaaggacttggcggaaacatgcgatcgaggaagagaagaaaaaaagagcagaaaaaaagcttaactcgatgtacatccggcagcctctgcgtgtgcctgtgctgccctgacctagaaggcagacatgcccgggtccacaggaatccacgagaaggagcagggcaacggcgagcgctatttcgcgggagtgaaacgggaggaagtcagcaggaaggaggtaggaaaaaaacagcggggaaagtgtcaggaacagagatggaaaagggatagcaactgactagagaagccgcagagccaggctcttggatacgtcgagaaaagagtgcgttgcgcccggggaaaaaagaggaaacagacgaaaagaggtgcactcgagttccactccgtgttgagaaacaacagaaacgacagaatgcctctcagggggtgactatttttctccgtgtagccctgcaatcctgcaatcctggaaacggctgaacgtcgacttacagtgcaacagcatccgctcttcgctctgtccctgtatggaaaacgcgcttcgccggacgaaatgacacagacgaaacggactgggacagagagagactgagaatcgaggaagcgaaacagagtgagaatggttcttaatcgtgacgcgcatgcggggtaaacggaactccacagccacgccaggtccgaggccggcaggctcctccaacaagcacgtagaaatggaaagaaatagacaactcgaccgcttggcgagctcagacacagaacggaaaagtgaaatcccttctcaggacttggttgattcagaagaaagcgcgcaggattcgacagaatctccgcaactgcatgcggctcgcagaaccgggaggtgggggcgttcacggtttgaggaggaaacggcaggcgtccgtcggcacatgggtaaacagactgcaccacgaagaaagaacttgatgggaagcaaaagcaaatctcatcgcttgttagcccattcgtggcttgttttttctccaggtcaattcgcaagcgctcaacgtgtgcgaaaactctaaagtcacagtttagggacgccagcggggtcaggaagcgcacacctgagaaagtgaatttcccaggaagcgaggaaagagaaaccgcacgcaccttcctagacagaaaatggcagagttttaactctgaaatcgaagtggaggctgaaaagattcacagaacgcagacaagaaggcgagtattgtgtgtgtgtggaggttgctggagtgattgtagataattagtagggcaggtgccaaaagcaaaagcgtacaaattacaatccaggaactaattaaaatatcagtccctgagggtaagcacttccggttttctacatgtgtgagagcacgcactggggtacggttggtgcgcaaaaatgtggtgtactgatgggacgagtgtcagcgaatgagaaagcaactggtgtcgagcgaaagagagcccgatggtggtcgttccactgctgtgatgctttcgtttgacacgtttcctgacttggaccctggcgattcggtatagatcgcattctcagaaatcgatgaacaccagatcgtcgagtgaagcggcgtgatcccgaatgcatgggtacaagctgcaaacaacactctttaacttttaatgtggggattcaggtaggtgcagacgcactgggaaaagaggtgtatcagattctctgaaatgcagaagaggcggtctaaaattcttgcaggaaagtagtgaatccggctcccttaaaactatagagaagcgccaatacgaatcagtgctgcgaattgctacgccgcacttggatacggtttctcgtggagacagaagaacatgtgtggaattcgttttcaaatggaaaccacgcttgcgttctacgcaggcttcgtttcagaattagaggagataaggacagaaggaaatccataggagtctttcttgtcccatgtctcagggttcgaaatggacatgagtcttccatgggcacagtcgctgacctggggtgggaatcccttttcatgtcgacttcctagtagcaagtaaagcgactagaatggcggctttggctttggtgaaacaaccacaccgagagaacccgtcaacctgttcataacgccatttcatatcgtatctgagaggtactttcgagcaggtgtgagttccacgcagagattctgtggcttgttgcactcttttgctagctgtccatatggctcttcagaaagtttgcagtgcagcccgacacttcgaattgctctggtgtcgatttctctgtaataaagcacagcacaccgtgagtaccccctctagctcaagcatgttgtgcaagactgggtcttagttcatatcgactgatttagagcagatatttgttattttcgaactcgaagtccgagctcagagcgacccatacccttctagcgccttgccttttatgagaagaaatccgaaacacgtaccatttcagtgcacagcctgcagacacaagtggcttctgccaacaccgttgtagccctatttgtgactgtgttccagtcttcggtcgcaagaatttcagtatttctggtttaagttgtaagccatgcgctccccacccacagacgctcgcatctgagcaagccgcagccccacgctgtttttcgtgtttgtattggataaacatgaaacagactgtggactgataggcgggaatttcactaaggcggcttgtgctgagacgatgtgggtgtttgtgagtcgcgcagtggctgcattgtaatccttcatggttgactagccaaaaaagaacggttgtcggttgtgcgactctgagtagccggagactggaacgttacaggagactggcgagggggtgagacgccgccgatcttctgaattctctgaatctgtctgcactccagaaactcggaaaaca

SEQ ID NO: 2270 - DNA, 2955 bp, Toxoplasma gondii
  source 1..2955: mol_type = genomic DNA
tacagttctgcggtataacgcgagcgacgtagtgtccgtgttactgccctctgattcggtgagacgctgtagcgaacacacgcagaaaagcgaaaagatccctggtgaccgaaccagacgaagacggtgacaccgaccagcaacgctgagcctagagtcgcagtgcagctctagaatacgagaaaatttgatatggcaaacgttacaagtgaaacagatggttccgtggctgcttcggacatgtacttgaagcacccgtggtggttatcgagcctaccaacagtttatttcgcttttcgaggcctgagtcgtgttacgatgtcacgtggcttgccggccgtttatgtgtctttgtccaaattcttcaaataacgcagcaaaagaggccaggagaattttgttcctgttgttcttgtctggttttcgtaaaccctggtacccggtctcgagacgaattgcagacagaaacgcctttaccggtagtgtctgcccaatctgttgtgattattcgagtctttgacagtaatttgctggccaaactcgaccaaggcttgtagccggtttggcaacgcgtcctggtggagaaacgagctttctaacacctccacatcggtcgctgattctgggtcttggatgctttgctttacagtccaaattcacaatcagccacatcatttatttgcttttcaacgaaagcagcatagaatgacagtgccttcatgtcgcccgctgttcgtcaagcatcgatgctcaattgaccagtactgtttaccgaagccttgatgcggatgtgtcacaagcggatgaaaaaacttgtttccttaaattgccttagaaaagccacgggccatggatgcctccctcgcattctaaagtgaacggcaaaacatcgaaggctgactctacgctaacgcaagggtcgctttctgccaggccgaaacaacggaggtggttccctcttttaagatgatcttttggatcttgaaagtccgtgtttaactagttccagctctatgaagactagagtcgcgccagcggcccttgggtgccttgtttcctcagaatttcatatgaaagatgcccggaggaacctggtacagacacatgcgctttccgttctctgttgaacaaacagactcaactttgggatttagacgtgcgggatagtggtcagcctcttgttcgtttgtgttgagacatccaacgtcttcgtttgcgtgtgtatcaagttcctgctgtgtagttgcctcgctgcgtactcagggctaggacgaaagagatcgctaatggtatcaagaaaaaaaggatcgcgttagttcgtggggaaacgacttccgaacccccaaaatagactgacacagaggttgccatggcgtgtatacacgtgtgcaaggctgctgatgggatataaggaacaaaatacatccagcaggtcataggtcaagtactaaagtatctgcaggaactgtaaggacgttctcaagcagtgaaaagatcgctctagtcacggtctacgacagaagacacctcagatgtcggggacacagaaacacagcagcctcggctgttcgctgcagaaaagtagtggacctttggtaaaaagagactcagagaacccaaaaggtacccttacgagtcagcgagacggtaacaagcagtgtatccaaactcgaatgtaagtctccagtattagaacgaggatctgaattacctatcggcacacactatgacgttattcgttgtttcagaacacaccggacgaactgttttgcctaagaaattacgttaccttcctgcgctttagctgttgctctgcagttcgacggaacaagaaaaaaaacaagtgccagaaagtcggccgccgttagctcccctccccccagccccccggtgaaagacattctagaagtccccagtctccaattggtgccggaagacagtctctgtccacactttttgttcgcccgcctcccccaactaagatgctcgagacagacacagatgaggaatacaagaaggcggagtgaaacggagacaactgcgcgaggcgtgtgaatgatgagagggcaggtaacaaagggggaacgcgaaaattgcgccatcttcctcgaccagggcgggtccacgatacgcgaaatcttttctcccgctgttcaggtgtgcatggcggcgggcaaccgggtgatatgccaggtgataccgcagtcggcattggcactgcctttccgtgttttctgcctctcaggaacgcggggttgccacagaaagatctgctctgtatttcgggagacaccttgtctgcttgaatttctccctcgattcgcttccggtgaaccttggcgttctgccggactcgcgcatctggcccgcccgtttgttcgctgaaaggcggacgacgggcacagaaccacacgtttccctcctgtctctcgacttctgttgcgtgcgttcaaattcgtcttgcgctcttccaaagggagaggagcgcacattgtaggtttgtttgagccgcgagaagtgtctgtaaagtcgttaccgcgcttccttcccaacttttgactttctgaagacacgccatcgcggtgtctcggtgtgtatgtacaccggagactgctgatccacgcggcgtgcgtgggcggcaatttctcgcgggtgtgtcagaattcgtagatcagctgcacctgtgaatcaaggaaacgagatttccctggtttgccggatctgtaggctttcggtgagcgtgttcgggacgagactttccattcttcgtccccctactctcggagttaggagcgacagtcttcccctggcagccctgtgcgcgtgcgtagtgggtttttgtccgcttctgttggcgacttgcaaacccgcacaaatcagcgtttccccgagtgcagtcttacctgtcactcaccctttcccattcctcgttttcagatagattccagacacaca

SEQ ID NO: 2271 - DNA, 1907 bp, Toxoplasma gondii
  source 1..1907: mol_type = genomic DNA
catgtgtcgagttactggctgaaaagcatacctcagggttgtcttgcctcctttgttgatgtcaccgcacaacaaatgtgccgttttcgatctggagtgtgtcatagaacggtgtgcctgtagttcctcttattcagttagattttttgttccctcgtaccatcttgtgtgtgaacaactgtggagatatatcggctgagtgactcaagaggaatttgtctactgcacacgaagctactgcggctcgctttggagtaagcagtggttacacccaagaggaatttgtctactgcacacgaagctactgcggctcgctttggactaagcagtggttacaccgcgcaggaagtgcaaacagtgcatgtgaagaccctcagttctgcggcacttcctctacagctgtttgcagtatactctataatgagctgattcttgtctgagcgtgtgtcaaatgtgattgagcaaacatgttctgcaagaacagcttccgtttgtccctctcttccgtacggggcataccaagttcgagacgtgcacatagcatagcattcacacctcacttgatgacacaaaatcgttagttggactgacagggcgaacggtcaagcagctgaacagcaaaccaacgctttaatagtgcgcagacagataactcacgcccaacgatgaaacagtgttcggccaggaacgctgcagttcattcaaaggtatcaggcacgggtcctttctgtacgtttttcagtcgaccatggcacctgcagacgcagaaaagaagcgcgtgtgaaccgctggcgcggacgaacctctcactggtgttggctaagagacactctgcgtacacctcaatagcagagaagtacaccagcatcactagaagcaattcgtcaccagttcatgtctcgaaatgttttcagtggatgggtaattatttggatacgaatggcatgcctttgcattctaccgcgtatttcgaacttgcaaacccgttacaggctgaaaaagactgccatttttgcgcttgctgtgccgtagtggaaccgtggtgcttctgggctgcagagggcaagcagtgcgtgactctgccttatctcgacgacaccttcgtcagctggcctgccgcatcatcggtcaggttgacgagaaacggcaggatgtccctgaagaagaaaaactccttctgtcttgtggtctatttttgtgtgtggcttacttttctcaccagcaggttttttcgccgggatcgcatgcacaggagagacatcaaaccaggaggggtgtgccaccgatccttcgagaggagggtttctttccgcgcgcgttttcgttcgctgtggcttttcttcagaggtgacagcggcaaacgggtgttttctgttactggcaaagtggacgcccgcctttcttcgacgtgaaactaaagtgaaacaaagaggagagagacagtcaatcgccagccgaagggaagacggggaagcctctggaaggaagttccgtgctggatgattctacaccagaaaagcgccgttctgacgacgttctacctttgaaagttgtactttctcttgttttgtcttttgtgtctttctgtttcatcttctgctgcctggggagacgacgtatagttcctcgttttttcaagtgtgtggagtccgccttctttttctcgatctcctttcgctgctggcccccctatgtccggaagacgacctgtagctctgtcacccttttgtccggattctctgtttgtcctgggtttcaaccgttcctcccctctcgcacctttgtgtttctttgacacacctttgtttccccccccttctctcgcttcgagacttccatctgtcttccagtcgtagaccacgcagcctcgtctcgccttttgtcttccatctgcaccgtcgccaaaa

SEQ ID NO: 2272 - DNA, 2881 bp, Toxoplasma gondii
  source 1..2881: mol_type = genomic DNA
agcgatgggcagagaccttggacacccgagacatgagaggaagagaaaccgagcgcgaagtcgcagaggagagcggaggaagaagcaagcgaggaggcaggaaagacagaccgactctagataggaaaggaaagcaaccgcacatgctggaactcgtcaaaaagggtctcttcggcgtctgaaagtggcggaaaaaatcatttccaagaaaatcacacttacctgtcgccgccataaactgctgaacagtttcctctgtgcaattcattgtgactttcgttccttgttcccctcttcgttcttggttttttccttgttttttctccggcgtttcctttctgtttcgagtgaccccacccccgtctttccttctgtacaggcgccttggaggaaaaggaggaaaaaaggcgaagaaagcctgaagaagacgacagagaagacgacgggtaaagaaggacttgctggtcttgaacaaagagtctccttcgctaccttaaggtccgttgacttcctgggacatgcgtcctgacacggttctctgcagaggccaacttcgatctcatgtcttggagaagaaggaagccgattcgctgccgagagagaaggaagagaacctgaggagatacggttgcccccaaaagaggagacaagacacgcgtctgctcggtgcccgccgtggggagttcgacgcgaagaaagacgcacaacgtccggcgcctcgctggctcgacctgtcgattctggaaagaaacgttccgattccccaagataaagagcactggtgcagagaacttatcgcattctccgttcgaagccggcgataaaaaggccaagattgcagggagagaccttgcggcgctagagaggatacattttgggatgtgtaccggggcgtctagctttcgttggcggctgaatcgttacgaaaacgggaagttcggaactccatccagaacgcttttctcatgtggttgagctaaaaagaagtcgccttccctgcaggtttcaggggcaaccggtggcgctggcgacgacgcgcaggaggtccgaagatgacacagggacgccgccgagagagagttgacggtgtcgaagcaccctcgacagcactccgcctcaaatcagaaaaaaaggcggacaagagactcgcatagtttccctcgaaacagcggggcaggtggtgacccggattttccccgcggtcgttcgcaagacaccggggaaacgaggcgctgcgacctctaggtcggagcaagatcttttttcgcgacggagatcgcagagaacggagacagggcgctgcgggatggaaaggagagacataaggcacgaaaacctccgcaaactcgaggaaagcgctaacctttcccagcagacaacagacgggaagtcagtcgcgcgcttccctcgttacttttcttcgcatcgggcagctgtctctcacgggtacacgccgcggcggcctgtgtgcgcgagaacggtttctctggcgcgatcagcgaggcgttgcgcgaggaattgcctccagtatccaatccagagaaggcctctagcaccggaactcgctcgcctctcgcccggacctgctctcgcgctgagaatatctcacctgtgcgcgagtctgctgcaggatctgcggtttatttttatgccgcgggtgccgccggcggcatcacccctgacccaagcacggacaacgtaggcagcccagttgtgtgtcctcagcaacgaaagaacagcttttttcgtgagacgttgcggacgcgatttcctcaaacatcccccttcaccccattcttcggtcccccccaaatctaccactttcatggcaaagtgtgcgaggaacaggtgacgacagtccgtaccggcggcaggcctttcagaccgcctgtttcatttggccaagtttctctgaaacaacctcggaacttccagttctacttcacctcgctctccttcgcttctccccttcctacccccagaacaggcacacctcggctctacagcgcgcgcgagcctgccgggtcgcgagaactcgaaaatcgacttctttgctcgactcttatgtcgctctccggaaaagcaaagtgcttcacctgtcttttctttcacaactttgtcggagttcttcagctacagctacgtcttcagttgaaagaggtactcgtgcagctacgtatgtatttagaaaaggtactcgtgagtacgcgggcaaccgcacggtgtactgttttgactcttcaccgaacctggcaagccacgcacccgagtaggagtaaccggctgccgttgcgaacaacgtttcttctcatctggagcaaaaacaaccagacttatgccactataaaagccctacagtcttagcggagtcgactcccgcgcgtttttctgtaagtcgcgtgacggtctggaggaagactgcagagggaactctccagtcgacccacacatcatcgttcaacaaagacaactgctctctcgctttccagtcgtctggtgtagattctcgcgtctaggttcatagtccacagtttcacagcctcgaggcggctttttgtccgtggggagtgtgcgtgcattccggttttttttcgaactggaaagcaccacccctggctggttgtttttgtgatggagagacggggcagcacacagcgtaaagtgcgccttcatggagtgcatgcacccgcaactctctcgcccgtcttgtgccaatgaggacgacggagaggggaagacggacggtctcgtgcttcctgtgctttcgatgccccgcggggatgcactccattcaagagacagcgcgtccgctgcgtttatcttcaatctttcttcctttctcagtcttcctctcagcctctctcttcaccctccgtaaaaa

SEQ ID NO: 2273 - DNA, 1842 bp, Toxoplasma gondii
  source 1..1842: mol_type = genomic DNA
gtttttcgcagaagcaaaagattgggacaaggtggagctgcaaatttgtgggcagcgcggactggacccaggccgtccgataaggccgaggcagcagagggaacagcagcaggcgagaaaacaggacacgcgagggcggaaagacgacagagagaggcagggcctgaaagacgggagtgtggagagaaagcaaggagggaaggaagcaccgaacgacgagtggaggacggggaactcgcgaaagacgactcgcgaccacctgcgcctgcagacggcgaccgcgcagagagcgaagcggagcacagagtgacctcggagcgagacagggaagaacgagcggaaaggacaggagagagagacgaaccagaggagagaggataagaggcagaggaagcggcagatagagagcgggagtggcacggcagagaggcagacagaaaagggtggttcagagacacaccggccggagaacgggattgcgacgcattggaggcggagacagatgagagaggagaagcagacagaacaaacttgcctcctgagcaagaactggacatgctcctctcagagaaacctcgtcgggcgtgactccgcagcgcttttgcgtgccgcgggaggccgcctgacgccaccggcagcattgttttcacaaagacgccgcggagacgctacaggtattttcgtattttcgttttctgttcttctactgcagttcccttgtagtcatatccgccggtctctgagcctggttttccgggagtgttgcccggcagcttgtcttgctgtcaacggggcgtccctagtaactcgaccgccaattgtgtccatataagcgggcaggaaacgactgtgaaacagtggtatcataaacagggggcagaatcaaagacgagagtcggaggtaccccgcctggaggagaggccgagctccttacgacgcacattcaggatgtgcagtcgaggctatctcaggctgtatgtgcctgcttccagacaggggcgcacgagaattgcacaccgaatggatgcagaagactgtcgactgaggaaagacgaatgacgagaggcgaaaagaggcagttgacgacgcgacagaagagggacgagggcaatcgcggagaaccggcgcgtgacacctggagcgactgggaagggagatatctaggtatccgacattttcacaccttcgttgggtcctccttggatccccgggacgaaacatttttcctcgaaacatgtgtactggtctctttctgcctcgttgagctctcccggcagtcgcgtgttcagcaaaaagcgcgcatgcagcgcgcaggggattttcgaaatcctggcgagggagaaatcggcgtatgctcgcaaccagtgacgatctctgatgagacagtcgacgtctgaatttctgtgttggccgaacgccaccagcagagtgtttcgctgtatcttttccggagcgtgtctcgtgcgctgttctgtttttctggtgtcttcccaaagtgaaattgtctgtttcttcgctcccgcgatctctgcgcccctgtagtctccacgacaggcggtttgtcgcgagttgtgtgacctgcggtcagcgaagcaaatgccggcacaccaatcagaaggaatcttcacttcgactctgcttttcggaatccccgaaaattccgcaaactaccattgtgtctgtgagcagcgtcgggttcctagtccactgttttctttctctccagtcgccaggaagtaacgaacacgcgccagctgaacgtgggttcgcggagtctgcgtgacggtttgtgtgtctctcgcactttcttttctttctagttttccaccgtttcgacaaaa

SEQ ID NO: 2274 - DNA, 3651 bp, Toxoplasma gondii
  source 1..3651: mol_type = genomic DNA
aagcgagacaggcaacgcagtgagcaagcaataaaatgcagataggggaagaacaagcaggactggacggaaggcaaggcaacgagaaaagcaagcgaagagacgggaggacgtagagcaggaatcacggcgggaacgaggttcagtggctcggctgcgacctggagtcttctgttcgtcgtttcctggtatcctattgtgtggattatttgaggaaatctcggcggaaagactacaaagaagaaagaatgcctttaaatcccgggggggaaagggtcatcgtatccggggtctgtcgaccacgtcgatgcaagcagccgagagattccggttggggacggtggagtggacgcaaactgcacgagacaaattttagtggtcccggtatgaaggacttctggcttgctcgcgagctccaaccaatcattgatatatttgatgtaccgcacagcgactaacggtgtaaaactgtgtagcagaacggggaagagagacacgcgccgctgttgctctagattcgaaggaaggaaggtccccccgtctttcaaaaggatcgagaggcctgcgaatgaggagggacggcagagcttaatgtagtgcctggaaaccggtatcgaggtcaagggagctaggacagtcttgaattgtgccaacacggaaacggacacacccatatcagacacggtgtagcagcacgcaccaagcggtggcctgtagcgcggtttagtcaacaaaggaaacagagacttcaaacgattgcgcttgaaacaatgtgagcaaaacgccttcgcccgttccggacggcactgtcacaccgtggagctctccgccgccgaggcggaggcaaaccgctgacttggtagctttacaagtctggcgcgaatgcctttctcgccacgacgtctgcttgttccgcgatatacccgtcagggaaaccgtcattgtacccggaagggaaaaatccagatgtctcaaaagtgacgcgcgccagccgcgaaggagcgacaactgcgtgggtgccactgctgcttgaggtgtacatccactgtccggtgtcaagcacagctgcacgtggccatcctgtccactacatcaaaatcttgactctctcaaagtttgacgaaaaagcttgctcacacggaagagctgattgctcgtgtgcaagcgcggcctcacgcctgtgcttgcgatttccgcttagtagcgcggtgagaaagtttcaagcgctgtgaagatggacagaaaggggggcgcgggagagtgtcttcattgcatgcacagcgcgaggcaacccaaccaaaaacgagttgcacccttattttgcgcaggcacgggtcatcccagttacccggcacggtccctgcgccctacgacagggagccgaggcaggctacaccggcgggaagcccagtcggatctccgggagagagtggaacggaggtcccaccacggaataaaaggcgggcgactgcacagctcggccgagttgtcgacccagactgctgcagttttctcaaataagccggctgcggcgtctgtcgtttttttcgccctgcgttggggtcgccaacgaccaggtcgcacgatgaaaccgtgtttaccgtctgccaatttacatgctggcgccaatcgacaggaggggagaacgtttctgtgagaaggcagaggagaaggaagagtgccagttgtgggtcctcagccaaatcttgagaaatcactacttctgtttacgccagaatgaggtcgctgaagtcgagttttttatcctgtggccccgggtactggaccaagatcacttgcccggcagtcttctcgatttaggtgtggcgacggatcacaactcctgtgtgtcctttattcgtttccaaacctctgtgcgaaaactaccttcacgtgtctcttcgacgacgtccccacatctgggaaagaactatcgtttactatactcttgtattcgtgcttcaagcttccacagtccgggggcccgcctctttgtactgcatcgttactgtctccgtcggggcttgctctacacagtggccaagccaagtgtttggagtccaactactttgccgtgccggctggcgtgtttgctttccgaagaagcacagtctagaaggccatttactgcgtctctttcgctgtctaggtctcagtttttccctcttttcccgttcagaggagaggcaggaatcgacacggctcccgtcgtcctctgctgccgttttgtccttttctcgtttgggcacctgcagggtcagggaacgacagagtggtggaatgcgtggcggattgtgtcgctcagatatcgcagtttgtccatgcaaaagagttgttcacttcaaagactcgacctcgcgccccaatgatgtttaaagagtgcgtattttcctgtcgcgccctgttgtgatgtcgacatttcgcttcagtgcgagagccaagcgcaagtcccaacgctagtgggagaccatttcctctgcaatccgcaccgccgtttccgctttttttgtgcacagacgaaggctctagccgctcttctctgtagcgcgcctgccttctgctgcacaacacgtggaccgttctcaccgttcggattgaagatactcttcggttgctcgtgacgtctgcgagtgaccagcacacacaaaaccgggtactactcgagaatctcgaaattcgcttcagcaacttctttttccactgttgtgtcttacccaattcgtgcttttttggagacttgtctcccgatgaaagccaggatccggagacagcagatctttggagcctcacccaaccttgggtgatcgacaaagaccccgtgggttatttagctagcttgagacgacgcgccgttggtcccagccgggtggccgacggctttttttctgatggattttgttggtgtctatgaacgtatgttccgaagatgcatgcccctgctatcctgcatcgctcactgcttcctcctggcagaccctcccgtggctctgcttctttgtcaaaaacgcctctgtagaacgcgccttccgcttgctctgttccaggcctttcttgtttaagcttaactctggcgtactcttctggcaaagactaactggaattgcgactcctctccgctttgcgttgtgcgcgagcttcccatcactctgaacgtgaggctgtccaatcgccacacacacccccccccccgatctagtgagtagtaaaccttaaaggaatgcgaaggctttcccgtccgttctgtctcttgcccttcactgaattttccttgacccggagttcacgcccgcagaaggaagggtgttctagagtttaaggaaaacctatacaaactctgaggatacccgcggcgaggcgagcggcgacagtcacctcgaggcttatgtcggttccaggtgcaaaggacgccgccgaagccccgagcagcgaagagaatacgcacctggtgcttgccccgtggccgttggcaaaggaacgaaatcgcaggctggatcgacgcagcgaaggccatacgcggatgtcctcgctgggctcggcgttgtatagttcgttgcaaccccagagaaaaggccatcccgctgcgcgccgttcctgcgtctccaccttgcgcctctccgctctcgtccccttggggtcgtcatgaagcagcca

SEQ ID NO: 2275 - DNA, 4832 bp, Toxoplasma gondii
  source 1..4832: mol_type = genomic DNA
tgtgtgtggtcagctctggagtgtctgtgtcgtttcgacttttagctgtcttcgcttcactgcagctggcgcaccacaagcagtcttctcgtttcgatgcgttttccaattcacataagatccagaatgcctgccgtgactttctccgtttcgcgcgtcgtcgcactgcgtgcttgccacacggtcaagagccccgacatcagactgcgcgggttgttcgcttttgaacaaggcgaattctcctgttgtctctgttttccagactccagaaaaagcagcgaaatatggatacaccagttgtgaagaacttctgaaggcttacgggtttgctgggaccctcgggggaagctccctgactccgccacagtggctctggtctgtggacgtcccagttttgtgcttaatgactgtcggcatgaagacgttcgcctgtttttaccaggcgtactgtgtccggcttcgtcgctgatcgagctcaaaagctcgcaggctttctccagtcaactctgtctctctctcgcttgcctctccgtgtgacagatgctggtctcctcagtgcactgctacttcgcccgctagggaggtgtgcctgacgtggtgtgtcaagcagtaaacggctgcaccgacttgttttgtttcgttaaaaggcacaacgctttcggaaaactgcgcttgactgcgacaccgtggacacggcagtaaacacagcaacgtttgatggaaaccaaccgatgtgtcgcgaacgcctctagagaaaggccagcgacgaagaacggctcactttagtgcattgcggcaggaaattatatgcatacgtgcacttatggatatgaaaatatatatcgtctcacgctgtcgccttgaatcatttagaacttccagtgtagtgctgggtgaagggttagggaaatttgtccccttgcaccacagctccataaatttcgagtaatgtaagacgtgagacagagagaaacgaacagacactcggaggcaaagactctcgcagttggcctggaggaacgtgcacgattgacgggtgacacaaaatgctcccggagtagcctgaagagttctgcgggactgtggaggaacaaacgtttctcgaaagacggtagtctcgctcgcgagacatgaaaggactgtcacaggcaaacggcaactggcaggcggcaacaggataaaaacagaagtaacgaagagcagaccatttgccaaagttacatagacggctgaagatactcctagtgccgcaatgcagagttgtttgtcgatcgcatccaaccacaagcgcatgactctgaaaaaacaatgcccacatccgttgccaggggcgcacgggccgaacctctttggctaagagaaagagtcttttacagctatcagaaatgaacatcagacgactcccaaaagatggaagggcgtgagaggttccgtgctggaccagcaggagattgaagcagcaggataatggaagtggagtcattctaacgcttcagttgtttgcttaactgctgtctacaaaacaatgtcgctaaaggccttatcgtccgcctttagaacttcctcgatttgatggacaatctcggtcaccttccaaatggcaagttgcacctcgtgctgacgacccgcagcttcagcgctcccgtcatcccggcatcgctttagcttctctaaaaactccctcactttctgtgcatctttctccaaatttacatggagctgcttcatgtgctcgttcaagttcgcagcctcttttctcagcagctccttgtcagcgggcaagtctctgcttgcggtactttccttgctcgccaagtacggatcgtagaaagactggaactgtcccctgactttacccagtgcattcagcttctggaacatgtcgtctgaaacacgcggaacttcctccaacagtcgacgcgtttctccgccacgcagacgagcagggatgccctgtgcaaacaggcaaaagccagtggcacaaatgaccgcgaagagcacgagtacattcgccatcatgccgcatattgatgcaccgaatcagattctttttgaccatgccaaggtgtcactcagctagtaactcccgactgcggggccaacgaacacaaaaaacggacttgatgccccgaaattagcctctatgaaaaaatcgaacaaggaaaacagagacgtgctcgacacagcttgtctcgaagcgcgtgagacgctagcgtcgttgatcacagcgacaccgattaccctggccggcaatattcccgcactgctagtttcgagtgaagagagaccccgaaagggaaaagaccgttagtggagggtgggagcagggaaggaggaaagtgtcgtgactcttttcaaggaatgacagtctttgagggaaccacgatgtcgaattcctgcaattccatctgcactactgcgggagatccggttttaccgccgggggttatagtataagccattgtggtaaacaacatcatttttcgcttttaggctttagaaagtacggccgtattgcttgaatctttcatctgtcgccggtaaatgttccttagaaaaccagaattagcgagccacacttcagctctcaactccgcagcttatgattgtgccgcagtcgacaatggtacggtttttttgctttgctccattctattgaaagtttgtgtgggcgaacgtggttgtcgtaacagggacacaaacggcaaaaatagcgtttggtatcgtgtaaggaaaaatgcaagatagtcttctacgaagcgagaagagcagagcagtggagtagttaggatttgctactgattgtctgcttccgcagcgcccttaccatatacaacggctgttattctgttttcacggagctcagtaaaatcaacccatatccgagcgttgcacgaactaagacttggaacttcttcctaacttgggatgttgactcccgtctccccgcatttcatcagttcagagagcactataataagcaatcgctttgaccttgatcggtctaagggagactggcaagttagtgtagaacagccagacaggtcctgaacaagatcaatatcagttctgaagcgactggctggccgcctcttccacgcaaagcctcaagaataattctcttgcttggcgtgtcttgtactacgatttctgactgacccgaattacggtgtggtgccatggtagcatcgtccccttggactgagtgggatggtattaaaaagtgcgtttgtgtcacgtgaatcgtattttgaaccatgttccgagactgtgcctcgcaagttgaccgctttgagctggcaccaacgtgtccaccagcaagtagatcgcggcttcgggaaaagccggttatgtcatcttccgttctctctgaagctgaccactggtgaaacccgctcgcagaggccgacgcagaaggagcctatcaatagagaacatctttattgaagacgaagtgcggggaatgagatctaagacaagacatatacccttgggcccctcaagtgatacaccagcacaaaataaaggaaaactcaaaatggcggatttcaaagccagcgtttatggtggcacgtgtgtgtggtttagctctgcacatcctaatagagtacccgggtcactcctccaaatccttctgggtcaccctttacacagaatagcgctgaacgtctttttttagagagacatgaggactgccctccacgcatgggtgtagcgtaacccggacggacacatgctgtcaccttgttgcaccggctgccagcgggtatacctcaattgtgctgtcagtttcgttcgccattcgctacgggccgacgctgggtaaggttttgtattttggtccacgcaagtcaaatggtcacagaattccgccggtctcctgctgctgttgtaccggggtacctcaacgtgtgctcttatccacagtacagctttctctccagaacgatggcttttcaggactgaaaaggtggtcgaccatagaagcatgtcgcttcgtgcacctgttttgcgttggaaacagttcaactgaagaacgtggattttcaccgtttcagagactgtacgtagtgttgtcgtgcatgcctctcgggatatcgccagagaagcaggcaccaaataaacaacgccgcgtcaggtacgccgtttgtgctttcggtgtctttctggttgcctcgttaccccctggaacgttcataaccatcctagtttatcccttatgccgactcgcacttgaaccacaaacggtgcaccaagtacgatcaccttcccaacttaccaagacagcagtctccttcacgcttagacgcccccgactttctcgatgtgtctctccgcgttgacgcggcactcccagttttttcctggcgaggcaaactgctggtaaataattcgcatgcacgccgtttccagcatggcctattgcgcgctgcccgcagtcgacaagcggctggcggctccgagttagcaagcgtggttgccatggtctgcccatgggaaaaggcttgtatctttgggaagaacggctccgcctcggtgaggtttcgtgtcttgattctctgaggagggtaagaaattcgcgcggaggtttccgcaaaaaagagcaacgaggcaaacaggttcacccgcttgtcttgccagcggcctgacctaaatttctgcaagctggttggggctctctcgcgagtggcccgacactcctctttcgttaccctttgttgtcgtgcgttttttgaattgctgccttctcgaggtttgtctgtagatcccgacgcaaccgttttcccccgtttctttggggacttaacgtctcttctcgggcggtgagacaa

SEQ ID NO: 2276 - DNA, 4336 bp, Toxoplasma gondii
  source 1..4336: mol_type = genomic DNA
acacaaggcaaacgttgaaatacagaacagcgacgaacggctgatagagagaccagaagcaacctgtgacgtcgcagacgtcgaagggtactcgcaacggcgtagggtgagaagacagttggaggaaggagaaggcaactcgaaagaggctgaggaaagaggaacgaaaaaacttacaacgtgtctccaggccacggagcaccggggtctgggggcgggaggtccggaggaggcactgaaggcttcgtttgatgtagtgcgtttttgcagcaattggatcccatggcgctttgtttttttgcgaatttcggcgaggctggagaaagagagaaagctccttcgggctgaaggagtggaaaaaagaaaacgggggcgaggagaccggcaacggagacgcgagccggggagcgcagctgacgaaatcgtaagcaagtctgcggtcgagctcccctgactctttgttcttccctgggcaaacagtgaaagagacccccagaaagcaagaatgcacgagagacaagtttggacggacagtaccacaggaaggcggaagaagaggataacggcggatttatcggaagaaaaaacagggaagctgtccctcaaaggaacccaacgtttctgcggcagccagtgaaccaacggagacggacaacttcgtaggcagaactacaagccgagggaaaaccgaatcgccggagaagagagtctgcaactcaattcggtgaaaaaggatgtctgctttacgcaggcagagtagtaagcagcgcgacagaaagtggagaaccgacaagattgacgagcattacggagtagaatgctatctggcctccgcttagagctaacggaaagacgtctgccgactcggtgctgcgttcaccgccacaaaaccggaagtttcgctctcactgcaggaaacaagagggcaggaaaatgcagagggagctaagcgtcacccacgggaaaaagaccgagaagaaaaaaacgcgccactctgacgcacagcggggcccctggactggctacgcacgtgcaaccctacgttgacccaaaacgcgaggcgagggaaggccgagagcaaactggcacgcccaacgaaaaaacgaaagggggaggacgaagaaatcgaagaatgcggcgggtttggaagctcaacatgcgcggatgaagttggagatgcgggagaactcggaatgagcggacggcagctgcggaaatttgcgttggggcgagagacacgaaaaaactctgtcaagcaaagtggattaatcccgaagaatcgcgagcaactgactctcggatgtccaacgcgaaaagaatcttgttcgtggagaaggggggcatggcgatccgaggagctggacgacacttgcactcgaggtcccgtgctattgttctccgaaggcctttcacgagagcacaccgcttgctcctcggcaaaacgacgagatgagtcatgctccaattggaaccagatgccgaagggaacggagaggctgaagaggcggggaactcttcagacgcgacgcaccagacaaggacggctcctggcaacacgaaatccttcttggtggaactcgtgcgcagcggcctctgcggggaacgcaagcgagtacggttgccgtgtcaggctgtcaggcacaagataccggaaatttctagagaaggcctagaaaggacgtgctctgatagacacaactgcaagaaccgggattcaatggttttatttgtgcccttctcgttggcgaaccggcggaatatccggaaaaccgaggaaaacgtcctgcccgcagctgtcgcatggcccgcctctcccactctgcaagccctcgcctctgtggtagttgcacaccggggaacctcggttccataactctcctctgtttgtttctctgtttctatttcaagtccggtctctcactctacttctcttcttattgccactcagctcattcttctagattgttgtgttctcctgcctcttggcacttgtaccccctgtcgcgtgcctcacgctgtgctgcgaagccagcgtgtgagtgccagcctccagaaccatcttcgcgacagttgtatcggcaaagagcaccgccagaaaaggctgaatttagctcaacaggtgaacaggggcgcaccttatactgttccacgcgtgtttcactgcgctggagactggaacatggagtcgggtgacttgtctaaaacgacaaagctgccgagtcactttccgtcttcaaaaatccagaaacccttacctacgatccacgccacggctcaatttaaccgcacaaaacctctgcggacacacacagaagacccatggcgaagaaacttactgacagcgctgacttactactcgtcaaggcgcgctctgatccttgtgtctcggtgtcgacatcatccggaagcatgggtgtgcctgcggccggtggcacgccagtgttcttttctctattcttaggactcagtggcccgtggatctttaccctttccgatccaacttctgtgctttgaaaaaaagagaacaggaatgttgccgctgtagcgaacagaaaccgaatcgacgcgggaactcgagccactgttttgtttccacagcctgacccaaccgaggcgagagatagcgtggggaattcgaacagtaactctgacgctgtgcatcggaggcgaaagagtgaggtgcacgaccgacagaaaagtaaacagaacgcccagaagactcgactacgttctgacacctcatcactaagtaacgctccagactcggagcctataggacttcgtcgctggtgcacaccagaagccggcgaaactcgcgcccacacaccccgtaccctctatttggtgtagaagcccctttcccctattgtttcgtcttgtttgtccgtcgacgcttctcgcgagaatcacgagacaattttgtggccggcgtaattagagccgcctgatagtttccgacctttcaccgtctaccacgggtgtccgctagaatgccgccgcattatagatcaatacagggcatgcaggtgcatgagaggcgacgtctgccgcggtaaacacctgaacaaactcacgagggggggaacagcagaacgatctaaatggtttgcattgctgcctcaattttcccgtccctctacccgtaccacagcggtctaggtaggacagaacgtacgcatgtatgcgctgtgccgcacgtaaccgaattggagatggacgcggaactttagggccgtgtcacgtgacgaaattcgtctgttcgggtaaaacggtggagtgccttcaaacggagctgacgaacctcattcccaacgcgcgtaccgtttcttcgcatttgcgtaggcacactgcttcgataaacgagttaggagcgccacgggtgcgcgcgcggcatcggctgacagcgtgcgtacgccgacattttgagttggcaatgcgactcttcctctgtgactgcttcgtttcttcagtttcgtttgttgtcgctttttccatagaaagtctatcgctatgttttccttttcctggccatgaacttcgcctccgaacgggctggtttgtgcgtcgtcccgcccgcctccagaccgctataccgcggccggacaactgtcgactcgactagtggtccggcttcttctatgactttgttttccatccttctctgcattttttatcacctttgtctctcgtactcgttcttcagatcactcgtctaaatctgccggacactgctcgtcgtttcggcgttgatgtgacttacgggaaaaagccagttctttgccaccgtggcggcgacgcttgcatgcgtggctgtcaagttaccgtaccggtgccatttctctacctctccttcgtggattaggttctcctgtcgggctgtccatttgctttctgtttgtcctcttcgtcagtaattcacttccgcgtaggcagagtgcgtttcggcgatgagcactccgtagacatcgactgtgccggagactgcgtggcgattgaaggcagttttagacaaggcactctctctcgaatttctcttctctttctccgtgtttccccttgttatttcttgttgtatttcgcttcttgttttcacaagtcaaacgctcacgaatcgccgtcggtgcgtgatgtaccgtgtcgagtgttcgtacacctcgtgccgtcgtcgacaactgaccggctggcagttgcttttcttgggcttgtctacgttttcctccgccgatctcgtctgctgctgtagcgtcttcctttcgtttctagaccgcttgtatctgctcacgaggttttctgtcttttctttcgacgtgttccgtctcgtgctcggcgcacacga

SEQ ID NO: 2277 - DNA, 2579 bp, Toxoplasma gondii
  source 1..2579: mol_type = genomic DNA
ttcttcgtggatgccggagttttcgatttttcaggcttccacgccgagtccgcagttcattcctctgtcttctctctcttcttcatctgattacttcccccgggagacgcgccgaagcccacacaggcgcagcgaagaaggtcaagaagaagcagaagagagttctgcgctccctggcgtcccttctcgcgtgccgagggccgggcgagtggcggaaaacggagagctgggagcaagtgcacgagtcgagcactttgatgactttgaattcggtgatttgtagaaataaagacgacacatgccagtcagttgcatctcagctgcgtgagccataccgccgctctgcggtacccgtcaaacgcggggcgcgtccgtggggacggtccgcccgcctcccctccccgcaagagctacacaaatgtctgcatatctaagcatgagcgtatgtaggcatgtgttcgtgtgagtgtcggttcgtggcgctcatcatacacgcgcagagaagtgaagaaatagaacggacaaagaaaatagcggttcgtagatcggtatgcgtctatcgaacacttgtcataactggtttgcggcgcgtggctccgaggcgcgcttgcacatctagaaagaaggtcaggttcacaagaagcgaaaacagacggcgcccgaactgtccagacactaaggcaagaggttaagcacgcatggcggcgttcccgcgttctcccgacgcaacccgcccagaatttcttgggcgttgtttcttttatattctctgtgcacagagtgaaaagggggacgggaaaagaaagcaggagtggatgtcgtgcgcacgagcctcgcagggcatgtgccgttggaagtggctgccgatctttgctagtcacgtcgaacagctgctttgtagaattccactgtgtcactcgaaaaacgtggcgcctggtacacattctttatctctgtctttcgcagcgtgtctgccgactgcgtggtttccgtttttaggttattttgacctcaatttactctctattcccttgcttcaatgatccttttgacagaaataaacctcattaccgttttacatagtacgcttctgctctccccagggcaaaagctgactggctcccgtccccggcaatctcacctcttcctcctcgcttcgccatttcagtcctttcccttcgcgctgtctcagtcgtgacagcctgtgttttttgtctagatcaggtcttctctagtagctatctttcatgaacacagataaggtgggaaattcgcgcgacagtgattagatagtgatgacgatgcatgaccttccaagacaaagagcagctaacggccgcgtagtggacaatgtggcgatataggagagtcaagccagaggtgcttttaatcttcgtcctcttgcggcttccctcctttttccctctctttcacagtgtggcaacctctcaaccgtctgggctgtgtgtgtgtagtttgtttcgatttgtactagaaataaacgcaagtgcatttatctcacaatacgaggatccgcgggcttatttacacaggcgtctggcttggtctcggggaattcctccgcacgggatgtacggtctagtgtatatatagttcgattgacactggatttccgatggtctcttgattgctgtgggtggagaggagagtaaggaagccgtgccattattgtcccactgagctgttgcagttaatgccaacttccagcgaatcactttcgcaaggagggcgggcggtgggcgattgctggctcccgtctacgtgtttgagtcgtttatcaagagcctgggaaagtactggtcgattcacagttcaggttgatttcatagttaccacctggggatttattgtgcatcagagtatgtagtaactgagctagaaataacatagtatcgaaggaggcgatggctacgagaaccccgagcatttatacgccgtggcgtgcgggagtgaacagaaggatgcacatacagtgccaaagggtctggcggtctcagtgctccggagaggtactggtgatgagtccaagcactgctgcgaaaaaaacgtaggagttaacaggagggccgctcgacaaaaaccggttgttcccgaattttctgggcccttgactcttgccggggacaaaacacaaaacgcggtcggcagtgcactgggcggaccgttcaggacctgttttttgtgtttttgcttctttgttgcctcctcgtatccctcgcaagtctctgctctgctcaaatctttccgccgctgctaggctgagtgcaagtgactcagcctccacagcagggggcctttgccattcgcccccccattgcttgggtgaccccgttgcaccatcagtgattgacttgcctcatcaggttccgcctaacgcctcatcataatttctcggggtgaaaaaccaagaggccattcaactacaccttcatttccgcgtgtcggatattgttgagcacgcaattacttagcaagtcccgggtgttcttcacgaatctcggggttttgtctagaagccgacctcaccgagcgaagcctgaaggttgcgtgcatcaaaa

SEQ ID NO: 2278 - DNA, 2797 bp, Toxoplasma gondii
  source 1..2797: mol_type = genomic DNA
gcatttgcctcgtgacgcctaaagccgttaatgaccgtgtgagtggtgcgcacgtacctcgtaaccgtcaatatcggcgccgaaattttgacagcctttttttcacacattcgttttcacccgtttccgtaagcgagacactcgtcaatcctgattttccttgttccttgaatatggtttacgagtaattggaacgaaaacagacgttccaacgcgccagaatgcgactgaggatcggtgctgttacgcacggcgtccttcctccgtgcccgaaatgaaggcgttggggttccccgaagaggaccgacctctgtatttttgctctcaggatgctttcaatcaaccgcggtggatggagaaagaatagtgttttgcccagtgccttagcgtagagttttccagacttttgactgttcctccagtacaccggtgaataagactcgcagcccgtcgttccatcggcacgcaccacacagtggcactgttgtactgtatgtggtcaacgtgtcgtgtgaacggtttccgtcagcattgtcaagaagaaagagtaaggggcagctgaggttctacgcaagagaaatgagcggtcaacttaggctaccccaagcacatggggacagtaggatgttgcgtctgtcaccaaggccatacgacgacagagttcgttgcccgcgtatcgcacggaacaaatccaggcatttaagcgaggttgctgtggcactgttgcagcagagtagactgtgaggaattaaaccttaaaacgaagaaacgtgagcacgaaagggagtaaaaggtccgtaggcgacattgtccggcggcaaaaggactcaatcggactgtacggaagccgcgtggggttcaatgctttggtgtactgttgcgctcgctaggccggtggtgctgaagctgttacggctggcctgcatttatatagacatggaaaatgccttatttgtgtacatacgaggaaacaacgaacctgtccgtggaggctgccgtccattactgaaacggtactcgtgctgagggtggggaactcgccctctggtgcttcttcaaagttttgttcgcgttctgctggagcttcggtggttgctgaggatagcgtttcctgctgctcctcttctacttccacgtcgtgctgcgcgattgtatctgccgtttcggcatcgtgaatgctgtctaaagatgcctgctcagcagcagcgatgtttgggtgtcgagttggaaatgccctcgtggattcgtccgctgcttttagaatgtttctgccacgtttcacgttttcgttcgcatgtgcgctcatttcggacactctctgtctgagttcctccttggctgcttcttccgcagcaatcttcgattcccgctcaagtgcttccaatttattctgaatttcctcttcagcgtttttacccaccgaaccctccgcgcgcattcgggctaattccacttccaggtcagcccgtttctcctcttcgtcgatttctttcacgtttttatcgatcgcttccgcgatcgtatgccgctcggccttcagattgctgaggtcagcttcagcctcatcggcttcgttctccctcctctttagcagctcttcattgaagtctgcttcatctttttcaatgtgcgcattcactttttccacctgtcccagctcgtgctccagcgcgataacctcctgatggaagcagtagtgatcgactctcatcgaaatgtgatgtacgcttcttatcgtcacgtaccgcctcagccacacgggactcagcttctgcctgtgcgacagccaaagtagcggcggcctcctcgtctctgcggctgcttcgtagctgacgttcgctcgcttttcttgcgtactcggcctgtgcaccgctgacgatcgctgcggcttgcagtgacttagctgattaaggggagagacatttctttcagcttccttggcagtaaggaactgtttatcagttaccgagttcggcttcggctttaccctaaaaaagaagaattgtgtggtgcgtcaaatggcggccggaggcactgattgcgcttctcaccttgctttcgactaccattttttccacgtcacagcagtgtggttcacggcagcagtgaatgcggtgtatcacgctttgctgcttctctggcaagggaactggcggcttgtaattgtcttcagatacttctgttctgtgaggtactgccgcatctgatggttctgcctggtcttcgggtactgagagtagcacggccgctcttgtgccctccgtaagtgccctccaaatccctgcttcgttccccacggcgctcctggcacgcagaacccagataactgacaacgtaaaaactacaatggtgtgcattttcggtgagacagagatcgttagtcccaggtacacaacaaaataacacggtcttgaaggccttgccgcttgctattctgcttcctcctctgcgttggagaggtcaaacaatataaatcagcgcggtagctggctgcatgtggtggtaccgctactgttgtctgctgtaatgacacgcgactttgctatgtcttgttctcggcgaaccgtcttcgctgtgagatgaacatcgttgaggcgtcaatgcttcctaaatgtaaatgcactgtggaatttcggggaactgcactgccgacatcagcaaattacgccgtggtgcgcggggagtgtggcatcgacccctgacggacacgtggctcgtgtagcgagacaaatcgacaaaaccgcacacgatgaagtgcttttccctggcacccccaaacctgttcgtactaaaacca

SEQ ID NO: 2279 - DNA, 2328 bp, Toxoplasma gondii
  source 1..2328: mol_type = genomic DNA
catcgtgtcagtatactttctttacatttgttgaggctgtgtttccgggtgatatctgtggagagtgcttctagttcgggggttggaatctcatttgaatagtgatggtgtcgtcgaccatggacgaaccgagttcggagtttttccgggttctcagcacagagaatgactcagggaaacgtttgtctggtgtccctttgcgatgtaaaggtttggggttgtacgggtcgctgttactcaagagattcaaagattcaaacatctggagtgccggcttctgtcatctttcgcatacgagctgcagtgagagagcaacgggcgcaggcgcgtcacaagagagcttcacgtggatctgggcatagaactcaatattggaaaaacgagtgaagaaggaaggccgccaagcggtgtccaacttccacacaatggcggcaacgcaaacatcgacggggtctttttacctcccttgggaagttgagcgtggagctatctcaggtattcgcattcgtgcaaagaatgacatatggacaattacctctatgcttgtttcggtctgcatatgtctacacacactgtgtagatcggtgtattttatgtagaaactgcagaataaatacagaggccgatccatatatgaatagtacagatgatatacagagagacacgtgtatgcgaataatgcataaaaaataccgaggtacatgcgtatgtagatcattaagcaaatatacagagatacatgcgtatgtgaataaaagaagagctgtatgccatagactttgcttcttgttttgtgcacgtgaacgtgtgcacggatgtagcgagtggagagggagaagcgtctgagatgggaaagagcagtgaggtattcgaagcgaaatattttgtggcactactgcagggggcaagtgcgctttctctgcaagcaaccaataaacgtgttgtcatgttgtgcggtgcctccattatggtggagaagagagcttacgtcgtgcattgtggctccacaaactaccagtggactcgattagaacgtcgtatttgtgaacatctatggtcctatgcaaactatacacactggacctaggaggcgtggtccttagatgataaacggagagatgcggatcctgtcgtgagtaaaaaacatacacgttatcattcgtcggccactgcgtcatgccgaggacagcatttccgcactgcccttccgcctcggcagggcgattggcatcatcaagagcactagtgataatcaccacaagattaaatcgacagcgtgcttcgcaacccactattcgttgatgacagaacaccaagccgatgttggttaaagacccggggaagagcggctcaggggcaggggcaacgtttgctcacgtagcctatggaggaaccgacggcaatcggcaatgtggcgtcggcacttcatgatgtccatcctccgtcggatggcgttttcccaactgacgcctgtatcggcaatatctttcccctggcagggattgtagagctggtgcataccgcctgtttccctgcctcattggaggtcaaatgtgattgttgttgaagtcaggttgacgttcactggcacctttaaccacatggacgctttggcaacgatcggctggggtgcacgagcacactgccaatgcatgcgtcgctcctgaaaacccactttacgttcgctcgtaagaacattcgtgcggcacgaagcagcgcgtcgcaataaacgcgtagtgtagttcagcgagggggagttcctgtctgaacgtagacacggcgttttccaggttgctgtcggcgatgttggcttctcaagagactacagcatactgcgatgaatgtagagtaacgtaactgcaccatcaagaatcaccatcgccagcgcagtgtggctggccatggaggatggaacacgaaacagcactccgcgaatccaccctgtgcgccatgagaagcaaatctcgatgcctggtgacagcgacaaggtagggtcgcagccagtttcgtgtaaccacttttgttacggtaggtagatggaagacgcccagtctatgaatgcaataaaaggccggttgtagatcctccatgcgaatgtgacggaatctcgccgttgtcgccaaggatcccaacttacttcaaagtacgatatgtcgacaacgacataacagagtgagttgacttcgtgtgagcaacttaatcgcggcgtggttagtaacccaaatgcctcatctgcaaagagccccccgcttgttactcttcagcaacagataccaaaaaaggtcatgatgaatgacaccaaacggtggtttcatcagtgaccgagaa

SEQ ID NO: 2280 - DNA, 2342 bp, Toxoplasma gondii
  source 1..2342: mol_type = genomic DNA
tgcatgtactatataacagtgcatatgtgtagaacatttgtgtcgagcacaaagtacttctgagtttgatattagacagtggtcgttcctttcaggagtcccgcagaaactcgtcttttcaatttcgtcgggaaagtctaaggggattgtcgtgaacagacccctttaattgatgaagctggctgtagtcacaatcagctacacttccagttagctgcgtccccacgtgtgctgataaacatcaatcacgtgtctgcggtacaagtgacgtttccacatttatcgtggctgtccctatgattccattgggatgcttttttcgtaggaggaaactcttcctttctttgttaattttttttgcggtaacgcgtccgttgtttttcgttttgaaagtgaatgcaagaaggaagagaaactccatgtagagcgtctcccaagtgaccttccttgttgaatccgttggaggagactttcagtgatgcagccgactgccttttctcagcacgtctacccgcgacgttttcgctctctaaggactccacgagaaagccgcaaaattttttgcaaaaggcctcgggaaagagccacacggagcgcgtatttagtgggttgttcgaggatacgaaaacccagtgacacacacgatcgcgttggcattttaaataaacagtcgtcacagatcgcttctccactcgtgtattaccggcgagcgaaaactactctgctcggctatcacgacggaactcgaatccggaagacagatgctttcgctacagcatttcagagattttgccagccgctctaagcacctgcggcactaacgactcgacggatcaaacggaactgtcgtttttgcagaagtcagttcagaaggaaatgactattccatcagctcttacaaacccgccgttcgtggatctcggtcctaagcgaagttccaacacgatgagggctaacgacgaagaaaggtgtggaagacgcgagaggctggccgcggattgaaaaattagaaaaagcgagggtatcaaacttgaagacagggaactggtttttcaaaggaaaaacaagctcagctgcttctttccaacttgcgaattcgcacatttacaagccgctcgactgtggcgtacatcatttgtatcctggtcaagttgagcattcgaagaaaagcagatggcgagaaggtttttgacaggaaaaaacaggcgaaatggggagagaaaagctacaaggaaaacggaggaatcaggaaacccagggcgacacgtagagtcggctctttctgctcttgctattttgattgagggtgtctattgcgttctatagcaaatcctccctattggttctttatgcgtaaaaaatcaagtaaaacagtgactgtcgatatgtgggaaaaaacgagaatcgaataaagccgttgaagacctgacacgttttgtctcccatggagtcttctgggtgtctccacacctctgggcccgtcaacaagattgtttcagcatttgtgcaattcatctactctgtcgcttagacgtagaagagtatttttttctgtttgtccattgtttttgcccgttatttgctcgtttccctttttttagatttagatccccccctttcgccgttcgtttccttgcgcactgctgtgaccggccaatctcgaggtgacgagactggtagaagtgtgtatgagtttcaaaacccgattttttcgcctactcctctgtttcctcttctttcgtccgtctccttcagttctattccttcgatttttcctctgtccgcctgcttccctagagcctcgtcgtcgcccccccccccgtgtattcggcactgaaagagctttcctgtctcccttttccattgtttcttccgtttcgaacttgccttattttctgtccttgtgttctttactactcacgttgcttctcccttccccgtgtttgcggcaccacacctctgcacgcgcgcagaaccctcgtctctctgtcttctctgagcggatatcgacacctgtacttgctgtctcttattatctcttcctccttcgagctcaagagcccctccctcctcgcgttcctctcttctcttctgtcggacatcgttttcgtcagttctcttcttgcctgcaggtgtgcgtgcgtctgcctgctgtccttttcgttttctctccttcatgaagcatcgtcggagcaaaactcggcaatccgcatttctctatagctggggagaccgactgtgtttcaacagcggtgaaccctcccgtttccttcattgcgtaggacatgcatactcatcagacgaagccccgacctctcgctttcctgtgaagcactgaaaga

SEQ ID NO: 2281 - DNA, 4414 bp, Toxoplasma gondii
  source 1..4414: mol_type = genomic DNA
cttgcgatgccaaggcgtttcttgttcgcatgtgttggatgctcaggatttcgatggaattcgaagcgtcatacatcggtaccaaatgcacgccaagcttcaagagagcattaaagattggagttcacctgcgtagttcgggaactctagcacgcctgtatcatggggggaaagtccgcttagtattgtgcacagcagctgttgttcatgctcaacacgacagtgatgaatagctcgttcctttaggtctaaagtgaatttcgttcgttcaatagctaaagaggacacgtagcggatatatttccccccctcacccccccccccccgatgctgagcatgaactacggacattttaatttcagctgacgggacgctgtcgagtctccagttcttctaaattcgtgtgagcatgaggatgcacgtgtacagaagacatagctgcagcacaagcggcgctctggcactcgtgcgtcagggttgttagaatatgcgttagctgagagttgttagagtacatgttagctgacggtctggcgaacgctcctggtaggcgtcgtctttggtatttgccgccttcgatcataagctgcgatttccttcatactgaaaaaaacgacagagaatttgctgaccatggcgtcagttaacaagtttcaaaacccaatttcgggagctcggtttctgtgtgaaattcaatcgttgcggcggtggtcaacgtgtggccttgtgatcgttgtccattctgaagactgaaaactctccgtggcaattctcgcaaaactagtgttgaaacgaagcatatttgttaaggcaaaacgttaaccgtgaccgcaattgcgagtcgaatcaccattcgcggctttgggtcccgttgtgaagtacaggactcaactgagcaagttgtttccaattggtaggacaggggaagcatgggataattgagagtttctacgatcaatacaacaagacgattagcagcagtaacatgtgaggaaggcgtgaattctcttgaagatgttgcgctggtagctaaatgggtgttcacagaaacctcaagaggtccctgcgttgcttggtgagattacgtcagtgccccgcagtaggtgctactgttgcggagagacatctgtcaaattttcggacgttcacttactgctcgacagaaaagacaaactcaagacgtggcttatgtcatgatctacgcgtctcaaaacatcactctaaccgagtctggtttaggcgtccaccccgtgatttccacttcgaaaacttgctcgccacaattccccatccacatatttatttccgcgagtgacaaagcatcatattccgccggctattcctacacagagtaaccggaaccctctgcagggggaccgtgaagagctccgctgctgttacacgccgttctcgaatagggaaaccacccattattcttcgttgacgtgtttctccttctcccgtaagtatctttcatacgcggcctcaacttcacgtcctcgactctcttggtgctcatgctgagacccctcgcgacatgaatgaggtacctgttgaaaccgagatggtccctgggacctgcaggcaagggaagggacagcgttataaggagtcaggcccgtcgttgttttttgccaggttccaccgcaggaatgtgcaaaaatgtagcgtggaaacacacggtctctggagtgttaaacagacgggttaagaaaccagattgtgactctaccagactcacggctaacacccgacacctgccgggattggctgtgaaaaagcgttttttaaaatgcattgggacgctcacaagatgcagaagcacaacaagcgttgcagccacgacaaaccacgcacggagagcgtttgcggtttactgtttctcttcgggaagtacagctttctgtatgtcttcgatcggcatgttgatgtggaacacctgctcgtacaagcggaggtagtgctgaggcggcaacggttgacgtagaaacagcgaagaaaacaaaattacacaacgttaggtgttatccggcaggtgaaagtagcggtaacagagagggaggcaaaaaactattactgatgtttggtcgttacgccagagaaggggtcgaggcataaaaggggccgaggcattatggaagccccggggtggtcaggaggcaggggcagcttcttagctgaccgcagacagagacgccaactagataaagttattgagtgtctggcactgaattatctgggcaggccccacgatagaccggcttgtcacggtggattccggcgacgagaacacctaccagttataatgtgaagagccacgcggatacaccacattagataagttagcttcctcagcgcgttgacaatatggcactacttacaacttttcatgttttccgtcgaagtaattacattccgactcattccacactattcgactgacttggcgcctggccgtttgaggagtgggaagctgttggagtcattgcaacggtgctagtgcaaaaaaagcactcgcaggagttgaagtgaaccagttttcggctgtttgtgtagaacgcttccaacatgtatggcaagcgttcatcctggttcgttctaggaacttatctggcatcagcagatacactctccactgcgagttaagtccatgacaagcggctcctgtagttgcctaccataacggccaggacgcgaaccgtgagagttcgttcgtcgactgaatgtggtgctacatatgcgtcaaagcgttaaattgagtatcctgctagccacgaactcactctgacaaatgtgctagctcagcggattcacaagagtagtcgcacacagcatgaaggccaatttaccgaacgatttaccgtcaggagcggcgaggtcctgcatcccgcgcatcgactagagggtgctcgagtagcagggctgaggaaatcatgcgcctgttccgaggctgtgctggtacactagcatatgaaatctgacagcttaactcaccgttgtcgagagcaacgcacgcgtggggttggccgatcctctaccaaatgtgtcggcaccagccagttgccacaaacattttgtgtgtcgggatacgtggacgcaaaccactccacctccagggaatactgccgtgagcctgtagtcaaaacggagtgaatagcttgtgggtggcttgttgcttctactcttaagcgcattgcacttcacactcagctctatttcctgacaagcaaggttccgcgatctgtcgctcccgtcccctgtatacttagcaagctgcagcgaatttggggttgcaaaacgttcgccaagttatttacaatacttgcagtcgcaacgtagttcccgacagagggctttcttttgcctccgattctgacaacacgccggctgcaggccgctcatcgaaggttcagttagcttatgacactacgacaacgcactttttcgtcttttttcatgcaagggattgcaacgtttctagaaaacacgcgaccagagccgcaggaataactctcgaactggaacccaagcacagaacccttcttgtgtatttgtaagcgtgacatactcttgtctctcaagatgacggggctagcctttttgcgagcacattctgcgtgaacgtgtttatttgaccgaaagcttcttacctacgcctttccaacaaaacaggctttcctggactccagggggaaaagcgattcagagtcgtcggctcacgagccaagaccgcaaatgttttttttgacttattctgtgccttcagggttggagacacgctattaccatgcgtcctcccccccccctgccgccctcctaaacgcacacatgcgtttcatgcactgacataccgactttgtgtctcgtgtcctgatgatactattttagctcaaacgggaaatttcgcgtcgccactcttttgctttttaatgtggtcgatggacgtcctcttttctggatggcgttcctgccagaaagtgtttgttctggatttcacgggacggacgcggctgtgcttcagtgtgcatgcatgtttgcgtgccacattcacacagccaatacgatgccttctgaggaaaacacttgcagcggtattttctgatcggcgcttctgaggctcttctctccagttgcttcgcttctcatcattgcctttttcgtggtggtgtcgccggaacgttcctctctcctcaatttcaccgggtccgccctagacggccatcaagacataccccctcaagaaattctgctccgtagagtgtcacttcttctcgcggaatcgccgctaacaatgatctgctttcccgccagcccgtttgggtagactgcctcccttcgccgactctgctcaaactcggatgtctgccgtttcttctgagtttctcgctcactcgcgtacgccagtcaagtttca

SEQ ID NO: 2282 - DNA, 1816 bp, Toxoplasma gondii
  source 1..1816: mol_type = genomic DNA
aacggagatgaacggttatggttttatgatgtggaacattcgggttagtgcgcggtcactctgaagtcgtgtgtggaattctaggctactggggggcgtggacatccatctctgtttgacatgtgtgccaaacgtatccagcgagcgcatgcggccatcgcacatagctttgtccggcaacgaggatgatagtacttctcagccggcatgcgaccgctagagtgatcaggcatgccactggagctactgtcacccggcctggcctcatcttccgtcgactgtaaacctgagctgcagaatggtcaaaacttcagggtagttagtggatttcggtttggagttgttttggggggggacaaagaagaactgggaaacatgcgaagcttggatgacttgctgctcggtcacgaatgtaactacacgttccactccttcacacacaagaatcactcaaggacaactggtgcttgccggagtcatgggagggtgaaaggaccacatcggtggaccactggaaggattcacccgacacataggcaccactggtgttttgatgtcagctttgagcagtgagtttgactgtgcagctgagagcgccagtagttgaacttgcggaggaatttgagtctttatctaaaaaacagttggtaattgtgactgtggccttctgctgcacacaccgctctgaactgtcaccagcaggatgcccacagtttaaaaaaatgaccgaggctcagtgcttcgacatttgctctcctccgactttctgcttgctgcctcgacccgctagcgtgtcccttcgttgagagtggtggtgtgcttcctctaatttggagcgagctgtgtagtaatccttcaatgtgttcgccgctgttgacgtggagaatatctgcaacgtaagactcaatttcaagcaggtcgcaaaagctgcatcagtcacaaagttaattcggcggagacaacaagctgctgcttccttcccgcgaatgcgccatgcaaggaagaaaagtgttttcttccagaacgacctctattcaggttattcgctaggggctgacactacaagggctcttgttttcacttttttccgtttaggcgcgcgaaggttctcacgaccagctaggtgactgcgtgtacgacacctaagaaggaaaagaatccaccttcggaaaggtagcgttgcgtggctcccgaatcacctagcaacagcaaggttacaaagatgcaaaactagctgaatttccgtgaaaacgaggattattttcagagagcgtagcgttttggcgaacagtcggccagaaaacgggaagcacagccagcgacacttctccagcgtacacatcacttgtcgcgcatgcgttattatcttggaaccttagtgagttctcctgcccctgccccgccgacccagacaaaccacgcaaatgccacgtgcaagcagcagaagctgcctatatcgacggaaaacaacaatccgaaggagcaggaaacgtaggcctcctggtttgacaccgcaagcccagggaaaagcgtgttcctcgctcccagaatctcttcccatggcgcatcagtcgagcctgtctcgtgtattgcgcagagataattgctggcgagtttcctaatccagcatatgattgtttccctgccgctttcgggtgcgcttaactccgctttttcccactagaaagaccgttatttcctccatgtctgcgtagccgaatcgcggctactgcggtggctcaccggacctcacggtggcgagcccaggcagataaaaggagtctttttccgacacatatcgtttttgcgttgaata

SEQ ID NO: 2283 - DNA, 1304 bp, Toxoplasma gondii
  source 1..1304: mol_type = genomic DNA
agcatgtgactagcgcgtgatacaatcatacatgaatatatgtatatttatcacgaaaccaccactatgtctctagggacgagagagacaacaacactcacctggtgccaagatgcgcctttttgtaggtcttgtccgcccacttctgcactctgcggcgagagcgcagcttgcgagcagtacggataccgttgggctttcctgaaggagcaaaagacgacgcacgacgtccacagttcacattcgcacactgaagaagccacgacggctggaatctcgagagatgacacccgccaacgtagaaaacacgggagcacacaacaaaacttcgcgctgtgcgaacactccagctctcgaaaaaaagtacgcaagttggccacgcatctggagttcccgcggcctctccgcgctctcgctgaggctctggcacagcagacattcacatgaatggaaaggtggaaagaaagcgattcggctgctgtcggcaatactggacatgcgactagaggaacctgagagccctctcgcgcgtgcatgaggaggcaggagcgcgtgggcgttgttcgcgacatttgaggagaagcaacggaaactgtgaacgcagaaaaccgggaagagatgcgccactgcatgcgcccttcgcactcgcttctgccccactggagagtcagcacgtgtacgaaacggcaaatccgcaggtgcgcaaactttcgctcgaccgaaactgagaaaactgtgtttttttgcgaggaaggaggcaacgtctcgcgtcaatagacccgagagaggcggcgcgcagctctcccccgcgcgcgcgtttgctgctgtgcatcgccaggagcagttttccacccgcgaaggacgctttgaatgcactcgcagagacgggagacgacaaacgtgcgagaggaagttaccagagacacaggatccagaaaaaaagcgggaggaaaccccgcccagaacttcccctgaagagccccacgcgcgccccccccttccgcgagactttgtgcgttgtgtgggagaggggaagccaccgagcaggaacggggaaaaggcgagaggcgaagaagaaacgcttcagaactcacccatttttgcagaagctccttgacgacaactacggacgggcgactcggcgcatcatggaaaacaagtaaacagcttcacctttctcgagggtccctaccatccacgaaccagttccccagttcctcctctgtgaacttgctcctgcgcatgcttgcggcagtgcgcggtcgccacgccacgcacagcgaattttttttgccggcgttgca

SEQ ID NO: 2284 - DNA, 1332 bp, Toxoplasma gondii
  source 1..1332: mol_type = genomic DNA
gatgaagatgctgccaatccagaccgcgagaaagattacgccgacggccaagacgatggtcgggaggatgctcgatcgactgcggtagagcagccagacgagcacctcgaacagcgtgatgatcatcttcgcgagggcgtacgcgatggcgagatgctgcgtgtacaccagtgtgtttggcgtcacaaagttgatgcaggttacgtaacggtacttggcgtagatttcctcctggatctctgggcggagaatcgcggccaagtcgtacttgacgcagaggttcgcgggactcgcgtttactgagaagaagtcgtagttgtgcgcggagccgaagcagtctgcgccgtcgttgccgcatgcgtcgagcagactctgcttccccgacgcctcgcgggcatcgaacgcccagtaagacagcacacaagtttgccacaggtagcagccgactacgagcaccgccgtccgcaacagccagaggtactgcatgcgaaccttccgggccgcaggtcctgaactgatgtccacctcgaagcagtagattcgccgcttccgcagcgtaaccatctggaacgcatgcggcaaaatcgacgcgtacagcgacatctcgtgaatcgccaacacaaacagcaagaccgtacaactcaacaccagtgtgaaacagttgtacacctggtacggccagtctcgcggccgcgtcaacagctcgctcacgggatcttccccagacattgtgaaagggagactgagaaaaaatacttaacggcgggtggaataagaggaagagaaggatgttgttcaacgtcgagacgaagaagacacggtcgggaggccagatcctgttcagggcagcgtgggcgccaggagtgagcagcagatacttgaggttcgagtgagacaaaaaggacagagagacgaaggaaaacaaaacacaaggtgagtcgcggcaacgacttggaaatacgcagatacgcaaacatggaggagattttgcggagaggcccaggggtcaaaactgaaagaagaggcgaagacgaggtcggaagagacaagacagcaggaaagaaaaagaaaaacatgtttcgacaagtcgagaacacccagaagagtcgctgcgtgtacacagctccagtttccaggtcgccgaatccatatatacacgggtgattccgccgtcacttgttggaggcctcggggacttcagagcgttcctgtctcccgcgcgaggggaacgcgggaaagcatgaaaggaaaaagtctccgtctccgtactctggacgagaaaaaaggaacgcgacaaacacggagaaccgcggaagcagctgtcttggcaca

SEQ ID NO: 2285 - DNA, 3327 bp, Toxoplasma gondii
  source 1..3327: mol_type = genomic DNA
ctgaagactagagggtcgacgaaactcaacatggacagggcaaaacgggcagtggaacgtgtatggtttgcatgggcggatctttcgctgtctcgcgcgaaaatggttcgttttcggagaccgttcctgcgagcgtctaacgcctctgatgcttctgcctaatgcgtagaaaaccggcgcgtctgccgcgcggcaggctggtgacactcagaaatggagtgattttgacagttggggtttccccgttgccgcatctcacctttttccagcttccgacgagtcgacgcttttgagaacggctctcgagagactcctggaactcgactgtgaaagagccgacatattcgtcacgtgaccagccggaaaaacgagggaatgcagagctttctttttgtcgaaaaacgttcgccaaccgcagtgacaccgagagagacgacgtcttcacagattccagtatggtcctcgccggactgtcgaagtcgtttctgttgtttgagaagaggctgtttttctgtaggtctcgagtggggaggaaacgggacgcgttgaacgatggtttctaaccgcgttccacaatcgcgcagtggaagcgaacatgcagacagatgagaggagcgagcacgaaagacgcaagagtacctttgcatgcattcggcctcagatttgagtgatttgttgatgcattttgtgccattcaaaggagagcggcctttcagccactcgagtctcagacgaagtcgctggcgaccacggttagagaaaagaacgtcgttgtctgcactgaaacgaactggaaagttttcgtggacgcagtctcccttaccgatgtcggagttttactaagcagagaacccatcccgtgaggaagagtgtaactaagagagtaatcactctgtcatttaaggtgttcgcgcttcttgtttagagtttaaacgttaagttcacctcgaacaatcaaagaactgaaagtcgcgcatcgaacctttcgagtttccagccgtgaataggagatgtgtcaacttgagggcattgaaaactcagaacttggttcttcaacaagggagctacaagtgcgaagcggcgggactaacgaacgcgacgcgactgtcctcctcttcggaatcgcgaaactctcacaacgtttctcgagctgccaactaaaggaccagaaagcaagcttgatctttgatacatgaaatcactgaaaacaacgacctgctcctgaacgttttttctgcccattttcttttcagtcacacatacgtagagagtccagacctcctactcagaggtctgctgctggcagctctgcttcgacgcctgctggttctgttgtaatccttggttgctgaaatgttaccgctgcgtccatcctgttctgttcaaaagagaaatctggaaatctccaactctatctgttcaaacgcctttttctttgccgatggccaagtaccttccgacgatggttcggacgctgcttttcgcctaggtctctcgatgaggccaagagatgaccaggcttctccctttgtctattggacatagtgtccagtgatagtcttgactattctaacacaacagaacatggatttacacctctagatgaaggcaaaaacaagactgaatgcttccgttatatctcaggtaaggacgaagaagcagcgtgaaactaacttcggaaagtcttatcccacggctcgagtgactgcttcattaacgaggttgtcaaggcaacggcttcttgaccacactactggcaaaacggggttctctctttcgacactagagacgtttttccgtcgttggtcacctttttctgacgggtttcttctccagatttgtcttccacactgacgagaagaccccaggaacttcggcacacccgccgagctttgagaccgtaacaagctacgcgaaaaagctctacaggaggcctgctctgctgcctcagttgaaatggacgtctcctccccaccaagttagaagacgactctctggcgttgttttctcgcgtattctttgcctgttgcgtttgtttcttcgtctgagttctgtgggtcggcgcctctttttccggtcaccgcgtggaaagcaattcgattcaaatcattggctcctttgttgttcggctcaatttgcgccatctgttatcaggtcaggacgaccatctaggctcgacctggggtactacagtcattgcaagccgcgtatttacttccgaggaacccgtgtctgtttaggggatgtcatcttttgttcttcccgcaggaacccgtcagctgtttatgctgagagcgccgctcgctctttcgcgatctgtctgcggcttttttcgcaagttcccctttttttccgaagagaaacccgcaaacagcagaggctgccagggaactcgctggtggtcgcgacttgatcggccagagagagcgtcttctatcgaggccaagtgctgctgacgttgcgcgaatgcgttactcgcaaacacgactttgtgggtttcattgtgcgtcaaatcgattgtgtctttcggtcttttctttgccgttcgtaaaaagcgaaaacttcgcggagacgaagagcgctcgcgtgcaagtcgccagcgaagggatccgtcggactgtcttcctcgcaacgattgcggctgtccaagaattcttttcgcggttcttttccccttcttcgtctctttcgtttctaaacgcttgcagctttaaacgcatgcgccacctttctttttccgtaggtctccgagactctgtgacgcgatttttgcgactgccgccgttcatctgcggtgcatgtactgcccgcctctaggtctcgaatgaggttgcgcctccccctgtttcgcttccccttcagctttgtgaatttcaaacaccggtcattgcctcaccttcctggcgcttttggtcgggagtgacctgctgagtcgctgtctctgtttccctcgtttccctgccttcgctggcgagctccgtgagaagtccgtgtccacgcgacactgagccaagaagttatccgccacgaactttttcagggaaacggacatcgacgactgtctaaccagtaaagagttcactcgcttttcaagaacctcccctttgcgtttcctcccgtcggacgttcacgaaactgcgacgcagatttccagggaaacggcgctccacagagtgacctctttgtgcctgtctcgcttttttccagacagaagactctgtttcatcgcacttctctgacggcaaactgtgccaagggcgcccgttcgcctgcgcctccgagtcctctacacgtttgatttctgtccacttcagactatcgagatca

SEQ ID NO: 2286 - DNA, 2504 bp, Toxoplasma gondii
  source 1..2504: mol_type = genomic DNA
ctttaacaccggcgcaaaggtgcatgtttgttaacttcgtcacacgcgaaaataacgtgtaatactgtgaagacatggcagcgacctcctgctccacaactccatacggtttaacatggttcctctatccagtgacgcggatggccgtaaatggaaaattttggaagatcgaccgcccacgttcgcagcagaatcttcttaaatgaaaaccgtgtaccgtatgtgcgtaccattcatccattcatgttgctaccccgtgttggtttcgtaatctctatctactttagactggtgcaggttagcgtcacgtatcccattattaaactgtcgtgccctttggttacgggagatttgtatcaccttgctttttcgcgggggcacttgtaaccacacctagacgaataaaacggagacaaacactttgaaggtaaaggacatcccaaagactttacgaactctaatgccggagaaaagtaagctacgaaatgcgtcgtttcaggacgatccgctaaagctcgcatattgtggagatgacataaaaacgataacgtgttttcaatggaatcaacagtgacaggaacattggttctgtttttccacacatgctaccgaaattttagaaaagatttggtgggcagataatagataaagaaaaattcggcttgttgaacggagaaggaagcaaagctgaacatgattcacatgcctagccatagtcagccagctctctagttacaaactttttacagtaaactgcctaacgttgagtaaatgcaaaggcatttctggtaagttcttcacggagttatcaccccgttccggcttcttcaaagggaacctgctgtagctgtcacatccttgtggaatggagtttaagatgacaacagtcaacagtaagaagctgtcgaattctgcgggggacagcaaagtgttaatgcaacaggtgtttcgtttgcagtacacaaaagtccacttctgggaattggtaagctctcgcggccgatgagggcgcgacgataattactttgatacagactttcgtgcccttatcctttcttggtacaccgagggattcatgttactgcagcaaggcattaaacgtccaatgagactggtcgtgctcttgaagcaatggtgaaaggaactgcaatcagaacatcacacattgattatgaaactgcactgcactgggagaaagtatgcactgtacgtccacagtcgcacgaacagtgtctggcgtcgatgtacaacaaccgctcgcgttgttccactaccgaatcaaagtctactgttccagatattcggaatgcacgcaacagctaactacataacgttacgccatgaaggactccagattacccttaggacttctgttatattgaggcgcagtgctaagtggttctatgtctgactgtcgccttcggggaccccccactgacagttggcagggctgcagcgctggccccgtcacttgacttgcagagagaaccttctaggtgctctttgcggagtcgtaagtcgagattcgtttataataccctttccaccgcacataggtccccacctgtctcgtgttccggtggaaggagtggaaaagtgcggtcccggacacgcatttcgccggtaaccgtttatgcggcttgcgatagtgcacgagagatttgttggatatctgtcgacgacttgcgctcttcactggcatactattcccacccagcatttttacctggaccaccaacctggagcaatcgcttaccctcttttcctcactgtcgcgttgcatttagtgtctggcgccacggccggctacggaaccttttcgcgtgcacacgcgcgacgtcgctactcgcgcttcgacgttccggtgtacatacatccgaaacataactttgagtcatcgccgcagaacggttctgtatgtagcgtacttcaaaacaagaagtgctgaagctttgctattccgcggaaaacgacgccggtgttaaaccaacttcgagcggccgcttctgaccgcgtgcatctgcacacttgggcgggaagtgtgcttttcttgccggcaagctttcgagcactcatcggtgggattggcctgtcaacagcctgtaaagattgggcctcttcgtcactggcttcatcccactttaccgcatcgctccccgggcttcctgcagagtttaactcgtcgacctacgtggcggtgcgtgcgcccaaaggcttcggcaaccgtgtttttctttcagtttcacaatttcccctgggtttttgccgcctgcggacatggcatctgctgctgtcgctgcctgttcctgcgtccagtacccctgctgaacattgcgcgttcaccacgacgctctgatctaacgaaccggtgctggtttgttgcctcggagtgcactgtcccgttccctgggcaaggtctttcagtacgagagaaccagttgagacgctgaaaggatgaatacctcgtgcggagggcgtcccctgtcggcctctgttcgcagaca

SEQ ID NO: 2287 - DNA, 1803 bp, Toxoplasma gondii
  source 1..1803: mol_type = genomic DNA
cgaaaccgatgaagcagtgccacagcgacgcttgaacgtgtttccgggctacctcgatccccctactcaagtatttatgcttcaaaatgctagaccaacgacatgtgaacggagtcagaccactgccacacacgacagcaataacccaaggatttttcttcctctggttttcagtgaattgtcaggaagtgaccgtagattctccgaagacacaacacacccaggcatcccggagtaacggacgcgtggttgagagagagaactcaccatttgttgtgggcgcgtgagtttttccattgctctgtaggggggattctttcgttttctccggtcctacgatgacgtctgtttcgggactcagtgatgcaggcattcttatgtatgtacatctagacgtgtacaccgctacaaacacgtgaacataaaaatatatattcaacatatatatatatatatacagatgtattctgtagaaggtggagaggtcaccttagattttttcccattcttttctaggttctcactgtagaactgcacgatttttgcagtgagccttggggggctggttggtttcgcttcttcctcctacagtagaacacggctgacaatgatgcaagcaagatacagggagagagaacggataagagacgaccatggagaaggagggagggtaatagtagacaaaggaaaacctacttgaaacagcgcgtcgtcggcgctgagtatcaactctcgcccaacaaccaggatttcatggagttctggggcacctgctgtgtagaactcagactcgcttgcttactgtcgagttgaatatacacttgcagacttcgtggattttgttcagttcgttttgaacgaagagagttcctttcgcagttgtcttgcaggacacgggggccacggaactcttcaaatcttgtaaagaccaggccaacttgtcgaaatcaatgtttccagaagcataaatgggactggaatgacagctgagactaaggaatgaggtaaaaaggtgcatggacaagcctccccttttttgcagactttctctttcgcaagttctcctgcggtaaggaaacgaggaacagctccgtgattctgcgtgtgctgctgccacctccactcagcgttgactttctgtctttgctctgtttgtgcaatacgcgcgagcctttttttccttctcccgacccgtcatggaagttctgtagcttcatacacgactccaccgacagcaaagtcaagcgagagtgcatgcacgcgcatgcagttgcgcccgtggtgtctgtttaccggctttgctctttcagctgaacttccggcgtagattcgccctctttttcaccgctggaaactctttttcacacgctgagaggctctgaactccgctggaatgcgaacctcactgcaccgtcctctgctctttgcttgttctctccggaggttcctgttccaggctgctttgcttcgctggacggaagtccttgaccacaacgctctgtcgcaaatgacggggagccttcacttgaaagtttacatacggggtctggatacgctagggtgtatggacagctgtggtacatctgtgttctggaaaacaggccgaaactctctccgagtctagccctctctcctctgtctctcaccctatcgattccaagcgcgtctctcggccttgtgactcccctgttctccatcggcttgcttggtttctctcgctctcttgtcccctgtcgatctcgcttgcagttgaagagcgcgagttttgccgttccgatcctgccgagagagagagagccgcca

SEQ ID NO: 2288 - DNA, 4425 bp, Toxoplasma gondii
  source 1..4425: mol_type = genomic DNA
tgcgtatgaagaaggcgacggcggtgcttgggatctctgttcgttttttcggtagacgcgatattctcgcccagtgcctccagccttcaaaattcggtaataggagaagagaataaggagcgctacgacggtgaccgtgagatgcagcccggtcatcacgaattgcatgacgcttgggttcgctgacgtggcatttgtgacgatttcagcgatatccatacacgtcgtgatagagaccgcgacgaggacgaaaataacaaaggacgccgaatagaaaattgtcgacagaatccccaacgtccccgcaagcaccgtaaagacggaagacgtaaagttgaaggtcgccaacgaatctgccccagacgcgtgacaagagcggcgtgattctgaccacaactcgacggtcgccgaaagaagattatagagggaaacgagcgcgacccaactcgccaggtcgagtccccagatgctcttcacagtgagccgcatgctttcaagagagaaggcagaggaacacaagagagggacgtgggacaggggcgcaacacaaggcgcttacgaggtgttggacgaagcaacggatcggcaaaaaagaaaaccaaccatgaggtgacggagcaaataagacgggctcctgagcaacgcacagaggaaaagttgagaacggtgaatgcgtgagggattgcgagaaagaaatggtggtgtattatagagacacagagtaacagagaagctcaggaggtcgagacaactgattctttggaatctaaagcttggaagagaggacgccaccgtggatactgcggaggaaaaaccgctgcagaaaccacgaaagtagagaaattaaaactgaaggaagtgagcagagagagaacctcgagcaagagaggtgtgacgttcgaaactctggcaggcttgaccctataggagaatgaaattgtggccttgcaccttacgatggaaatgtattttatgccaaggaacgaaaagggaagccacatcagagactgggtctgttgaagtcaacgcagtagagagtgatgccgaaagttcagtgtcggacacccgcgaatgtctcgtgacatcgatcgctttgagtagacgaagcagccctggcttctgtacagctacttggtctaggagctggggagtgagaaacgagacgtgagtagaagaaagaaacagacactcaagagcaacggatggcaaacggagagtgcacgggaaaaagaagacacaacaggttcgttgactgcaggaaccacggatgcctttgacgagtctccgatcaaaacataccgatatccgcgcagctcgctcccttctcttctcttagagcaaaaccagaaagtggacaaaacgggttaacgagtgaaaaatggtcaaaacggtttaacgagtgacgcggacatgtaccccgccaaaaccgctgtatccaaagaattcagccgtcagatccgaacggcagcgtgcctcacagtacaacgggtgaacacgaattatcgagaaaagaatgaagctggacagagaagaacatacatgcggctctgtgtctcacgaagagttcaatgtttgtcgaaataaatcggtctggctgtgaaaaccaggcgcttgagggagcctggccttctgggcgcggagccagccaagacaagcgatgcagcttgttgctaatgaacaccgaatacgtcgaaaaaaacgtatcgaaataggtcatgcctcggagcaaacaactaaatgcaattctttctttctgtcaactttttcactggtcctgtgtcaagcgcttcagttccatcaccgcaggattgtccctcgctgcctggcagctttagcgccgcgaggaccttgagagaacagcagcctgtctgctgccaaaagggagagcttttccgtagctacgggcagggaaagggggcaacctcgggtacacttagattgtggcagtcctcgttccatgtgactttccaaaatttggcctctgatctggaaatttctcgggcaacactacgacaaaagctgccgcgggttaacccgcgcactctctggagcaaatactgctaaaactaacaattcgtccttcaggtgggcgagcgcgcctctcttctttacacaaccataccccactgatttcagctcgatggctaaagggattacctcaaacatttgtctctggatgctcgttgtagtcggacacaaacgcttgccttagttatgcatgattaatagcagttagacgccactttctgtatgagtattggccccccgagtcggtcgtggacaccggaagcgcgtggactacttgcatatttcgcaacaaaggttggtgttttttgcttttgagcccgtcagaaactttgtcgcaccgcttttagtcattgccaacacgcgttagcctactttaagtggcgtcttgctccccacaactgctgcgcaacggacacttgcgtcgtcagcagagctcacgacagatcttcgccgttctcgtctcagtcgtgacctagttcaagtctgctaaaggggtccccacatgttctctgcctggtgtgacgcggtgtgcaaatcgtgtcagcgcattggaaggatgtgtggaaacttatttgcaactggacgacagaaagagacacggcaaaacggccacatggagtcatttcctctctagagtttcttccactgactggcacgtctcgtttgtatttcctagctcctcgcgaatccacatgagcatctacggtcgcgcgcctatggcttaagtcgatgcctgggcggatccacagtgtcgtgagcgtcggatgccacgtacagcgggaacggggtttccacatttctgcgcagtcgcgcggcagttccaaaacggttttggcagaaagcgagggtacacacgaccacagaaagtggcgaaagcgaggagtgcgaaagagagaagagtcactggctcagcagtcacggagaccggaaatgagacagaattccgcgaggtcttccgtcggcggtaccaggttctctaagtcaacatggggtctcgccgccgagttcaaagcagagccacagggtacgcgattcgccgtgtgcttttcttagagcctctccggcagctttccccatattttggcactcgcttaccgctgtctccgcaagatcttcccgctcggtcgcgaattgtgtccattctcctcgcttgagcagggaaaccagaggagcggagctgtgcgcgcccgccccgccgaaaaccgcgcggagaaaaccatgtctgaatcgctctgcaaggaacacgaaaaagccgtacacgacgacgctgtcgcttttgttcgcgcggaagtttgctcgcgtttcctttttctctgctcgtgcttccgaggatagcagtctgcggtgcctgctcttgcttgcctttcgttttccgctcttcgtccatttgtcgcgaaacgcacaggcgccttcagtcgcgcgtgtcgcacggttccctgtcgtccgcctcgctggatgaatgcgtactgttccgtttcaacgcaatccagctacatgtgcgtcgggtgccagcgtcacagttgggcatggagtgagtgttttctcgtcacttttcggacggtctcttcgttctacgggcgggatcgaaacctggatttgtcccgagttttctcgcgcctttccgtcgctcgggactcgcggtcttcgttggtcgacacaccaactgcggcggttcgtcttgccgcgactcctggcggcgacacgaaagtccagacaaggccagacaagcaggagtcgacttgtggacggtttctccctgaaaaaaggggaaccgggcgaaaactctcggcttttctgggggacgaccacgccatcgcgggtcacgcgtggagaggtcacagcttttcctcccccgtggcgactttgtggccacgaagcttgtgagagactcgtctctgttttccgcaaccaccgatccccgacaccgcgattttgtacaggcactcgacctgcacagactgcactctacagggaagtccacaatttaaatttttggctcatctatacgccttttgccgtgctaggtcgcacaccgtctgcctaccgccagtcgtgccgaaagaaatgcacacccttccgcgttcggtcttctccgtggctgactgctcgaatgctcatctcgagaggcacctgaccgccttcattcgttttaaagagggcgcctcagaggacctggcgccggcacacgcggaaggcacagccgaacggagttgctttttcgccatcgtattttgcgcccctctctgcctttccgagcaagtgcagccctcgtgtagcaaatcggcgacgccattgccccttggagcacagaagagaatctggggactggtggtcgcgaaacacataccacgtctccacaagcaggcgtaggcgggtgtgtagatgtgcagatcgaca

SEQ ID NO: 2289 - DNA, 4841 bp, Toxoplasma gondii
  source 1..4841: mol_type = genomic DNA
gccttctcttacactgcttctggctatgtacaggcacatcgagcagagtgcggaacatcgagaggatacggtcccgcatttgttgttagccagtctgtcacatgtcttgaaagtagtggtagacgcgagtcttctctgctgcaatgccttggtttgttgattgaatacctaaacaagaaaattcctaccaaagcgaagaaggtccaatttgcacgttacctttgccagctccaagcactaacagcaagcctactattgattcatataaacttgtataggtacatattaatgcgaatgtgtttgcggatcctgggcaagtgcgtgtgaaactctgaataaaacggcgtaccctggaagcccctgtaggtgatttggttcgtggtacaaagcttctgctttttctcgaacctgaaaagggcaaaccggatcacataacgctacccaaggcgacgatgtgccatttgaaagccgtttgtggcgtggctgccgctggtcttcctcattacctgatctgtgaataatttggtggagggggcacgaattcgtctgttttcagcctgcttctctggaacgaaatagatagcaaaaagcacaaccactgcgtaggattaagcggatgcattctttttcgactccgttttacaagtgagtaactgcttgcattcttacatatatattgtttgcaggcgtttctcaaacagtcgtagagagtacttacaggtaaaaacagtttgtgatacatgttctaactcgaaaggcgaagatgggtggcgcatacctcagctaacttcggcgaactgcttgctcacgtgacccgcctattcagcctcacctgggcattcggcttatagggactcagcggtttcctctgatcaccacaagaagtcggctgtcttggtcgataagcgtcttgatactcgctgcggttttgacaagcggtatagaacagcattaaaaacaaaggcgcttccagtgtgtctcgcttgcggcaagtccctcaacacagctttttctaaatatcaaaagattgcaggagcctagagaatactgtttgtttcgcagacagtaaccacccgcgtacaggtgccagtccagtcatccacattggacaattgatccgtaattccgtttctgtgtacgtggcatcgtcgaagtcttgtttactgcttttagcatgttgcgtagagagtcgtgccgtacttatatgtagggagttgcagttggacgttacgtattaaaggacgataggaattatgccgtcgactggacgtaatgcacgtattttcaccttttcgcaagaagacggactttgggatcgtccagtgcaggtgcgtcgtgaggcactgaaaagttaaaaataagaaatcagggagactgcagaaccaaatcaccgaaagatgaccctagcccatttatcaaaatagtctgacagtccatcgtgtttcgtaagacgaactctttaattcttggaagagagcagttccgtgggaatgtggtattgatgcagttaggtatcgatagcgtaaccagaaaaagtttgaaccaacaaacccgaaaaggctcctcgctgtgtagtgatgtgtaacggttttgcagagcggagtcgcacagaaatctttttccgcgtgtaaactgtggatggtcgttggacaacatcaattttctgggtattggcacacttaaatagttttcgtttcatgagacagaaagggaccccctcgtcacattaacgctagtgtatgtgcgcatccgtacatgccgatctgaattgtatagtaatgtgtcagcgtcctgtttacaactacagccataaacgtttacatgaagtctcttgattcacaaatgtatcaaacgtcatggaacctgaatgaatgcccaacatcggagcagaatgagaaatcacatctcgctattctgctcgtagacttgagatcagtaacttaccggccaagagtatgcctgaccggcagatgatctgtggaagacagaaagcgcagcacgcatcgcggcaacattacttgcggatgtgcaggcgtgtcattgcatgagaaaaacgttctgcgtgtttttctgttaacttcacgcttggtccacatcaagcattccctcttatagtttttcgcgccgtcccgaactttgtgcatctcatgcgggttcagaaagtgcaaccctccccgaccacgcattcctcagctttcttaaaaacagggcgttgtcaaaagactattctgtgggttcaggaccttgcgtgccgagtgaactgtggttgtgctcaggtcaagcggcatgagcgtcctcgtgacaggcgtctccttgtggggctgggcaccctccatcgcacattggaaaactcggttaccacgaagagacggtttcctcgaagcacaacagcccttcagagcactccaaatgtctcagtaagaccgggtgtctctcgcggttttgctattcgccaagaacagacgcaaacggcacggtgttcagtttaaaaagagaagacctggtcatcacagtagagacagtgtccggggcgggccccgcttctccggacgccagtctgagaatagtttggggcttgcctttgtttgtgttgtccgctgacaaggaaatggtccaagagaagacgactttcaatgtacaggcggagaatttgcaggttctccactgggatgaagaacgagagggcgaggcgattgaaatagtgaaccaaacacattgtacgcgaagggatggagctcctggcacatctcgtgatcttcctagagattaaaacactgttaccgatgtgaccaacaaaacaacagaataaacgcgtagctcttcatggctgataaaaatgctgccttacgctattttgtaaagtgacactaatattcagatcttgccgccaaaggataccaagcggtaataaatctaaaaggctaacagccaaacaccatctgtggttcacatatagcaggcagcttggcgacttggttttaagaagacatttgaggagtccacggtggtgtgttccaatttccaagacagaatttaaaactcccacatccggaacgacgtgtaatgataacaaaatgcaactgagctattgtctgtctgcagacatgtcacgacgatgctggagagtgtgcagatgcataagcaagaaacgcatccaaaaactcacgcccaccaatcgtcagtcgatactgtgtgacacggacacggttcacgactttctgtaaagaagaaaaacatcgagacggttacgcttggccgagatactgacactatcttccgtatagttacgcccactgctacagtagggcgaataactgagaacgagaactgtagttccgcgaccatttctcttttacgtattcgagcaaaaaaggagttctcacgagtacctctagttcgaattcgactggcgctgctcgataattatcttatccacacattaaccgcatggctggctttcttcataaataattgtgaatgaccgtggggaaagaaacatgcatgtcgtttccctctccgaagaattcatcaaccacgaacattaaaagtgggaacacaacggagattacttttgtcgtcgtttgcactcacccctaacgcctgcgcccttgactctgagaactgatatcgctatcagctcggtacgttgcgacagaataaacaccagctactgcattgtgtttgtcagttggcagaacggcttaatgagactgcataccgccagagtcgacctcttacgaagagaggaaagggaatagacagtggcatatcgcgttgcgaaactgcagtgtcatctgtagaaaagcagttacatgcgttttccaagaccttcctccacagtacgcacaagctggctgtcttggaggggcctgtctatcgatgtgcttatctcgaataacgggggcaaacgcagttgacgctaactcaacaaaattattagtaactggatggcgtcatcacgcatgtgatgcgttccgtcatcaagcatgcgacagaacattcctttgctcctcaaagtgcagtgacagttcgacccgttggcccaacacacgtacaaaatatttataaccacatactcgatacaactcaatggcttttacagaacacagacagttatcgtcgctacaatgctcactcgacgcacaccgaaaaatcggaaaacgaccatacacagataaatacaccgactctctttagtcgtcgtctttttgctgaaatacagtgagtcactctgacgtagagaaaaaatacgaatcgaatcgaaactaactcaaataattgtgttttgccggtcgactgtgcgggctcggcgcggctgttcaacagctgacgagcaggttactcacgcttttgggttcactgacattaacatcgtaagtttcctgttgctttgtggtaattcctggcactcagtttcgggaataacctttacttcattcaaatgaggagaagttctccgactacggcttgcgggcagtggcacatgtgatgtgaatgcgctagtcctccacagattctttacttcctgtggaatgggctgcggttcccaacagtttctctcgtaccgcccttagtggggggcgaagtaaagacagatgtgctaacatttgcgtgccatatggttcgctaacgacgacacttctccctactttcttgctttcctgggctttccgttctgtctgacgtttccagaaaactccgaattctttagagtgcccaaaaatatgtcaggagcgccgacgatcatgcggcgtcaaccagtctaccaaccactttgagacataatttccactaggaaggaagaattcagtgagggaaaaaataatccagttgtggagaaa

SEQ ID NO: 2290 - DNA, 2818 bp, Toxoplasma gondii
  source 1..2818: mol_type = genomic DNA
ggtgcccttttacataacgacatctgtttctgaaagtaggcacttcttccacaaatgttgtgtctcgagaaggcacgacttcccttcggggttggggtggacttgtggactcgtttttctcgccataagcctcgttgcttttgattagagaatgtgacgcgtgcatgagccttctcttcctcctttgaaaacatgttaggacaaccaggcggggaaacctgccatcgcgagagcaacacctctctggtgcagacaccgaaaacatcagactagtcggcaaaaatctcttctccgcagaggacggcagacacaccgtgctcgtcaataaaatgtccgcagttcgttagcagacctgctgtgtcgacagcgcgacacgccaatcaacttgctcttcttaccttaatgacacgcagatgcttttgcgtgaaagtcacaacgctcggcctattgatttcattgaaacatatatttacgtaccgccctcagcagtcagtgcacagtacccagctgcccacatgcacacacacctatatcccgtgaatctacacttactttcatggatggcgttgtaaacgtgtgttgtctgcgtgactacaaggaatggacaagcgaacatgtaagctcgctttcactcggtacattttgcaactgttgaaggccacaaggctcttcctggctgtgttcagtattgcgcgggcatgcaagtctccatgtgataggacctggaaaactagtagccgctacctgacgaacgaagagaagtggagcagtttggttggaggcagcagtattttccgctgtattctggtctcgtttctctccttgcaccaggaaacatcagaagggaacagccaaagacagtctcagccgctgtcttcgcagactttgctgacggaacccgaacggcgggaactcgtgggcagcttttccgaaaggtaggtagtcacagaacaagtggaacgggagaaatcacatgcgaaaacgcgtgtgacttgattctataggagcggccgaagagtggaaagtatgcaaaagtgaaggcaagagaaatgatcaatgcacagggtgtcagaggacagaacagcaccgaatggtagcaaatacagtaagcgacacagctctgagccacctacaagctgcaaaacacactgaatcgaccaactcagtcctccatctttcggatcaacacgaacgagtgccactttggcacgcgttgagtagaccaaagaggaatgcgaaggcaaacactctcgatacaggaatgctttattgaggatacctaggaaccaaggcacacgaaaaggcgtctagcatcaaatataaaaatttcctcttcagactgagtgtcgataggaaacagttcgtttaagctgacttatcgaaacccccattcttccttgagtggcgtggactgagctgagcgcttattttaccacagtttcgcagtcactattcctggtacatcccctccaaacagagacagagaggaatgtcgatactttttaaatgcgttgctgaatccggcagatccagaactgcgcttggagcatatattcttataaatccggtcttcgttcgtactttttctggcgccaagtctttcttctgacactagaggccaggcgtgagcaactacgtgcagtttgcttgtcaaactcaagagacacacagtgtaaaatcgaccttccgtcgagactgggtcccatttcatggtcttccaggcaagacaagactagttgcttccgcaaatttctcttccaagtgaagcccgtggtagtttttcgcttttcgccgcgggtactcgtctgctcgacagaccaccaagccgaaggcaagtctacgtagaagacaggagcccggaaagcgagcgccgaaaaatactgtcggaaggacttcggcgctctaaggcactgacgcgaccggaacaccgaacaggggtccagaagaaccgacaggaagagactcttcccacatgatcgtgagtttcttgcactggcgcgccgagcaagacgggagacgtcgagagcgagcaaaagtgcgaagacactacgtcgacctcaacagaggaagggagaaagaggagggacaggcggggagatttttatcatctgagtcatttctgcctcggcttctcttcaggcacagtttgaattcagtccatgatctcggaaccgtactcagatgcaaatttccatcggtgctgctgcatgtagagatgaatgcattcttgaacacgcggctgcttgacccgtagacacgtcaccgacgcagattttatacccacctgcagagaaagaataaaaaccaacttgcgaagagcagctcaaacagtggaagaagcgtgaaagagaggcggcaaagctgtcggagcgaccttggttttttctcgtcgttctgcctcacacacccttgtctccccgtcctcatcagtagaggacccgctggtaaagaggttctcgttgtttttttccccagtatttcatctctcggccaccttttatttcgctttcgctctgtcgtttcttcctccatgctgggtttgaaaagagcctagaagccccgatttcagttgtcgctcgttgcacgcgatcgcgttccttatccaatcatcatcgttatcctcttctgcttttctgcctctctctttttcctttttctattttttgttcactttcttctccccgcccgccttcttctcctccgtccccttcccttcttattcttcgtcttcttgtcttccccggtcgctcctggccgcttggtttcgccttctttctggagccctcggagttctaagaaagaaaggagaagtgcggta

SEQ ID NO: 2291 - DNA, 1474 bp, Toxoplasma gondii
  source 1..1474: mol_type = genomic DNA
acactcatttcaagtgacatcaccggccaagttgccgttttcacttgtccctcaggaaggaaagaagttctttttcagcagcaagcacttttctgttttctcatcgtgctgtacactgtgcctggggagacctgagagcgtggaccagcgtgaagccctttcctttttatttcgtgaagaaagtcgtttttcactgtgttttgtgagaacgcaagcggctgaggtcgcagcggggattcaagaggataagggaagtgtctgttctcgcacttttgacgccaaggtctgcggggccaaagacacgagaaatacagagacaaagtcacgcgtttctgctcgtttaagggacagtcgaactcgcattcgcacacgagtcgggaaacgagaatcgaaaaactcggaaggaagttcctccccgtaagccgggaagaaaggctcgaacgacacactgtacgcactcctgcagtctgagcttttaatcaccctttttccaccggaaaaatcagagcaggtgtcacgcgttgcatcatctgaaaatattgacaggctttttctccttcggctaaagagacttttgaaagggtgaagggaagaaaggcacgaatcagacacaggaggcatcgtgttcgggtattcatcacgtgaatgaacagaatgccgagatactccattgactgttatgacgtattcttttttatatctgcatatgtacacagaagagtagccctctgtatatatctatacataacgcgcatttctcctcctctacaagtggaggcgaggctcatgcatacgcatggtctgttaaatgaggctgcatacagtgtattaggcgtccgtttaaacacatcgagctgcagagaaatagatattttgcgtgcatatcaacgtgtatagcaagaagtttattggtatgaggaaggttctctcatcgcagaaactcttcaacgatgatcggggcttagacacagattgactccctgtcgcatacaaaggagcggcggccaagcaacatcgagcacactgcatgagagaaaagatttatttttcgagaacaaatttgcagcctcctttgtggttcatttttcttcgtttctcgcaggaaggcgcatttcactctgcacaccgacactccatctgcagtgacacccgcgcgagactgggctctgcccatcgaagccgtcttcaaatagttcccggtggaatttagacccgtcacagttcgtggcatatttttgcaaagaactgacaaagtatttctgatctttttcctcccatttcgccggtgagtgcccgggagacagacggttagttcactcgcgcggttggccaagtgtacagacacctcacagcccgccttctctcctgagctggagggctgtctggccccattacattccttgttctttctcgaaaccacctaatcgcgcaagaatatttctccgttcagattcactgtcttcatcgtgtgtga

SEQ ID NO: 2292 - DNA, 3509 bp, Toxoplasma gondii
  misc_difference 2141..2240: note = n is a, c, g, or t
  source 1..3509: mol_type = genomic DNA
gatctcagcaaggagataaggatgcttgaggaaacggaacagagactagccgctcaactgcagcatgctcgacagtcgagtgatttggccgcagagacgcaaacgcaagcgtccgccgtttccagctccacggaaccagcagaggcgtcggatgtgtctgggcgaagctctccgcgaggcactacccaggtgcctagagatctggtggaacgacaatctgagcctgccttggaaaagcccttggacgaggctgttgcgtcaccgttcgttgctcagactccttcccgatcaccaacgccagtgacgaccacagaaggggcttcgcgagagtcagctgccttggcctccaccacgcattctatggccagcggggatctcacaacatcatcggactggttgacgcacgctgagagaacatcggagtctgcttcaccgctgattttgcatcaccagacggcccctctgtttgccgcaggtgccccacaggcggtcgtgtatgggggcccctgcaccagcggcgatagcggtggacccccatattctctatcccaaatcttcgaacacgccggcgctgcgcatactactggggacccgcgcacagagagtaatattcctgaggacatcctggagttcgttctgtcccattccgcaccagcagcgactgcatatggggactgcgctgcgctcctcgcagaatcgacaccctcgatcattcagccatggagtccagaatattcgccaccaccgatcgtctccgcgagcgagcacgcggcaacgagttcgtcgtggccccacccgactacgagtgcctcggacgaaggcgcaacaccctgcgcagtcccagctagtagcagcgcgttttcggggccatggtggagctcgcctcaaccacagcgctcctggcgtaggcatcccacacacctgcatacacatccgaacagtgacatccccgcatcacgagagtatccggacgaaatgagataccagagtcaaggggggagctacgttgccacatggatcgaacaatatggtccacatctaatcgactagtgaataatcatagcacatcagtcatttctccgggtgccggggggtggggcgcttgaggacgagtgtgtagcagacatggagtcgtgttgcggcgatgagcggcacggaacctagtccgagaaggacgtcggccactgtttcggagtgccgccacttgtgggtgtgtagagatgggagctggcggcatgtctatttcttatacggtacagtaggccggtttgggcttgcagcacaccctcaatattttatggtctgacaaaaccacgtattggcctctatacagcggactcggtaagtgcgaacacattcgcagcattgtatttgctgcactagccgtgaagcgaacctgatacggggaatagaatttattgacaagagctcccgtgaatcccagagcggcccgagcagtgatgatacaggaaggaagcagaacccacgtaccatttgttgtcgcggaaaggttgccgctgtgtcatcattttcaacagattttcccggtgcccttggacattatgcacctgtttttggcgagccgctaccgcctgaacctcgacagccactgcttcagtcccctgcccgggcgcctcccgccgacgtcatcccgccacatgcagcccagccgtccacggcgttcgtggatgtcccttcgatgtttcaacaaagccaattgcggtcgcctcaactcctgtcgatgcgcgtccggcccccggattcgacctctaccacaccgccctccctcacgtcacccagccgaagaattacgggtgagcaagtgaagcagtgctgccaactcgcgagggtgtggaatgtgacacctctgttcacctatttctacacaacatctgttttagaaaagcgacgcgaaccctactgcgcccccatccagcagtgtgtgccggtgtttcggatacgaatgtgtacacgagaagctttagtgcagtctcatgacacgcgtcatgacagacggcatgacatgcggcttgacatgcagacgtttgcgtctggctgctttgtgaactcgcctccgagaacgcctcataatggaggacattctgggagctgtactgtgacagtaaccggcgcttcatccnnnnnnnnnnnnnnnnnnnnnnnnnnnnnnnnnnnnnnnnnnnnnnnnnnnnnnnnnnnnnnnnnnnnnnnnnnnnnnnnnnnnnnnnnnnnnnnnnnnnagagtgttttattcgtcagccgctgtaacatgatagtgactgcatggtcgcacccgctcttgaaccttggcagagcgctagcgccaacagcgggcaccagtggtcttgactactatgatcattcccaagggcgatgttcttccagttctctgtcgtccgaacactacgccgatattaaataatggacccgaaggagaggttcgagaacagcatcgagggccgccgagactgtcgattgtggaagaacgggcaggggacgcagcgacactggtccactctttgcgtaacaccaatcgcttttcgtttgacttaccttctccgcagtgtcgcccagataagcagttccgactgcatcgcgactctggccgcggcagttaccagattgtgcttcactgccgcagtgccggccgagatctgagttgagggaacaagtagccatgtgatacgcacctgcgttttccgggacgtaggcgcctttcggcgggagaggaactgtcaaccgatataatatgtggcctctcgctactcctcctagccgtccgggttcagcagcgctgcagcgccgggggcaccgccaccgatgcaacaaccgtattcggtcttcgagaacgagaggtgtttgtcgcgtgtgctcgtcgagtgggacagtacacagcgcccaatttccacgtttttggaacagtgtctctagagctgaccagtggatgccggtgcgttggcgggttttcagaaatacaacggcgtcgctttagtggggcagatcgtacaggacccaagacgaacactgctcaggaaaattaagaagcatttttcgtgcgttgttgagcggttgtattcggtgtctcgcgtgagcacccatgtggggtcgctgctctcagttcatgctttccgcttagttgtggcatattaaatcatggcaaggaagaccctcatgtatatgcggtccggccaatggtttataggggatcggccttgaaaaggcctagcgttgtcgtcagcgacgcgaaagtgccgcaggcggcactggcgcttttgggcggcatggtacacctggggtaatccgcccgacgttcttcgcaagcacacagggatgcacctagcttgcttatttattttgcagttcctgtagaaaactgaagggagcgtcacaaggaacgggaacattctagtgaagaagagaggccccggactgtcgccccggcgtaacgaatacacacacaccttttcacaagggggcaaccgtggtgtgtttcgtccatggcacaagga

SEQ ID NO: 2293 - DNA, 1257 bp, Toxoplasma gondii
  source 1..1257: mol_type = genomic DNA
gggacgagcttttcttcaaacacaactacatctcatgagccactgatacacatgaagatgtgccttgacatctacatgcaaatgtatatgcacacagatatataagcatatatttaaatgaatgacataactatatgcatagtatatatgccattatacgtatacatatatatatgtatatatatgtttgaatatgtgtgaccgtctgtggtcgtgtgaaggttccattgtctttttctggtgtggaacaacaggctgagagtttgctttgtttgctgtgacgagaggaggagaagaacgagaagggcaccttcgcgtattacctcttcctcgccctccggttgcttcgcctctgcctcgacctgaggttcggaggcggccgcctcctcgcgtttttcgacttcggccatggtggtgacttgaaaactagggaagaagaaaggcgacagcagcacagcaaaaagagaagaaaaagaaggtcttagagacccaagacaacgaggacggccacagattcagagaagtcctcgaatttgcgcagacgcaccggggagacagaccttccacagggaagaggaacacaggagaaaaaaagaaagaccgaaacggagaaggggaaataaaagaaaaggcgaaagagacccagaagacgtcagagttcacctcgcgcgaagaagcctttcttgtggggtggcatttccacgcgacagaccagaggcggtttctggctttttgacatgctgcatgcgcaaaggtcgcaaggacaaagtcaccggggtcggcttatattcgaaggcaccttcacttgggtcacgcatgctcaccgatagagaaagcttcagtgcagcctgaaagtcgtcgagttccgcaagtgtctttttaagccgtagcgaaatatgaatcacaaaatgccgttcgattctcttctcctccgtgtctgcagtcaactgtctgcttcctgttttcgatttcctttcggcgctcctcagtctcgtgcatctcttacacgcgcatgcgcatctgcgcgaacttcgcgatccaacgcaacagaaaaggcttcttcttcctcgcggccgctgcgacgggtctctgcacctcgagtttctgtttctgcgttttcttttcgatttccatgcccgcaattcttcttgccgagaaggcaaacatactctgcctctctcttccgcgtctcctccggcgacgagtgccggaacttctgttccgcttgaagactctctgtaccttccaaaagcacga

SEQ ID NO: 2294 - DNA, 627 bp, Toxoplasma gondii
  source 1..627: mol_type = genomic DNA
acggcggactggtcatcaacctctcgaaggtgtttgtgtttgacagcctcaaagtctgtcgcaaagcctggggctcctgttgtttcctctccgcccgtggatttgctctcggcggtcgcgcgggcgcctcctgcgtctttcacgccgttctcttcccctgcatctctcgcgtctggagtcgcacaccctcggccgccagctcgactcatttgctggcgcataaacgcctggagcgcgttctggtcaatctgatcatccattgccgcggcagctgcagcgaggccggcggccatggccaccgccacaccttctttctgagccatggtggtgtaaacgaggaagcaaatgcaaggtccaggaaacctagatcatggaaagttaggtcgtgaaaagctagctcgtggaaagctggccgcaagcaaggaagccagactcgcaggtgaacacgaagtcgtagagtgtgagaagcactcacggaccagacggaacgcagcagacaagcaaatgggttgccggaaagaggggggaggagaagcggggtgaaagaaagagtgggaacgggagaaaggcagggaaaggccggagaaagcacgcgtgtcaggagaaacctcaagagcacaggtgcaa

SEQ ID NO: 2295 - DNA, 2326 bp, Toxoplasma gondii
  source 1..2326: mol_type = genomic DNA
tcgaccgctttgctgcaaacgcagcagagtcgcctcaacttttctgcggcgcatgtcgagccagagaaggccgcgctcctgcacagatctttgctggcggagaacgaggcgcaggagctgctgcctctgcgctcgcagcttcgccttctgtcgctcgaggaaggccctgcggtcggtctcggagaacagccgagtttcccactcggaccgcagccggttcttgcctgccgccaagagggaagccgctcggcgcgaggagcctttcgcctgcctccagtgcatcttcccctcttcgagcgtcttgcggaatacggactgcgcgcttgcgccccgccacgagagaggcacaggatactgcatgcgacagcgccgaaaaaacgcgacgggatctcgagaaaaccgcgcaaatgtgtctacagacaaacgctggaaattgcgcaggtgaggcgaaggcgaagaagaggaagaagaggaagaggaggaagaggaggggaagggagaagaagaggaagaagaggggaagggagaagaagaggaagaagaggggaagggagatgaagaggaagaagaggggaagggagaagaagagggcgcagaggggggacgagaagagttggagaaagaccgatgaggagacaccggagaagaaagaggcaggaaactgtgaggacagagtggctccgcgctcccggctgtctcgacttgcggactgaagcctgaccgcagaagaagaggcgacagcaaccgagagtaacaggaaaagaggcggctttcgctgtgtcgagggaggagagactccacccacggagacgagacggagacagttcgaggaacgagagcagaggcgacagaagaggaaatccagtgcagcggaatcgcggcagacagaggtgccgacgggggaactcgaacaggaaaagcagatgcaggaaacgaagacgagaagggaggatcgaggggagacgagacagacgagggagatccccgcctcggggacgggggcgaagagaggcgcctccgttcacaagatgctgggacggtggacttcgaaaaacgcgcgcaaagtgaagagactgcatgcaggcgacaaagctgtgtttgtctttccgagaggccagaaaggaggctcggcctcggcggcgtcacgcgccgggcgaagtgccagctagcagctgccgccatctcgaacaaagaaaaaggcgacagaaaaggaggatgacggagagcagaaggaagcgcaaaggcagcagggaaaagcgagaggcagagaggaagaccaggaaacagagagacacagaaggctctacgaaaagatcgttgcgccgaatcgatgcggtgtatgtacgcagacttgttttttcgagaggagggaagaaaaaaggaacgcagaaaataagaaaaaagagagaacgagctgtgttccctccggaaaaaggctgtttgtagaaggcagcgctgcatattaagacaagagcttgtctctctctctccctcgtctcggacagacaaaagagcgaacagttctctgacgggagaggagccgcgctcgagaaagagagcagaaggtgcctcggtttttagttctctccttcctcattcaaagtcccttcacagcaagcagcctcagaacagaagaaacgcgactagacggtgtctctcgacgcaaccagcctttgcatgtgcgctttcgggcatgcatgttcaagtgtcaacaggacgctggaaatggtagctctctgggaagcggggacttgagaattaccccgcatgccttccaggttttcttcatctctcacggaaagagagacatttcgacaattcccttgactgccggtgctcaactcctcttgaaaagaagcgaaactcaaccgtgtgtgctgctggagtccggctccgggcaatacctctgtacttccttgtgttcattttcgcttcattccttccgtctcccattcaaggtgttcttttcttcttgtccagtgaacggtcgctcgtttccttgaagacaacgacctctttttctctgctctgccgtcaaattcacccactggccgtcactccccgtcagcagtagcagcagctccgcctgcggtctccacagagagtctcgacgcgtttcccctctgattcatcccctgctttcctccgagcttctttctcttcctccagttctctccacttgtctttgttttcctcgcttcgtctctcctcgtctccctgtctctcctctcggcttcctctctctcctcttcctcttctgctctgtcccccttctctttttttcactccatttgcctctcttttttcctctccttgcgctaaacga

SEQ ID NO: 2296 - DNA, 3105 bp, Toxoplasma gondii
  source 1..3105: mol_type = genomic DNA
aggatattttgatttctcccgcctgttaacggcttccaggtattcctggtcgtccactgagctctttgtgtctgcatgcacgcctgcactgtgttcacagactcacctgtcgtagtcgactgggagccagcctcttttcgcaagttccatggtgtacccgtgagccgtttccgggtccagtgggccgctgctgaagtaacgaaataagacggatgttaccggctcgtagaaggagtagatcatactgctcacgtcttgcagagcgctgtagcagtacactccggtgccgagaagaaggacgaggaagaccaggcgccgctgaagacaaagacaacatacgacctctgtatccgacgacatcaaggtggtaccacgccggctatgttctaggcgccatacgtatattactctagggactcgagacagctgaacgtggggaatttcaatatcgtatgacgttacggtcaatacacatcggctctgttctaaagtaaaagtgttggacttaaacttccactcgcactggagacaacgtctgagggtctggtagcgcggcgccacccaaggaagagcccgtggcttgatgtggatcctcacacacgcaggacatgacctttgaaaagacgacggtagaaaaccttgcttcaaaatctttgtgtggctgatgggagaacgcgaggagttctctgcgaaactagcggagatgttgcagattcgaaacgatttccagaagaaacggccagaggggcgcctgaacctgcagttccacgactgtctctagagacggcaactgtgacgcgtacgtagaaatgttctggtcgtatctaaatcaacaagacgcgactcagctgtgtctgtttccccgttggtcctgacggagtaacatgtttcaaattcgaaaacgagggcatcatatccgatactcagtgcaggtgggtggcctcagctaccgtccacgtctaacggccgtccaactgaatacatgtgcagtctctttgattttatagaatcaagtcgcagcggggtttccttaatatcgagtctcacagtgtgcgtgccagagacagaaaaacgaaatatccgccacgagagcggttctgctggtgaagtgaaatgtcctaacttcgacgcaattccgcctcgacgctttcgcgtttctttctgattcttcttcataagtgtccagattcccgaggcagctcccttacattcgcttttctctctcgagttgttcgttcccgaacgattctctcgatttcttctggatctacgtccttcggcgggagacccgcgctgggtctgctgctctccgcgctgcctggcctcgggtgtagagacacgctgagctttcggatttgcgtgcgcagcaaagcaccgggaaacgccgatttccagtgcacatcgttccccagagcggttagaaaggttccgaaattccggctggtgcctctagaaagagtgactctcgcctcgggactttcttgcattccgcccgccggacaaaacgaatggcatttcggcaggacacatctcgcatgcgacaggttgtcggcggaaacgggtcgagttccacttcgtcgcacgcgggtttccctgcagagcggcttgcctgaagagattggcagccgcagcaaggcgaaacgcccttggaaatgcatggtaagaggtgccatatttctcgcgggctgtgtttttgtgaaagcagctcttaatttcggtgaagacggagtgttgacggacagacacgcagacagctggcaagcaaaggtcttgtgtggcacttatcgtgtattattgcgggaccgacagctggtcaagagtgaagacatccatgaatgctttcagaagcacagcagaaactcaaaaaaataaaaaggagcagcgtggggattccggagcaccggcttctgtcgccgcccgacgcgaacgctgagtagcctgcaacaggaagatccgacgtggcgtctgcaatcaaaacctagcacgaaaagactatggcacgggagatacgaggcaaacggttcacatgtagccaccaagcaagggggaaatgccaaacatgggaatcgaagttcgttatcgctgtctccgcgtgtttgctagaacagattgagtagcgagcggcggtaggctgtggcccttaaatatccgccgacaatgggcattttataagaaaaagattgcgagaagtttgtgataaatgtatgtgagaattatgtgggtgtgtcagccaatctatccacagaacggtttctcttcatctcctggttccatcgatatctcgggggggcagcaacgatgagtcgcttttctgcgcgcaaatcgcagcagttcgctgcgttgacatcttttctccgagtagagactttgcaagtccagtgtctggcatcaggttattggtgtttccagcattgcttttgtctgatccgcatttctgaaccgatattccaatataagtggagatccgcattgtctttttggggggtacgcgaggtatcagtcgagcagggaagtcaaccgtccctatgctggagactggaagaagagacaggctcgttcatgcatcgattgcctgcatgtgaattcagccccgaacgaaaattcttttttcttttaaagagacggtgggctgaattggaatcgcgagatttttcgtcttatcatgtccgagacaccggccgcaccctccgtgtctccgtctgtggttgtgactgttcgtaacttcgttaagcagttttgtttcctccactgggatcgttttcatgtatcttttatcaaagagtaaaatacgcttctcgagtgttttctttgacgtggaggtgactcttggtgggtccgcgcatacttctcacaaccaccaccgaggcctggccaagatcgcaagcgccggaaccggaaacctctgtcgcgatacaatttaaacgtatgtgtatgtatctgtatatatatatatataatatgcatatgtcatgatccgtctacatgtgcgtatgtgtatgcgtgaaacgtagctgcgaggatatcgttcaagacactgtcactcctggtggttaccgaattacgctgcggtggagcatcgacgaaatccgacccgagtctgcgcta

SEQ ID NO: 2297 - DNA, 3657 bp, Toxoplasma gondii
  source 1..3657: mol_type = genomic DNA
ctatacatatgcaggtatatacatgtatgtgcgtatatttgtacatcctttcaggatacacgcacttgccccagtctagcgtcttcacctctggtctaacttgccctttctttcgaatgactaggcctttctctctctacttcatctacgctacacacatgcacacgcagacatttttttatttacgcgtatttgtatttcttttgtttttctggtgcaaatattttttgtgcgaacgaagcgagcggtaaacaacggtgtgagtgtccgaccttcgtgcgtaattctgaaaactgaatttttttattgctggaaagcgcctcaataagcgaatacgtcgagcgcgagcgatctgagagcgcgccgaaagcattgttggatacttgaaatattttttgcgctgcacaacgacgcagaaacagattgactttgcccctgatttgaatcaagaagcggcacgccacacaccgcagcatttcagtcatgttattgtcggtgctaccttgggcttcttttttactcagggtgtgcatagctctccagttatatacgtaccagtagagacaatatacacttataatgtgataataaccatacatggtctcacgaagatctttaggggttttaaggagtttccgagggaaggagaacggtctctccgttcaggcgaggtgcctgcgaaaatgtctgcgcggggctggagcgaaaccgtgactttgtaaaagttttgccaggcacctctccagaagtcgcgttgtttgccgtaggacttttcgccttttctgcggtgtctatcttgctgtcatacctctcttctgggacttcgtttttttcctttctctcccttccttctctcgctcctctctcttctttctctgtcttccctcgcgttttcttctctctgtttcctctctgcccttgttgtctcatatttgtcgtttttgtctctcttctctctcgctttcctcctggattcacaacgaactgtgccaagtgctcggttgctttccctccggtcttctgggtgtcgttcgttctctcagctgcctcggccttgaatagccagtgtgtttcacgcggcaaaagcatgaggcactctttgttcacgtaaatgaaattgtgaagtatgaagggccacgcgagaacctagactcgcctagacggcgagctcccccgcttcattctctgcgttcgtttgattttcttgtctcctcgcttgctgagatggcttgaagaagtctcttctcctttttctagcatttgcatgcgttcgcggcgagtgagacaatgacgaagaaaaacgtttttcggcgggcgctctgcttcccgccgtatcggccgaaaacaaaggcgctctgagaaacatcccaactgtctctccagtcttcaccgccttctccagagggacaagggccatttctgttttgatgagacgagactcgcgtcttgttcttcccctcgctctttcttctgaaaccgcttctcagtcctgagatccagggctttccacgacgaagcgaatggcctcctgtggggcgttgccgtgcccgcaagtgtctccgatgcctcgctcgcgaacgaatgttttgtctgtcttcttcgcgcctcgcgtttgcatgcgtctttccaccgtctctctgcctgtgcatcccctaaactgacaggggaaaaaaacgagaaagggagaagagaaacctatggaagttgtccctggtctgtcgtccaccagggaacgtcgaaagagaagcgagaggcgagacactcggcaccctacacccgcgacggggctccgaggcttcaagaggccttgattgctgcgagcaaggctccctagccggagacgcgctcccggcaggaacgggcccccagcggaagaaacattcgagggatcatcactgcactaggcgggaaaactttgaacgaaatcgttactctcgaacgacacgcggttcgaggcgtccacgccgatacgaccgagtgatttctggtagtcgaaagaagcaaacactcctcacggaaccccgttcgcgagcacctgatctcggtgtccgttgcctgttgggcacagtgaaattgccagttccccgaacaggccacatacctaaacggcggtgttcgttaacccatgactgcaccttttctgcccaacaagctgcaaggcactgccctgaaagctgtaaacgtacacacaccagccgcaaccagggcagcaggaaagcagcagatggcgtgccaggtcgcaagcgtatatttgaagatttcgaacacggatcatgtatatcgtgatactaactttggcagtatccttcctgctaacctcctcggtaaactgtgagttattgaaccatcctgggatcatagaagtaacggggacttatcaacgtaacgaactgtctgcgctgccacctttgcggtcgagttcccggagcgatgaattcagtcttccaatgtggctcttgaagcaccgtcggagagtttcacaaaacaccgtgcagtgagaaaagtaaaagtaattccacccatcatctgtgacttgttgggattcatgttatccacagtgagcgtggtgagcggtcacaacagaatatcaagcctaatcctaattaactgagttaaaaagtacaggttcggaacaagcattcttccgggagcaacctagtcaagaacttaagtgtcttgtcacgcgacctgtagaaaacaaaccgcgtcggagcacatctggaaaagcggtcttttatcacacatccagacccttcaaccgtaaatcaaggactcaacgtagcgagcatacgtcagtaaagtagtggctgttgagtctcccatgaaacaggagtccagcgtgtgaaccaacgctactagtgtctaaatggtcagatgccggtgcatccctgcagaaaggagaaaaagcgtctggagtcccatcctttccaggattcatttattcccttgtgtctccattttcttctctccttccttcgtctctcctttctgttttatttagactttcaaaatctgcgataccagtttctgtctgatttgggcaagtagactctgtctcggattctttgttccgggcgtcgacagcgatacaaactcagcggtggtagacgtataaggatccaaaacagtagagatcttgccgcgaaatgatcacgaaggaacgtcatctgctttatacctgaagtaaacgtcataacatgcatctactagtccttcggccttcccccctcttctgcacgccattgctaaattcctcctggatcaagtgtaggtgtaggtgaacaaattgcctgcagcgcgcctcacgtggtgcacagaagaccttttttcgagcatgtgtttgtttctttgctatctcggacctagagtaggtcgagaggcagtacgcgcaaaaccgttccagtttcttggcgagacggtcgggccactttgcatgcacaattcgaaaaaattccgcagcgcctcgcacagccccacacaactctgcagggagagctacgaccatgcgatatgccacactgcgtactacgcctgagcgccatcgcattgcaggtggggttcctacgtcgtctttttctctgttgcctggcgttcggtaacttttctgttgtgtacttttctcgattgtggtcgattgcaaacaaaccctcggcaaaa

SEQ ID NO: 2298 - DNA, 4824 bp, Toxoplasma gondii
  source 1..4824: mol_type = genomic DNA
aagaggttgtgcggcgaaaaacaaaccaaaaggctattgtcttccgaacagcacactcgtgttttgtagtagaaatcaccgtttttatcgtttcgtggttgggtgcggttaagagatagagaaggcgcacaggactaaagaaacgacatattcgatacataaacagtttcctagacgatacagatgtgaatgatggtggcagtcagagggcggggagaggctatggaatttcggtgtaaaggaacattgatgagcaggcgggtctgatagtgcaagtagaaagaaggcagagtggcgtttggtggcgatggcactgaaaattttccgttacgcgaagcagagcactgaacgctaccaagtcatgcgtaatccgaggcaacctcagaagagccggacaagtaacaaagtgctgaagataattgtgagacggaccaagaacgcggtgtatgtttcttcttgtcttggacggtgtgaacggtgtcccgtgccgtttcattcctttcgacttttctcttcttgaaagtaactgtctacgtccgtggttcacggtcagaatcacagcatgagtgtgtacatgacacccgttgctaggacgaccagcggcttcgttcgcgtcgaggaatctcgacagagttgttccattgtgtgtgttttttttttcttcctacctgaatgacgaacttgtcagcctttgtgttcttctggaaacgtggggttcgggattttcttagtgtgatctttccatctgctgttcctcagagacttctctgcctcgtgtatcaccatgactggtcctttctccattgttgaatactatgtcgttcatctcaaagctttttcttttatttcggttatggccgtcgcgcgaatgtaatccagtctgtgaaggtaggtcatagaagactgaaaggcttaaagaaacactcacaccgttttgtctagcttcgaagtctcatgggttcgtagtgtgtacaaattcggacagccgatataaagtactggactgacgctcttgcttctgtcagacagacaatgaacatgctattgtatcccccttctcgggaaaaacaccgctacggcaccagaatcaaatgtggcgggtccacagtttgagatttttatgttgtcgtcaatcgtttatacgaatggttttgttgacaaaattcatgttatatcgtttgcggcaaaaccaggtcggcccttcgaaactcaaatcacaaatagaactcggaactgcgtttttttcgacgataccggcgtataagagcgctgttggaacagagccgcttcgtggtgttcttttttcaacgttaagtgtcacggaagatcggcagagccgcatctaagaattcgaagaaaagcacttctgttctgctggtgggaaaaaatgcttcagtgatcgggctcggagaaacgcaagccttcgggccgtcatgaaagtaatggctcggacaggtcggtgtgtctgccagaaatcttgaactcggggaagctctgtattttaaaagatgtcggcccacaacttcaaataagcgacgtagtaacccacgtctttcgaacgggagctgtcccggcaaagtcacaaggatggctacagcgggatttcacctgccttatcttcggcatattgttgttgacggaagccgcggtgacataatttaataatgaagccgcctatgctaaccagttctgctaatgcagcagcaccagtgaggcgcaataaaccaaacaaacgatatcgactacgcgcaccagagacacctttcttgtgcgagtgcctgttaacgcgagcctaaagtgccatactgtgcagtgtttgacgactggttccaacaaattagcaatttgcagtagtagctgtggcagcctgcattctagaaatagacagttggaacacctcaactggctatgctgtcatcggaacagaacgtgtgcagcagtaacaagaaccggcaatacactgattgccgctatgcgacagcaactgaatccgagccgtcaaatgcctcattgattcacgcagatgcttgcactgtcgaagtagtcgttagttcagcaatatagttgtctcagcccacaactacgacgtgtcttgactagagtaaaacaatagtcagtctctgtgagtgagggttagggcattacagggttgtgtgtggaagtctgacacagcactcactgtccccttcctgactctgaaagctcgtggtactgctgacttgaatgtaaggacacggcgcgaaggggaatgttcttcagcttgctgattcctgccacacaaaggagcagtccccttgtaaggttctgcagatacctggaacctgtccaacatttgagggacgtaggtgagtcattttccaccgtttgaaaaaaagagtgaatctgagactcgtatcaaccaccaacatgcgtagccttgttgtcaccgtcaggcagtaggaatggcgttgtgtgcagagaacagtacaaaagggatatgggatgttattattactgccgcttgccaaactcaggaagcgggttccaacagcttaagcctatcgtcacgagtctcgatccttttgtgccttgtgggacaagggagttcgcgaatgctcgtcgttaaaatgccattgggccgagtatgagtgatggcagcacagggatccctgacagattttgtagtctcgagcattacctctgagctccaaaagacatgaagtgttcccgcaagaggatctggcagagcaacgcaaacctcgcttaacgagtgattcagctttcccgacgtgggcccggcggggggcagcgaaatgagatttggatgtgcgtggtaggaacacagagagatgcgacacgtgagtacgataatctccttgtaccgacaacaggtgcatgcatttctgactgggcgtcacacacgaaggggcgatttctctaggtgtttcgcatttaacaagcattcccacatctacggctcacgcttttgtcctcccggcagagcaccatgcccagtgtgttagatctgcagcgccttcgacaatacacgtgcagaaaaacgttacaagcgtcgcacgttacgagcgacgtccgcttcatctaaggtgtcgtaggaacaggaccaactcggactttttatccgtggacgtaacatgacgtgccgtccagatgagttcagagatcggtgacaggtttcccatccacggctgcatatgaacatggatatgcttttaaaaggctggaattgtcgaattcttatcggttcctgtgtgtttcgagcaaagcgagcgacactatcgcattctcgctgtgctgtggccacggcatccccgggagcagtttttccgcactaattttctgcctggaaccgtcggttctgacaggaaagcgcgagaccctaacacatcgtccatacttgctttgatgtgttgagcaagctgtgaaatcgagtacttaatagaaaaccgcgcagatcgcgaaaatcggcctcgccgacccgctgttgaaggcagacgcgccagttttcacactctgcaactgacaacagcgaagtacgctttgcgcactacttcctctcacacggttctgggcgtcgcgttgtccgctcttgctcgtaagtggctgtcgccgtccgtggggtgcaggaacagcctgtcccttaaggctttgggatttgcaagtctacgcgatttggtgtctacgttagatgaagatatctgtattagcatgcttcggcggggagagtatctttcagcccgcctatggcgctgtctccgcgtaattatgagagaggaactagaacgctgtcctcatcgtcgccagacatcctgtatgtgcccctctgccggttgccgggcgacagagtccttctctacgttgcaagttgtgctgagggagaactgaaattgtaatggattgctcagtgccttgcaaaatcgggcgcttgtgttgttcccggtctttttgtgtgttattttcccgtgttttcaccgtggtcgctcctgaagtcgcaccatgaaacaggagaacctttgtgccgccccgattcgtgaacaggtccgagtggagccagttccgtggcacgctgcggctgggtgtttcctttacttttattcttcagttgaactggggaaaaacatgcaaatctccctttgttgacgagttataggaaccactcgttctcctgagggatcatctgctcaggcgagcgtgatccgtatgcgttgtccgcgccctgacttcgcggcttttatcgtccctctatatcgcgtctggatcctcaaagaacgttcttttgtagaattgttttctccatagaaccagtggacccaccacccgggacactcctccacaagtttgggtcttttcctgagtagacggcatcttcagaagagggaactggtcgctgtgcggaccggcggtaggccggtagggcagcgttcgcggaaggacgactttcctccgcccatttccgacgctctttgagggtcatctaaagaccctgggttgtgaggcacgggacgagcacgtggagaaggactgacaagaagaatataagggtggctccggtcgtgtattcttgcactctggttgggcgtagccgttgctgaagttcggttgacgtgccggggcgagcctcgctcgggcgcagtcacttttctccattagacgttttgacgaggaatataaagcgctgtgggacttctggcttagaggttgccgcagcgtgacgaagaactgcgtccgtttagtcggaatgacgacgaacgcgtcgggagtggaagagtctctttcgtcgagcgttttcttcgggctacccctgcacaaactcgagttccctcacaa

SEQ ID NO: 2299 - DNA, 2379 bp, Toxoplasma gondii
  source 1..2379: mol_type = genomic DNA
gccttttcaaacgcgggtgcgaagttccgacatctctgaagaagagcttccagaccgaactccgatcgcatgcagtcgccgatctgcggcttctcgcgaggcaggcatgtccccctcctggccgtctctgcagggcctccgtcgcgcgagtctccccccgtttcttctcgctcggctgaggcctcaacgcgcctctctttgattccgagagacgcgggagaagaaggcacatgcagagaggacgcgggagagaacaagccgtcaattacggaggacgaggacccgaactcgagaggcaccgctgcttgcagggaggaggccgcagccgcggaacgagaaggggagacggagcctctcgcagagtcggaaggaggcatcttgttctgcttcgaacagaagaggtccgctggtatgtgggcggcagaaggaaagttgacgacagatctgagactgagaaggcgttgatggacgcgggggaagagcttcccccctttgaggcggactgacggaaggaccgttttcagaagatcttcttcatgttcgctaaagaaagagtcttctggccagaccttccacgctgaggcgcaccgctttcttgacgcctcacgcctctctccctctctctcgcgtcttttgctcgatttttcctttcctcgctcgctcgctttccgcttcgtccttcgcaaagaggcacctgtcctcggtcgtcggcggggaactcgcagccggcagaagcacagcaagtctcgcaggcgcgcgagccgcgcagctgggtgagctctcggcgacggagtttcgcggaggttccaagagacaaaaagtcagaagaaagagagagggcacacaagttccggcagccagttgccgtcgcgaagctgtctccctgagaaatgaagaaggcggttcgaggaagcaacttgaaggctggggagaactgcctgaacttgcgtcttcacctcgatctcgagcacgacaggttcagcgtcctctgcgccattttccaagagcgaaggcctgcagccttcaactgaactccgcgtttcagaaactcggatcgcctcgcgttgtggaatccggtcgaggcgtcacgggggcaggcgttgcgcaggcagttccgaacggcgcagttcagcgaaaacgccgcagtgcgacaaaaagacgaactcttcgttcagaaaagcgagtttaactcccagagtcgcggctgcgacctctcgcggctggcgaggccgtctgccgtggatcgcagaggagcggagccggcgtagcacggtggacggggaacgcagagccgctcggttgcctcggccgccgaaaatccggactggtcgggaggtcgaagcgagaggagagggtatggagaaaaggcaacgggaggaatggcacagcgcggcgagaaacgcggaaaagcttccttcgtcggccgatgcacgcgcggcgtctcgacgtatctgtcaacctgcgagaggagtcaactgggagggtgtggcgcgcgtggaatcggtttttcgtcgttttccccagaacttgacagtttcgagcgcgttttttcgagcggcgacaagcggctgttgcgcgctgcaccccacatgcaacagcgcggcggattcgccgagaaactcgagagattgtctcgtcgcatgcactctccgaagaggagcgccgcgctcctcgcctgcccaaggggcaggagtctacagagtgtctcgtcggtggcgcgacttggcggctgaacgggaaggacgttgatcgcgcgacgcgctgcgtttgcttttttccagatccttctcgagagttctcttctctctgacgctcgcttcgcgcgcttcgcgtcctcaggaagagtcgtggtatcgcaacacagagagtgcagcggtccgtcggcctctcttcctttcccggcgcgcgccctgtgcacatttttcctcggccttctcctctcgacctctgggtggattcgtcgcgcttctcctgctcgcgccgtcctactgccgagtctgtatcgcgctcgcgcgagggtcgctgttccctgagttcaggcgtctcgtcggcgaacctccgctttctcgcaatctcgaccgacagagagagacctgtgcgccagggcgctcgagcaccaacgcgaaacgccagttgacgctgaagactgccgcagcgctctcttccttgaatggttcttcggagcaggactctcgctcccgacgcgcgacctggagagcgcgctctccgtccactatctcctcgctccctcgacaccgacgcagtcgcgggtgacgccaccagcaggcgaggaaagcagaactttcagacgtagacggattgcgagatccccaagccttgctttcaccttgagatccgaccgctgctccttcgcaacca

SEQ ID NO: 2300 - DNA, 2135 bp, Toxoplasma gondii
  source 1..2135: mol_type = genomic DNA
gtttatctcttttagataggtgtggagactatgagagttgcgcagcgaagacaagctgtcgccgtctctcactcatccctgaggtgtatgtacagctgtgggagtcggtggagagggtcgtgagcgcctctttgacgctcgaaccttctctgcatcctgttgacgtttcttttccagaatggtcggattcgctgcatccgctgaatctgctggaagtcgccacggctctccggcgctgtctcggactgcagcagcgtgtacggacagtcaatcattcgttgtctgtctgctcacctgcagcagcaggccctcgagaaccgcgaggtcgtttgtggtggagaattcgcagaactggatcttgaacgcgcgccggtcgaagaggcagactccaacgacactcactcctgctccgacatttctcccgctctcaggttttccaaattccactgcacagagcacttcgtctaagtcgacttcgttcacatcaggagacaaatctgaagcgtctcccgaggcggacgcgccgccccgcgaaaaacttgaaaacatcttcagagacagagaggagaaagagaggagaggaagcgagacgcactcgaggcggcctgtcttcttctagaagagagcaagtcgactcgaggagcgacagggagagaaggacttccgaggcagacaacggacgcgacagtccagagccgcgcaggacgaggcctgagaatcgaccggtcgctctcgaggccgaaccagctgcaggacgttttgctctgcctcttccagaagaaaggaggaaaggcgagagaaaaagctccgaaaagagacactggcgaaatgccgcgaatgaaagggggagagaagacgcttgtctccagtgctctccaacgaggagacacgaggcgaccgaggaaggcgatgcggtgtgcgaggcgccttcgaaggactaggaggaggacggagagtcagaaacagcttttctcacgaaaaaacaaactcacctcacacacaggcgttttgagcggaccaagacgtcttctgtaaaagaaggttttcctcacaaacaggagactgcatgtgcacaccgacggctctccgtcctccctctgtatggccgccgggactgtctgcaggagtggaaatccgtctctgtcggttttctgttgtaattcttgcctccttgtttggatatcctcgctcggagcgaaggtcgacgacatactttcctttctcttgaagcctctttgcaggtgaaaacaccggaaaaactcctcctttttcgacgctgaaaccgggcagcgtctcgcgtgtcttctctccctccactcacatcacacacagcgtgagtgcaatcgcaaagacgccgttgcgagtccaccaggttgtgcagctctttccttcctctagagacaaacgttgcgtcttcctctttctcttttaaaggatcttcgttgactgaagctgtcactgtgcgccgccggtggctctccctccgtctgtgaagcaaagacgagacggagagaaggaaggcgcgaatccggaggaaaaatcagtctgattttgtgaggactctccgtttccgcggatgaactagtccgcgtagagcggaggcgagctcgtccagggacttccggcgtgcgcgcatgcagacaggaaaagtcaaaagttcgaggtttctgtccggcaaaaaatcgcttttctcccgttctcctcgggtgtacgtacacactcaagattcgtcagggcgccttctcagttcgtttcaaggcaggtggattcttctctgtctgggatccacgccgtttcttccgagtttctctttctttcctagattctcccacttccggcgccggcctccgcgctgtgcgcaccttttcctttgcttccttgcttctctctcgttcctgcaaagtttcttcttccgcttccatccttcctctccggcgccctgaagtcgactgacgcccccgtcttcctgccttttcctgcgcatgtacgcgcacaaattcgccgtgtcttcgtagaaaaccgtccgttcgagtgaccaggcgtctgcgtgaaggcaggtgaagggggatgtatgtttcaccggagataatgctccggtcgcgcttattggcttgctgtggtagcagaaaacaaga

SEQ ID NO: 2301 - DNA, 1620 bp, Toxoplasma gondii
  source 1..1620: mol_type = genomic DNA
tctgaaagaaacagtcgtcttcactgaattaccgcggtgaaagtaggtgactgagtggagaaagacctgggtcgcgtcgggtcgggggcgctccactggagaaagcgtgcacatgcacagcgtagggaatcgtcaaagggcggtaggtccgaatattcggcaacagattcactcattgtagcagaacctctgcgtggtcacggttggtgtcgctctccatgtcacaaaaggcgaatagttttcgtttgtcggccttctcagtgtaccgtggttgtgagaacagtgatgcggcgcagcatgctgaagaacagaaggcgatttgaaatcgacataaaccgaagttatgctgtcacacacacagcattaccaggttcatccttgcggttgagctgcgaactcggggccgtctagactataacccgtcactagtattacagcttcaccctttccctatttctacacagggcttcacggaagacatctatttccacactgaatagtgactgccaagtgccccgctacccctcattcgttattctcctagattatgtgtacgctacatgttacttgagtgggacgcaactcaactgtcgccagccgctacaacactgccagaggccgaagagcacttgaaccgacagagcaagaacgtagagcccctgagctggcgaatgcaaacatggactcgccaaaaagcgctgtcacatgaaggcaagatgatttaggatctcgtaagcacttgatcatgttatttagtcggtattactggcagtaaaacacgtttactctttgactgaagattgaatttcgcttgtgtgataatgttgtggaaagatcatctacgggcttaaatgaccagcgtgccagtaggaaactgacagtcatcgatgttccacctctcatccactgcatgttccagtttacacgagtacattgaaaatgccatccttctagtctaggggtagtcgcgggcttcgggaggctggccagaggctttcggcatcattctcgttgttttttcactcacaccttgcgtctccagtttcaaatgtggtcttcctttttgggcatgcattttttcgaataaaacgatggtgcttgcaaacagcagctctcaggtcgactgcactcgtactgtgttctttaacatttgtcgttcctcttcgtgagaccaacgcatgtctcatctggtgcgtgggtgtgttgaagtcccgttctagacccattttcggtcggggcagtcctggctttatattgcattttgttgtggtccatttcgtgaacggcggctagagcactcagcaatttgttgttgatgaggctggtcttcaaacagaaagctgccccacggttttctttcatattagactagtctcatagcccggaaatgcctcaagtatttttcataccggttttgcttcatgcatactttgcgcaatcccgcgactcctgcttgcccgccagtgcccccacttgccaggatgttgtgcttcctctcctacccaatctgtggcatgtacgcagtacactccctgtctatcatgagcggtcgtggtggacacagctgacattccagtaggttggttggctgcgtcctttagtgagagtcacagttggaga

SEQ ID NO: 2302 - DNA, 1096 bp, Toxoplasma gondii
  source 1..1096: mol_type = genomic DNA
aaggtgaaagaccctagagaaacacatgaatgtaagactgtaaggctgctaggtcagtttggtagccaaaaaccgcgaaacaacaaatattcacaagaagctggtgggatagctacaactgtggtggaattcactatcctgagacgatcaggctactctatatcggttatgtgctaggcaatgagactgatgttggtaaatcggctgtaaaatacccctattcctttgggcggagtcccgcaagtcacgtatcgttgtccaagatttatcttcatgtctggaactgcaaataaaacatgctaggaagcgtacccttgaatacgtctgtgtcgactttcagcttctcaagctgctcgcacaagaagctttcgaattcgggacttccggagtacatgttgccgacgtgtgcacgcagatggggtttccaggattgtctgttgctcagctgtgaaaagcaatcgagggtggaacctcttcgtcgttcctagcccccgaactcgatccagcccagcagagcgacgcagctgccggcgcagcggtcctttctgtcgcggaacaggggctgtgttgctctccctgctccgtttatgcaacatcaatccagaaaatgaactccgaatctggacaaattcctcgtggacgatgctggttcagggccactgcgttggtagtttcgaacgcatgtgcatagaggaccaagaatccaccagtagttgaagctcggcggcgccagcgtgctccgcagttgtctttgtaagggttcaaaagaaactggacagtggaagggaacagaaaatgcaaaccaagtcgacgacgcgttgccacggcttggagcggttggcaaggagcgagacttttaccgagagcatgcctttggccgcgagaaggggaagtccagatctcattcgaatgtgacccgcatgcacagaaagacaagatgccctctaagtagccgtcctgcgttcattagagcactgaattgtgacggaattcttcgtaatcggactgtcagcagtgaccgacatcagggaggtctcgaacatctggttccgcatgcatgtcctggcaaagctagcatcgattcagttcacctgca

SEQ ID NO: 2303 - DNA, 4862 bp, Toxoplasma gondii
  source 1..4862: mol_type = genomic DNA
atggtatcctcagtactgttcgcgccaaaagtctcgtggacggttgcggtgctgtgcgttttccagttcaagtgacactacgatgtctctgtttccaaaaggatatgccgagcaactcaagaagacatcgttgttgaggtctcgatgtacgacagacgcgtggacaacgtgtcagtgtaacagttaagcgcatgtttgtttgcggtgtccgttcgcttgacagggctaccacttggtcgtggtgtcgaatcaactcggggttcagaaagggcatacgacgctgatgtctctgacggagaagagtgacgcgctgcagcagacgttgaacgtgccgttgacggtttgcctcgcggttgctgacgactttttccgcaaaccacgaacagctgcagcctctttcatctttgctcaccttctgccacatctccaccaggtgcagtgctgtgtaagctcctctcagtgctgtacagtacggtgttcggatggtggatgggcattcgaccgagagcgacagctgtcgctcccaccggtttttttcgtcggcgatgcggcaggaaggttgggagttcccagtagcacaagtgtaggcgagaaacccaagggccagagggcaaagaacgagaaggcaaagacacccaaggatcacagtgcggcagatctgaaattcgctctgaacgtaggagtgcccttctttactccggagcagttttttcttgaacaggacgaagtgccaccaccgcttattgcgtattttgggaagggcactctccccataggttcggtacagagtggctggacgcggcacggaacgcactgggctggagtcggatccgaagttcactccgaccaacgcatactaaattctacagcagtgataacagaggcaacctccaaagtgaaactgttcgtgcctgctgagctggtgaagaacgctactccgaaccggcgaatgagggaagagcattttgggtggctgcgaggtgataaggtacgcagctcgtccgttggaagcacaggcctcactggtcccggcgtaaagtccgaaaacggtgaccgtgttacaggtggtgctgaaaacgactcaaggggattcactacggataacgctggcaacgagaccggtggtgacaagaaccgtcacgctacacagccgcaactggtaatccttattggcgctccgggaagtgggaagagcactctgacagagacagtgttcaaggattacacgtgcattcggcaggatgacctgaaaactcaagcaaagtgcgtcaaagcgtgtgaaaaggctcttagcgagaagcgcaatgtcgtgatcgacatgcaaaacgcgacatgcaaaacacgcgagccgtatatcaaactaggaaaggcactagggactcatcggatacggtgcgtcgttcttaaatggcccgaagaaatgtgcaaacatatgaatacgtacagagcgttggttggacgcgagagggcaaaacgatcacgaaacgcgctctcaactgatttcgagggacagcgacgacccaccaaacagcctagcacgcgattccgggaggaggctgttccgtcgtttgttctgaaaaatttttacagacaggtggaactgccgtccgccgatgcagaaggggtggacgatgttgttatccttgacgacgcagaacggcatttcatgtgtgaagagttctctgatgatgatgaaatggtactgtttggttctttcctcgactgagcctcaccttgaacatattcccattgtgtgtgtgctcattctttctgcttgacatgcagtcatgaaacagtgggaagactgacgcaggtcaacaaactggtgaacatggttgttgtatctaattggccaagtatagatgagccttttcttgcctgaagtgaaacacatcctaagcgtacagctacccttattgagccgtctcgtatgtcgaagcctacgaccaacacttggcttaccgtcaacagcggtcgctgagccgcagacttaatacggttgtgccgtctgtacaaacacattgccagctctgaagatggctctgaatcctgggttaacgtcgcttcggcgtgagagcctgcccaataccaacagctgtaaacacagagtttaaagccgatggcagtgcttgggcgcgcacggagcgcggaaataacaaggagttgttcttcaacacagctgagcctatgccaccgacacgaatcatcgatgaaaaccacaagcagagttatttaccagcgcaaaaattggctatttcaccgtatatattagtataccagaagattgcatcgactgttcggaggcaactcgccgctacacggaattcacagtgacaccagcaggattagggtggcgtggggggttctcgggggacaggtgttttaatcgagaaaaaaattcagaagcagaagtcctaaattcgccaatgacgtttgcgtccggtagccactagggaattctgcccgattataaagcactgggttctgtcatctgccagagtgctcccggaagtatgtacaccggccgcacctgaacactcgcaccaaggatgggagccagctggttgtccagtctgctgaagtaacgcttctgtcttttggcgcaccctccactctttccacaggcgtcttcctcaatcacagctatggaggtcatggacaggcttaaagccaggagtttctttggtttcataccgattcgacgcgtaagaaggttctactgacattgtagtacataaagcaaagggctacccaaattcagggtttgtttgtcattgcattcatccaactcctgaccggcattgcagtgtacatgtgctacaagtacctgcgtccgagtctgcattccgttgcttgctctcagcttactattttcagcgtcagtgctgttatagggtaggcgaaatagctgtgggtttctgaacaggcaataccaacataccgtaaccagggtcattggagcttatcgacgcaacactacagtggaaggattctactttgccacgttcctcgcatcaattgcattcctgatcattgctatcctcgatttcaccgatgtcgtccacatgatgccgaaagcgcctgagggagccgtatgttctcttgagaaattcgaggctgtcccctcctaacagttccatgcagacggaggccttcctacaaattgaccgagaaacgcaaaaccgaccctcatctcttcctgctcgtagatggcattacagtcatggctcattcgccgcaaacacgtcgcggctcacgcaggggggctgggcctcgaagcaggatatccagaagacactggaaacacttccattcggtatgagccaagtcattcgacccacattcagtgcagcactgccatagttctcttcagttcctcacattggtgagacggaaggcgaatcagaggaaatcagcattggcgagctaccaccggagtaagttgacagcagtttcgtatgataccagccgcgttgtcacaagctgtgctagggcgaaggaactccctacgaaggcgcagaacatggtaataacgataacgaagatgcaaaaacgacgtaagattgctccctgaatactttgagagccgtcactgtgttactctggtgacagctgttaagcttgctttcgctggcgtctttggtactctactcctgttccacctgtacttgtaagggaatcgccactgtcagcctgagcttccttaatattccatctttccccagcggctggatcattctgacatttctgatgaacaaatgcatgagtttggatgagcttacagggcagcccgagcagtaagactagattccatccgcgtttacggctcgctaggaaacaggaaaatttgtccaggttccaacccctgattcgtgacgagtagagactgcagggatgagcattggaagaaggcgtccttttatttacttgcttaaccgtattcttctgcttgtcttggatttgatcttttcctctgtttcgtgttgctttggaactggatttgactctcctttgccacatattgctctacactctgtgcgtgtctcggacactgaaggaatacgacactgtcgttcccagccgggcgctcctgtccagtgcgaaagaaggacatggctcatctagatcactgtctcgtcccgcagcaacaaacacactgttagtgcgaatagtaagggcgcagttactcagtgaaacacatgcatccttggtctgtttgcttagcttcactttgaattcgaatcgctctcggtgtgctgttgcggaccgggggggtgttggctggcagagcggcagtcgacgacccccgagcatgcgcttgcgctgccgtgaacctcttctttgagagactctgcaacgcagctctttaattcgcggcacaagatgaaacctactctgtggtgattcaacccatgcagattcacgatatgagatgcgtcttacgaagctgcttaatatctgcttgactccgggagttgtttgaagatcctcgagacaacccctgcgaacgagacctcaaacccaccctgtcttggtccctttcttactggctccctcatccgctgtcttaaaatttatgtttctgagtgacggccgttttctccccatcaaggaagttagtattccttttgacccttttttctggagaggtagataatacccagttttcccgtggctgtgccgtctttcacctagcgaacaccgcttctcccgccagttccgtgccgcaatcgaaattcaaaccaaggagatccgtgacactgaagaccaccatatctggtcagaagaaaagagtccccactaatcgtgttatatttgatcggaacgtctttcgtccctcacgcccccctcaaggtagccta

SEQ ID NO: 2304 - DNA, 4107 bp, Toxoplasma gondii
  source 1..4107: mol_type = genomic DNA
gaagggaagaactggaatgagattgcgacctcacgccagcatgcagctccggcagtacattcctcctgaccacagggttaccagaaggaacgaaggacgcaccgagacacacgaacggatcttatacgaagtgacattcggggattcgaagctcgaattcacgcgcttgcccgcgtgcaatctcgcatgtttttttttatcgcgtcacgggcaaatcgatacatcagagaagagaaagccgtgctgcataatccgtgaaagaagccaagaactgtgagtgcgctccggagtttcgctgcatgcgtgtccgtagaacaggcttaaagggagtagcagttcttcgttctctgtcaaaaggtctttgcttctcgtttctctgtgagcttactttcccaggccagtagcggggaaccgtcacttttttgtctttctgtggctcgaatttctgttgcatggggtcagcgccccgatacaaaatgctgtggacgtcggcggcagacattgtttgctgtgaagagctaaccaacagaagagaaacggagtagaacctggtgtcgtggccggattaagtcaaagaaagccattgacgcggctttcgtcattccctcctttccggcattcctcagcggtagttctctccgacccaagaccgcgatttctccggcagtgaagatccctcaacgggagaccggaagaagaacaggaacccctccccctatggttgggagtctcctaaagcctcagtgtggaaggataacaggacagcgcggtgaaacaccgagaaaaaacgcccgaacaacccctccgcggggagaaagcatggccgctcgttctttcctgcagacatgcaaacgggcgggccgtcaggacttgctgaaccacggaacggaaagacgcagcaagcgactcaccgagaagaaggaatgtatggagaacgacacgatagagaaaaagggagacgatatggaaaatagaagtcggtcgtgctgcagtagaagccggtgaaatcaaatgcgaaacgagcatgcaacacggagtagaaaacgtggcgttgtatcgcaaacaaaaattccacggtgacgaaacgaggaagacaccgcctctgacccagacttttgccccaaatgaagacttcccggaaagagtgccaatacaaacttctttggatcgaggcgcactccttttttctctggagaaaaagatttaaatgccccggagcgaaaaaaacaaaccgccaatcgccagctcagcctgcagaggactgtcgactgcatgcgggctaggtttcgagtgactgaacggcggaacgacgacggggaacagtcagtttttgcaggcactaaaagatgacatccacgcgtgaaaggagaaatttttgtcgatcctagtgacttgggcttcctaggtaaagaagtgacatgaacggagcctggcactcttctgggactgggttcgagacacttatctagggcaggtggcagcaataaagacagggcaaaaagctcgaaccgggcgggaaccgagacctctggtggtgaagtgtgacactattacttttagagaagcggcggagacgaggaaaaaggactcgtcaagactcttatgttactgcataatattcttgtgttagcggcaattcgtgctccactcaagcattcgaacccatctcttcgtcacttgtctttgctggcactccgttccgaaaacgagtttttgacctaggcgcgtctacgtcaattagctgtctggaaagaccttctgtaacaccccgtggctcttcagttttgtaagcttcagggggacatttacacccggatccgctgtcggcaggcactgcggctctgtggcacacttgcacaaccaaccttttcagctatgcgtgcaagtatcttcgagtgtctcatgagtttttcttgtcatgccaacaggtccttcagagaggcagctgaatctgccttcaggctacgcttggtcttgaagccaaaacctgtcaacggacggtgtgcagcttgccatgtttgttttggttcttggtcggtgagtgcgtgtcctctagacgtaaagacggaacgacttaatgtttacaattgtacgcatgcgaagaagcgactctgcatgatgaaatcgtgtgtacctctgtcttgcgggggaagcggaagtttgattgctgttccaaatcaggcactacggtgctcagagatcaaaggccggaggcgttttggatgaacttggacagatgcttagcgctctcactcattggaaaagtttgcgccgcttgcacattgtatgcgaatccagatcactcagtccgtcaactacgaaaaaacgcgtaaaggcagggacaagatcagcattccattatgtatgtttcagacaacatgaatggaagttatccatggagggaaatggtggaatatcttcaaccgctcatgtgctgtagtctacccaaaactgttgcagtaatggcggtaagcggcacacacaagcatgtcatatattctacggatgaatcgaaaaaaaacctttgtgtgcctggccgaggtgttttatcattgaaatcaccgctctggtcgctcgtatgatttgtcgtgtaacagctggttccctcaagaaggaatttatgtgccagggaggcctttagtttggtgaaaacaattcttaaaactctacgttctgacgggagtagcatgaagtcaaacggtagtgcaatgcagcctgtatctgttttgacgaacaaaagtagatttacatgcgtctgcccaggcaaatacataatcaaagaaaatgcacagtcatacagacaggctgagtacagggcagaagaccgtgttatttgtttggtttccggatgacggactgcagtcctagaattatccagctgcttgaggtgaagaactgtatagagatggcgggcacagttagagagaaacgcaatggcgtgctttctcaagcgacaggtgaaaggcggctcgaaggatataagcggcacccaggaggatcatggctacttttgttccaccgttacgggagatgacagggagcgtcacgcagacagaagaatgtggcggatcaaaccaacacataccccgtgacaattggtgatggaacgaccgtcgtcgttcggtactgaaatgaacttccagtgagaagctttccgcactaacgccaaagggacgtgttcactcgagctttaatcgacgatatgcgcataagattgttcttacaatgcggaacgctccagaagccagaagaagtttttactcaactctgtgatggggggagaaatataacagccccatttgtactgtgctcaagagtagaatttggtggtgatccgcttggagattccatgtatatggtgttcagttcactggatcttcagagtcgctctcttcttgcatccaagtctgggagcacgtgaattactaaagagtcagaccagctttcacgcacgacgataattacccgacaaggatgtgtgagacagctgacgacttcttgactagtggcattcagggagcgttcaaattttttgcctaccgcacccaccgtttcgaccacgagtttcacaggagagaactgagcagctcctgccacttgaaaaacattttttgccgtggggcacaaaacaaagacaaaaaagccggtcagcctaccgtgcattttttgcgaggaatggtcctgcgtccaattcgtactggagacagcacacggcggcgtctccgtctccaccgacggcggtcgagagtgcacttcgaacacttagatcagccagttcgcacgctgtcactcagtgggttgaccacgattactacatttttgcccgtccgataatcgctgttttcacttgccttctctacgtcattgtgacgattttcgtttgttagaggcagtcgccagtgcttgcacgcctggtcggctagacacttcccggcgcataggtcgcattgtatgttgattgctcgatgttcttgatggcagaacggtgcctgacaccataccaaagcctgcaccacttcctacttttcgagattgacgtcctgtcgttgtgaacgagaactgttccaggaatttcttctgttgcgcttcttcggttggtcgggacga

SEQ ID NO: 2305 - DNA, 1787 bp, Toxoplasma gondii
  source 1..1787: mol_type = genomic DNA
tgtctccttcagtcgatgtctccacttcgtctgaaccctttctttttctcgtgctgcctcttcggcgtcatttgccgctttcctctcttttttaacatctcgatcgcgtcgacagtgccgtttcattggcgcctgtggacatttccctcaaattctcgtctctcttctcctgtcgctggtggtttccctcctctaccccgtttttctgtttttttctctctctctgcacagctctttgtcttctctttctcttgtctcttcttcgctacgcttgacctcccggttctcttccaggtacacgcagccaggtagagacgttgcgctgtcttctctgttttcattgtcggggcagaggtgaagacagtaagaggggaacctaaacggagaccgtccaggtttgcgttctccgttctttccttcccttattttctgcaaactctctcaaaagccgagtgcgtcagcaagaacgaagaaagacactaagggtcaccccgtaatcgactatgagacaggaagaagatgcccatagacacgcccaaagtgcagatgaggaaccggcaaaaattgtttcccttctgttccccaccttgcgctttccttcttcgtctcttactttctctctgaaactcactgcacgaacccgagaggaaagagacgggagaaactctcgaggcgtgcagtggcaggaagaagaggtccgcggggaaacccaacgaaagtaaatagaagctctgagaaacgccgacagaaagccgaagcgctctgcaagaagtagagagaaagtgaatgagactgcctcgcgcccagccacacggagagcagggaaatggtcgggtcgaaaaacagacctagcagatggagggagcttttcgagatgcagagagacggcttttcgaggcggctgtgtagagcgaagtctcccctgttctgtcaccttttccgcgactgtttcgtcttaactcgcgagacgatgtctccttgggaagtccagagaggccaggagattgaaactgtgaatttcttccccctgttcttcttcgtgtctcccgtcgcctgttgccagcctacgcgtgcatgccgacgctggccccccatcgagacacctcgtgggacggcctgagtttcttttctggcttttacttctcgatagtcttagatcttaggtttccctgcttccttcgcttgctctcgatctgatgccctgatctccacgccacttctctccttcctttccgctgattctctcgctcctctgtcgtccatcccgcgtctgccggtctgctcgcctgcttgcctttcccgcgacttttcgctgcttcgtcggctcttgaaagaaagtgtaccttgctgcggctcccctcaacgctcctcagtccagcgtgctcgagcgttcgtatctccttgatttcttctgcccttctcctgcgtttttctcctcttctgtctcgtggcttcgccggttccctgtggtgcaacagtgacgccttgatggacggtgggcgcgaggtagaaaaagagccttctagtgtccaagactctcccgcttcctcgttggcaccataaccctttctcttaacctttcttttctttttctcccttttgaggactcaccttttgtccttccttgccgtcctcagtcccgactcttctcttcgtcaaaccttccttcctactctttaccctcgtcgtccccgtcgtcgtgacctctcgttgtcagttcctcctttcctttttcttacttccgtatctcgtgcttccatgtctcttgtcttcttcctcggccaaga

SEQ ID NO: 2306 - DNA, 3767 bp, Toxoplasma gondii
  source 1..3767: mol_type = genomic DNA
ctcctcgtttgtcctcctctgggtggtcaccacctcctcgtttcgcgaggtcccttgcttgtcgtctctgccttctcccgaggcctctcttgcttgcttttctgcgactgctcgcgcctctccgttttcgctgaggcgcctcgcggagctctccgtcccgctgccgtgcttgtgtccttcgtcacctcctttctcgccttcgcctagatcttcttcttcgtagccccgcaactggctgagctctgcgtcgacgacaaacagcctgttgctcaagccgcccgacagcggcttcgccgtgacactatggggaggcaggttacgccaggcggggacgtatattcttgccagcgaacgaacgatttccagctgtctgcggagccgctcttctgggctgtctgtacagccgaggggggcagtcagaacggagagatcgacggcggcagaggccgcgagaccactggtgtgagccgtggatggcggtgccatgtgaaagtctgtagagttcttagaagccgctgtcgatgaacctgagtgtttgggagtctcgacagcccacgtggtctgcactcgcgagttcccaggggtctcccgaggcggggctcgaattccgccttcttcgaccttcatgtcgtgtggctcttgcgagaagaaaaaaagaagaacgaagaccgaaagcaacggggaaaacgaggacgaagaggcgggacagcgagagtgtcgtgagggcgcgcctttcaggaaacaaaagaacgggggaaagaagaacttcaagagggtcacggagacagaagttttgaaggcgcctttgtcgcttgcttctgtccgtgaaggtcaccacccccttttcgtgccgggagagcggaaaaaagacgaagagtaaacaggcgcaaaagaggaaacccactcgttcttttcatatctcagcccttgtctgaactgtcactttcgcatacacttcaggtgaatgacaaccagcagtggatggtcacatgcacgaaaagaagtctcacagtgagacatgtgttcaggagacaccgtgagcgcaaggaaacttcgctctggcaaacagaggctttcaagaactacagctggatacaaactcgaagtaaatacaacaaacacagctcagagcccgttgggcgcgctgtgaccctgtacagaagttgcgagatcctcattcgtctgctgtttcttctacgcctgcttcttttcagacggccccctcgaagtggcgacccgaaaagacgcgattacttttcgttagcagcgtgcaatccagctgtggagatggagggaaagcggggaggcgacagtctctctgtaattgggaaaagtggcttttcctcaggggttttgcctcccgactgtctttctgggcacgtgcgctagctggcacactgcatgcagctctcagaagctgaccgcagacgactcggacgatggaagcgagctagtgagcaatgtcgtgaaatgtgtccactcatcgtcgctaagaagactttttctgcaagactatgagaagacttcttccatcggcgatttgcctcgttgttacagccacgtaatcctcctccatttccaagatggtttcggtgagaccgtgcggggcaggcgcgatatgtctgtgggattgtctgcggcttcttgcagacggttcttctgcctgaaggattcgagttataagagagacgagaacaagtgaaaagaatccgataaatcccatgtggagtggttttgtaacttcttctatacacgggagcactcaaaatgcaaaggcggacttgcagcgaagcggcgggtgtaagtacaccgtagcaagcccccttcgggcgttgcccctgtagtgatgttgacttgactttctcgagtttcacggactctgttgtctaacaaaaatccgtggttaagttgtgaccatgatagaactgctgccaactgtctgaagcggcaaaaggtgcttgagagtggaggcgatcttgcagggaaggttgtactgctagtttcacctggaaaccgtcggcgggccgcctggtctagacggccacatgcagaggttgggggatagccacagttcatggattcatgagacttagaaagaaaaatcaattctttcagaacgtctagaggcaaactctcgcggcgtgagtccgtagactatttcttggataaagaaccacagaccgtcggtagcttgtggtctagcggaaaggacatgaaacatgaattacacccttgcaattggagaagttcctgccaccggaagcattcctacttctcgacagcttcggtgcggagtcccaccgtcgctctagagagcccgaacagaacggttcgtcgaaggaagcgttgtatttcctgacgcatcgtgtgtctgtgcaaactggagaatagccagtgtcagtttaagacaaaagtccgaacgaaacggttctctgtcatacacgggggtggctgctagtgagcaaggtacctcatagaagcataacggcgttccctttttagtcaatgtgtttccagcggcaacgccgtattcctctacatgcttgagaactcacgtagcggtcacaaacaatcaacaatcaagaatcctttcccggctcaactttgaaggttatagcatgtgcagcgtgtcccagagcggcgatatctggtccgcatccggaggcaaatgacagtggacgcgctacggccagtcacgttcatacgcgtatgtacgctggcacccagagtccgttctactattcgtcgcttctacatttcgtgccctcattccaccttacggcaacattgcaggctctcctatttgattgtttgttctcgtttgtgtgcattcattcgcttcactagtttaaatgaacgtgacattctcttagcaccacttgaacggcgatccacacagcctgggaaggctccatggaacgatattcgctcttacctttctcaacgtgtttaacgaagaagaagatacccgattctcggctacaacaccccttgtgttggaaacactctccccatctcgccgccaggatatatatatcgaagcaccagaagccgtgtgatgtaaataattgtgtaacaggatattagccctagcctgcgatggagagaaatatcttggatgaaaggatgatggcggctaaagagagcggtgcaagcacgagctcaaaggacacgtttaagcgctctcgacttcgcttcgagtcgctgcactcttccgttccgacacaccgaaggaaaaaggagagacacagctaagcaaagtgagaacttccactggacagaaaaggggaatctctgccaaaggcaaaagttgtcaggctcggtttttctgtcttactgcgtgagtaaaagagacgttgccttacgtcggatcctgaatgtgactccagccatgtgatacagactacacagacctcttcgtttctgcaggcagcctactcgactgctgaagaaagctgaaatcgctggagtacattttcccacgacatgaagattatttcacagcggtaatggccttcacgaaatccacgttgaaactgctgtcacttgtatttgtttaacaacgagtgagtcgtcccctgcatgcaagtgagagtcgagcgacgaggaaaagcagcgggaaaaggtttgtagcgcaagtgtgtaccttacaaagtatctagacaaacagtgggaaggtgtgggtgggtttcttatcactcgaatcggaaatttcctttggatttcttggacggttgagcagacggatgccgaccagaaaactgaca

SEQ ID NO: 2307 - DNA, 3376 bp, Toxoplasma gondii
  source 1..3376: mol_type = genomic DNA
agactctccacttcctcagaaagattcaagtcacaggagtgcttcgaggccccgcaagtctggaccaggttctgaatggagaacgcctccggcggcgccaacggcgacgaagggtggaagagcacgagggcatgttgccggcggacggcagccagagcggcggggttgcgaggaaacgcggagcccgcggcgagaggttcgaggcggcagagaagcgaggactccgcaaactgctcgacggccgcgagcagcgaggggggggctgctgtccgcatctggtcgtgaaaggcctgcgtcaccgaggcatataagcaccggcactcaccgccctcatggcagcaggacggcgctcctggcgagttttcatcctgccccggcgccatgtagccacctgtggggctctgcgggcgcgacccgctcgacagctgcggcgacacttcggtggcgcctaagaccggcagggcccaccacacgcgagggcctggcaccgcgcgcatggacgcgggtgagggacagaagacgtcttctgctcttctcttggagggcgagagcggcggcctggaggagacagccaccgcgtcacgcgttcgctgcgcctcgccttcggcgcgcgggagactccacggcggccgctgacagggacgctctcgctgcatgcggtccttagtcgccgacggatcgcatgttctggcgaggcgacaaggcgaagaaagcgggctctgagagcctgttcgtgaagatacaggcgacggctcctgaggggtctctgaaggctttgggaactggagcccgagccgaagctgcgggatcgcggcagggcgcatctgaacgcggggacgctccgagaaactcgcctcggggggccctcccgtggggaagttgggagaagagacgcgatgcaagggtgaaagaccagaaagcgtagtcggtgagaagcaggcagactctttcgcccctgcttcttctcgcatagagaggccgtggggagaaggcggactcgaggcagtctctgagacgtccgccatcgtgaaaacaagactggaaactagcgggcaagaaaccgaactgcgtaaaacctgcagtcgtcgggaaggctcaggcaggcattttcaaaagactgcacagggagggaataagaactctctcacggacaagacggcagcgacgggggttaagggacaggaagaataaagatgcggggtacgcaatttgtcacagtgggatcaatcgagaagcgatgaggaaacaaagacctttctttggtctgagccggtggaggaccgccctgtgacggtcaaagaattttgattgaaaacaacggcgccgaggtggccacctcgcaagacctggagaaagtatctttgatttcttcagcaagagaaagcggcgacatctctcatcgaagaaggccacgttcagacatgttgtcttaactcagaaatacgtttacacgtcaagcggcgaaaaggaaggcggtttggtccagccttagggttttgaagcgacgccggttccgacgagaaaaaaggaaactctccatctcagccaggtaggcgaaaccgattctgaactgtttttgtgtggaaatgctcgatgcgaggaatcggcgacacggaccactatgtcgcagacgattggagggggaagaagacagatctccgcgacgcggcatatagtagtaggggcagcgtgaacaaatgagggtttggcaggtgggaagagcgacgggaaacgtgagaggacactagacggggaaggacagtcaagggttttgtctcgtgaagagaggcacaaacgaaagccttgaacaaggacgtcgctctcagttccccgtgacttcgcaacagcaagatcgggacgtggtaagaacaaagacatcaaatggcgtgacagcgcttgcgaactttgagtgaagaggcggattttgggggatttccgtcccaaacaattacgctgtcttgcaaaaggaccacgcgaaaatcgcgctctgttcggtgagccgcgtggacggacagcaagcgacggtccgcgtggcggtggcattcctttgaaccgcaggccgagcagggtcctcaagattccttgaaaagtctagacaagagaaacttgttggttcaatagcaaaggaaaaggtgcagaagccgggccatttgatcctctcaggaagcgctgcgcacatttcgacagccagcacattttcttgcgcgttctcaaccctgcctattttagacggggtttggcctctgcgtttcctgagcgaaaaagaagcgagctgcgcgagccgcgaaaaaggaaacgcggagcgattctggcgtgggaaaaaactctgttgaaggcgacagatcgcacagacacttgccctatccctccttatcagcgcgctcaaggctcaccggcactcaaggaccaaaaaccaccagacaacgcaagcacattcagccaccccctctccccccgtgcatctgaatctgagaacgctgctctctcgcaaaataagcgaaggttcggagcccctcgcgctcggcaatggcaaagttctgccagtctgcagagtcgctcggcacttgaaatacaccgtttttcaccgcaagaatgcgattccacacaagctctgcgctcagacttccacacatacttggtatggaggttttgaatagtccggacgacccagacaaaaggagagcggagcgcagtgagctggtcactgcaatccgtcgtcacgggagcaaaagcaaagagaagcatgaaccgcacagggcagagggcaaccacaccaacaacagttcgtaccgcactcggtctctttagctccgtctctgatgtttgtggcaaaggtaattctgtgtagaggatggtaatggacacctgtcagtgaacctccagagcgcacagaaagcccccccacctaaagagagggacgacccagcacgaatcaccagttagctctgaagaaaacccccctgtttcagcggagagagaagaaagtaagcggaactgagtccctcttcgcgtttcttctgtgttcggttccgagagagtgagcaggcccttacgctcgcgggtcgcgcagtcgtcgagctggcccggcttctgcccaggtgcacagcttcttggcgcatacatgtcacggcgatcgcatgcaatgcaaaaccccgttgcagtcacgggggaaaggcaccgctcttcggcggaactctggagaaaaacattcgcgaaaatctgaaaattccgttccgatccaagaacgtcgatttccacgttctggccaccgaatctcgaaaggcgccctagacaccactcctgcgcgtcggtgcggaccgtcgtaactcaaggagaagcattgctacccttttgcactcttctggctttacagaaa

SEQ ID NO: 2308 - DNA, 2224 bp, Toxoplasma gondii
  source 1..2224: mol_type = genomic DNA
gggagaccgaggagacgttcgaggattcgatgctgggataaaaatccactttcagtagtcggaaacagagtcaacaggcagagagcatttgaaagccaacacatgttttctgaagtgcacgtgctccgaatataagccgagacgacaaactgcgtttttcaaaacattcacggcgagaccaagaagtcgcttttttcctcaagtcgtgtcggtcaagccgagagaagacccgccgattcgctgctcgattttgcgtcctgatgagcccgagcggcgttgacagagtccaatctcgagtgctcagaggggcaagcacagaacaggaagaaagtggggagaaagaggtcgcaggagcttccagaaagcgtcctttccccggaggtttgctgtggtcagatgtaggcaaaaacaacgcgttgcagaaagagactgagagcttgagttctgaccctttccacgctcagttttgccgtgttgccgtgcatgcaaagccttagccgtaactagagctttttcagtccccagaaagcgctgcggtcattttcggtccagagaaacctttttcccctgttccgaggagggtgcgggaagtcctcgtctcggagacaggcttctcggcaagttgttctggagaggccgtagccactgcgagggcgactccaattgtagacgaccgtctgggcgtgtgactcactgtaaactccctcatcggtcggaagtaaagtcgtcgtcgaagcactcccgtagttgttgagagacctcgacgtgacgaccccagctgatcgttttttacggctctgagaagtcctagagacgcgaattgtcgcacaagactacgaaagcgaacacggtacttgaacagcttgttccagacacgagttctgcggatgatcgatacctctatacttggtgttcttacagacaggtcgtgaaaagcagatctttcgcatgcctagagaggctcagtctcacgacgaaacaggcgaattttacactttcagaactcgagtggtaccttctccagagaggctggagattccctctggaacgaggggggaagtcgcggaaacaaggtgtgtctcttggaggggtcggcgtcctcgcggcgaacgctggtcagacagaaaggcgttaaatcgggtggttttccagcggttacctcagactacctctgacgaccgttctttcgtgggttcctcttcgcattcaacaccctttttaattccgctctgctttttccgctctactcgagattgtggcgctgcagagggcgttcggatgtccccgttttccagagaatcacgcggaaaacgaagctgagaggaagcgcgttgcttctccgctcgccttctcgcccacgagactgcgagagtcacggactgtgtttctccgcgtagcatggaaaagctgagagttcatcgacagctaaacttggtgagttctcgtcgtttctgtcaacggagaatcgagatcatgaagtgtcgaagtcgttctccccgtttggagtgcgttagaaaaaacaaagttccagagactcacgtccctccgcgtgaggagacacgagaaatccttccgagctgggaggcgtttggcagtccacctccaacgaaatgcagtttctttctcgtctttttttccgtcgctttcttctccacgccttttctttctccatttttctctagcaagaccagcgggaacggagacacccccgtgtgccgcagctttccagtgtatgcgtctgggttttttttcgccatggcaaaagcgtgagcgattcagaaaaagattttttccgccggagagtctctcctcctttttccttttttgtttcctggggttctccaggctagggactccttcctgtctcgctgctctctctgccgccccccccccttccccccacggcttctctcagctgaagtcgctgcatctgcaagccgctatacgcgtgtcttctcacttgttcacaacggcggccattctgacagttcgagacggaggaggttcggaagaaaaaaagagaacggaaatacaacgaagtctcccgccggccctgtcctccactgacctcgccggccgcggaccgcctttccaactctctgtcttcttccctgtttcttgcgccatttcttctcctcttgttccctctctttcttccttttctccattcttacttctttctccccctcttcctcacgttctctccgttttttctccctgacaa

SEQ ID NO: 2309 - DNA, 2197 bp, Toxoplasma gondii
  source 1..2197: mol_type = genomic DNA
cgatcgatcacctctcgtctgagactgtcctgaagccttggcaaacgccgcttccttttcctgaactacgttcccctgtcgcgacaccgcctcagctgtgtcaccgcgtccgcgagagagacgcggtcctggagtccgctgcttgcgcgaagcatccgggcacctcatcgagagccgatctgtgcccacctgaagtgtgcctgttggcaacctgccctctacatctgcgccagctgcacctgctctcagtttcttcccgcgcgccagccccccgcgtttcgtctcgtcgacttgcgcgccagctgtgcgactcacttggctgctcttcttcttctcaggagtcacgcgcgagagaaaaaggagcatcttctcccagtcgacatccgccttccttcgcccttcggcgctcagagactctcctcgaggagacgcagaggacgcgtgtggctgccgcgcgcgcaaaccctcctccccgggtcccctccagccgtccccgccggcgagggagggagcctcacacccattgagccggttttcgcgcgcatcgtcagcctgcagggaaaagagcagctctgcatgcgcggcgccaacagaagctcgaggaccctctgggggctgaaccgcgggcggacacatgcaagagtagtcccagctcgcgcagcctggcggaactggggaggaaggaactcggtggggagtagaggctgctgtcgaacttcgcccagagacgcaactcggcggcgccatcagcgcaggcgcgaacggcggagtcccctcaatccgtttgagggagtgtgaggaaccgtggagaaggagtggcggcgagagagccaggagggattacttgaaggacatcacgtcgcttggcggaaatgacgaaaagggagaaaggtggaggagagcagttgctcgcgatgaaggagaagcacggaacgcggtgttcgaagagcttctgggacagcgaggagagagaaggacggtagaaaggggaagcaaaaaagaggcggacaggtcgatgtggaggcgagcacgttcaatgaagcgaacggcaaaacactacagtgataagatcctctggaaagtaacgacgggaggcgtcccggcgcctaccgaaaaccccacgggtgggggggcgtggaaggatcgcgggacgccaaaccgaaagaccgttctccacacagttcacgggcacaaaacttgcgggaaagggggaaacattcgatggatacgcacaaagccagggatgttccgatacgccaccgaaacacggaaaacacagaagtacacgaatctggagctttggtcgcggagtaaactcggaaacagagcggcaggaagggtccttgcccccccacccgggacaagaagccggttgtagcggacacgcatagaaaaaagtgagaaaatcgtgacgctcccacagccttccaagttcctcggttcagaaggacgtacagcgcgtcccaaacttggagtgtcgccgcggtttcgtcctgcagcttcctgcgcaaaatcgtcgccggaaacactgcgccaccgaccttctttgcgacagctgaccgcgattgcacgagggtgctctcgctcaaggccattttccagcaactggctttctcctctgcgccccccttccccagaggctctggagcatctcagctaccaagcgatctcagagacgaccagcctcctttgttttacgtctcgccacacacatacactctaccaaagataagaaggcaatcccaggggtacacggttctattctttatgcgcctcatgggcaaccggctgtcgagcagttctccgggggcttggcctttccccgttatgtctcgtgcaacacacattttcacctcagccacacagctgaactttgtcttctctccgtatcgctctctactcgcgttctgagtgagcggttcagccgtccccgtctatttgagtgtataaaaccggcgaaccatcgacgcgtgcgtcgtctttgtccgtgatttttttcgctgttccgtctcgctgctctctctgttctcactctcttacgctccgtggggctagctgtttctctcgctcgcgaacccagaggatggaacgcttccacttttccctttcttccgtctcccgggcttcgccggcttcgtccgcctcgcatcttcagctttttcgcctctcttcctccagattctgctccagtgtacaa

SEQ ID NO: 2310 - DNA, 1674 bp, Toxoplasma gondii
  source 1..1674: mol_type = genomic DNA
aatcttccaatcacctatttcagcaccaggatgctgttacgcacactaagaagtagtgccctgacagaagcaccacagtcaatgtctaaacgaatccaggggatttccctccggtaaaagccattggaatcaacacgattgcaagtagaaaaaacgtggctcccacagccatagaccagaacagggtcacctgaaggatggattgttttcaggagttggtataccgcgaatgctgaattcgtactgaaataaaaacggtccaccacagcagtggcgcagtcgactcgcatgtcgttgacatgtttatctgaatgtaggtgagtgaattttgtctacgtcaagcagcccagaatcgtggcgtaccccaattgtgccaatggccatccagaggaaaccaattacgagcaaaacaatttccataccgatctgtacacctaacgtctgctcgcacctttttgtgcccatttttgaaactcgactgaccgtagcatcgaagccgtaaagtttcttgaccaagttggtaatgtaggtagctggaatgctctgtaccacgcgtatgtgtgtgctgataaagagctgatgctgtgttctggatcttacaaaaaatatacatcctaagagccaccagtctacagaacgcagtcgggtgagatatggaactccgcgctcattctccgtcgccttactgagaggaacatcacactctgattttaactcgaagaggaagacaatcaagaaggacccagtcattacagaagagacactcgtgagagcgatcgcctgaagtcgacatgaaaccaaagccaaatatcgaaaaccgttcattaagacgcgtcgagtacggtagtcacgtaccgctcctggagttttcaagcagttccaagtagtgccactacacggagaaagacgtcttacggactctgaaaggttcccgcaggtggccgctgaggcgcgcctctggtggcagtgagagagtcgttgtctgtcatgttacaaaatcgctccagcttttagactggaaagcttgttcttggacgacgcttgcaatcattgccaacaaattgaagccagctgctcactctgccgcaaaactgatgatgagctgcggctattagaaattaaggtgtaaatacacctgttgcccgagttgccggcgtctgcgaacgcgtggattgcgcggaaactgttggctaaagttatatgtatctgaaagtgtttcttacatactatttctcttcaaaggggccttgtctgctagagttgaagttactccaaaacccttctttaaaggccgcagtaccaggagcaagcaagcaagctgtggacttcatgggtgtccgataggatatatctggtcactttttccacgtgcatttcggtggccgtgagtgtttttggttccgataataacatccgatcgtttgtggtctaatctgcttgtggggcatttcatcaccctctgtagtacagacgactgtttcatgaagatttgaaacgccagcgccggttaatgtcacaagcatgcgtgcatgcaaccgcgacctcacgtgataacgtagtggcagaaaagatgtccacaatagcacaacgtgattaattttttcggaacatcttggtgatgccatccttcgacgatgtaaattccaggaaaggacaggccaatcactcgcagca

SEQ ID NO: 2311 - DNA, 1743 bp, Toxoplasma gondii
  source 1..1743: mol_type = genomic DNA
ctgaatagggtcctggatcttcagcaggatgggtgcttggtgctccggctctgtcagcagtggattcgcttctccagtctctcctgcaagaaggcatctcgcgtcccctgtcggcagaggcggcggaatgaagtcaccctctggtgtgcacagacgctcgcgccctcccgcggcgacgaacggttccttcttcgaggaagaagcggcgagagacgagtgcgaagaagacgaagacatgcagaaggagggaacgggactggcgtcgcggtctgcggcggcatggtggacgacagcagggacagcctgacgcgcgagcgagaaagaagacgacgcgtctggagagagagaggaggccgaagacgcaggacacagagccgaggaagagaaggcagacggagacgacgaggaagaagagcgagagggagttgagaacatggacgaagaaaagagagacgacgaggagggaccgggagtcccggaggaagggaagaacgtcgaggcatccgacgaagacgcagaagccgagaacagagaggagcctgacgatgagaaaggagtagaagaagatggttttgtagcggcgtaggtcccggcagagaagacagacgacgcagatggaacattgcggccaaaaagcgaggaagaagtccctggaagggaaaacgggcggccggcaaacaaagaagacgaggaaaacggagacggttccatcttgacaaggcgcgcttagacgaaggggagaaacagaaagagaacttaacgcgagtcgagagtggagagaaggcgtatcaaactcggctttctgctgtgtgcttcgttgtcctggagacgaagcaaggccgcgcaaagacactgcgcgacgttggaggaaaaaagaggtcggcagcaacacgagaagccatttcccagcgaggcagggccagcagggtggaaaaaggatggcgaacgacggtaggacaagttcctagcctctctcgagtgcagtggccagacaagcagagaacgagagagaggggggaaacaccgaaatacacgcgaccaccggacagagaagaacttcaggtggacaagaaaaaaccggcgaaacgcgtgctttcctcttctccgtcctctgtgcgaaaatatggttgtgatgcgtcgcagcccgcttctcccgacacagctgaagcgcaagtctggagacgaaaagtccttccaaatgcatgcagctggctttctatccatctttggttcagggcgccttcagacgccgaacgaaaggagtgcgacgagacagagaagacgtttttcgttaacgcgcgactcaaggctatccaatgtcaagacacccggatctgcgacttctttgcactcaaaagtccaccgtcttgtttcgcttcctccggctgcgactgccattgctctgtcatcacgcctcggctgactcgcgtgcgcctccggtcgacggttcatcagcctcttctccgtcgtctgccttttgtttgcttttcatgagtggatcgatcgagagcgcatcctcttctcgctgacgcccggccttcttgaactcagggaaccggcgctaaccggagacgcccccgttgtcggtcggaattcgcggagcatcgacgcagacaacagagatcgatccacgcttcctcagcgtccgacgtccccgcaggtgcctgtttgctcgatctgagctgtaccactacggtcacaaaacaccgtcgaataaattgtcgcgcgagtcaacgccagcga

SEQ ID NO: 2312 - DNA, 2326 bp, Toxoplasma gondii
  source 1..2326: mol_type = genomic DNA
tttgcgctgtagactctcagaagccagggcgtgaacttgtttctgatgggcggaatgttgaggacaacaggtcagataatgttgggagctctaattctcggatggtatcaggacctccatggtggctcattactcccttaatattgagcaaaagttatttaggaacgatagctcaccgtcagatgtaatatatgagctgggttaagaacgtgttggggcagtttgttccctgcctatcaattaacattgtgtaaacatatacaacagaactacaatatgtgggaaacgaagcagcaatctgcatcattgaacaactctctcctcacttgctgatttgtaaaagaggattcaaatctctgtgagctttctaaaggacaccacggacgactggcgtgtgcgcaacgctttcaggaggtgaactaatcagttcgcaggagtccttgaatttctcttcgtcgatagcacatttgttgcaccggcaccattcagcggtaatttcttgctatggcgtcggaagataccggaagcgtgcctgtccctgtgtcctactactggtgttaaagagtctggcgagtgattatattcacatgtgagcctgtctaccactatctctagccttctgtctgcctccctgcttttccatccttttctgcgactccaaatgaaccgaagaaaaattctacttcccccctattcgcatctatcattccataagtcgtactcatgtccgtgtatgagtaggtgtccacctcttttgtatttttacccatccactttttcgaaagcaaatggggagtagatgcagggtccaactcgaatcggtcacgtcggtagatggcagccgccctgatcgatcctccattctctggaacatcagtgcttctgacatccgaaacatgccacccctgggttcgcgtgttggggtaaatcgagtccgggcaatcctcccgaatgagcgtctgcaaacctccacatatttatatgttgtctatgcatgtgcgtgccagtatgtacttctgtatacaaacggcagtctcgctgttaattcaagaccgttgacatcagacagaaattggctatggtgctgcccacagaagaccgtgcagcattactccaccgttggatagcgtctagttttctctctacgcccggatcttcagacttttgcgtgaagaggaatcatgtcggcacagaactgtaggagcatgactacctcatcactgtggtttcaatgcttagcgacatacttttacggcgagcagagcgtgttgtccaaacttcggtcccatcatcaactaccagaagctcgccgccttctcaaatccggcgttcgataccttgtcttttttgaacggataaaggacagagagattcccgagaatggcagaatactctgctttgctactgggtcctaccggccactcccgcttggacggcagtgtgtttcatcgactcttcgaaacgttgccgccgcctcgctcttcgtgtctcccacagacaatccggttttgttctttagttgccatgtcctccgtcaaaagccggcagcaaaatcatgaaggtcgtaggcagaccgtgtatgcaaccatgacaatactagtagacattgtctctgtacaaatggttcgcgagtcagaactgtagaacgcagatcgaatacagagggacattagagtgcccagatactgaatatcgttccagctgtttccagctcaggctccgccagatgatctattgacaagaaaagtatcctatattccagctgcgaggccagcatgtgacgcgcacgcaacgtcgacagtgaattcctcacaagttctcgattctagaagaattcactggggttcccggagcagatacgctagaagacgcatctctggcgttatgtttcgcgacggacggcaacagtccgaaagatacgaggaaaacgtaacgcgtgtctgcggtcacgagtgccggtttgtggtccgacagaccgcgtcaagggcgaatgaaaaactcgaactacgcagtcgcccgttggtagaccttctgcactgcacagaaacctctatatctgcatgatttctgtttcttgtgtttgcagaaaagatccgtgcatttatccatggatgtcgagagaaacagcaggggaagtgcgatcgctgactgagaagccgagagaggaatgagagggaaaggcgtcatgacaaacaaactgtcgggaagagtggaaaagaatcgattggcgaaggcacacccgtctctatgtttgcgggttttagagcatcttttccggggattctttcgcggcaatgctggcctcccccccgtcggttagcctgca

SEQ ID NO: 2313 - DNA, 2024 bp, Toxoplasma gondii
  source 1..2024: mol_type = genomic DNA
acgtgtttcttcagttagatgatgcggcgctaccctggtttatcggagggtaatctgagaatgtggttgacgttgtgattccacacacatgcctcaacgccgcaacttcccaagaacgctcagagaaagcagtatacctttatacacattgtcttttgtttgtggagagacttttgagcgcacttttgataccggagcgaatgttgagggactacacacctctattcggtaatgcggtcctcccctagtacttgcgacaggctttgtgaacttctcaagagatggatatcacgttcgctacggcagctaattcgcacggatgcataccgctgtcagccactattggagaggcagtgagacttctggcctggagtgaatgcgctgtatgctgcaaagtgatttgagttacggtgtgtaaccatagggtggtgtggcgctgcataggccaagtgtcttcactggcaagacccttcgccgtctaaaattatctcaactggcacactgtgaagaatctcgaaacacctgaggtacactcgagaactcgctgtgcaaggggatcggctaaacttttgatctttccatttacgtccccagcaccccgttttggaactccaggagttgaaaagagttacttttagatgactgaagaatgacctagcgcttcacttcttccaaaataacatttggttctgtgctctgtggtacacatgagactcgtgcaccgttcacaatcccgcaagccatccccagccagcctttgagccttacaaggcgacgcgtcttaaaacggtcccaaatcgaatggcgcacatctttgaggcattacccgccaaccgtcacagagcctttggcccaatcagatttgcacaaacgaggtcatgcatttttgaggatactaagagtggtgtttctttgcgtcagcgaacacataggcaagatgagtggctgcacacctatcgtccgacgaaggcatttcttcttcgaaagcactcctcattcgtaaacacaggtcaaactgagcccactttctgttttcgtgagtcgtaactctgcagaagaagagtgaccccgtcgggacctggtgatcttaatcccccgcggccaccaatattgtgaacatatgaactgaatgagtggtgtcctgcaacaaactccaagaggtgggaacattgataagccgaaagaccacatgttgatgtaggaggtgacacactgacatatacccggtgagtaaaatcagtaccccgaacggctgtatcgtacgctgcaggactgtcagcattgtcaagtccccgaatgacgtaaggccagtcgactagagctgtaccccgacgccacccgtcgctttacgttttagggttcgcttcaggatgtacgattcagtgagtttctcattctctcccatggacaccgcttatggttggtgcttcgggcaagccgtcgtcgagtcacgcacggcaatttgttggctaccagcgaggacgtaacacaatacgacaatacaaccgtactccaccggtcgtgtcccatcaactaaccagcaatgctcgtactgctgtaacgggctgcctgtctgcacggtgtcggggtcgggcacataagtgacgctaacccggctgccccccctccccagtggccggtttaggcggctcaccacatcaggccgcgaaatagtggctagtgacaaggaatggcatatgacgccataacatctcttctaattctgtaaaagcactcctttccagtggtggctgtctgctgaaaacagcgacagctgctgacctgcgagatttccgaggtctgatcggattgagagcatcgttcattgttgcctcgtgcaaaggagagtctctcggtgacctgggtttcgcagtctgtctaagccgggcttggattcaaagaaacggttctagtccacgtgcaaccgcatagttgtcggcccacttagacttgtcacaaacaggcctccgaatctgttggtgccgcgactgagttttaccgattcggctattgccgtgcagcaa

SEQ ID NO: 2314 - DNA, 1860 bp, Toxoplasma gondii
  source 1..1860: mol_type = genomic DNA
ttttaccaagcctcagtgtactcgagaagtgacagcaagtctgaacgactcgaatcggagctgcaagcgtcattccatgaagagggaaatatgtatatatatgtatatatatacatgctcatgtggttgtctggggagtgtgcggcttagggaaggcagagtaaactctcctaagtaaaagaggctggaagactcgtggactttttgcgtttcttcgttgcccctcgtctgcgtactgctgtatcgcgactaagtaacttggccacgttaccgtctatctcgcaggcgacccgagaactttctgacagtagactacccgaacaaggaagggtttgtttccgaccctttttcctcagcaagaaacagagaatcagccgaacgtttgtgctcacagataagacaaatgcgtttcattggatcccggcgaagataccggttctgagttgagattttcggtacagaccctgatccaattaccctcaccttcgatgaagggaaatgccacttgacgcgaacagtagtttctcgtttatgtttcttgtattctgtctgaaactgtaagaggagagctgttaatgatatggtggcaccgtgcctagtatgtccaaaacagtatcgtgagaagaatctgacacgcgggttgaccccagaggacccgaactcgatcactatcgtccccgatccctacatcgctggccaacagtgtgagccacaaccgcctggctcttgaaagcgaacgtcccaaattagtgacaagccacgacaaatttctaaaacaccctctctgtagcaactccagtgtggcaccccgtaccccttcggggattccgcactcgtgatctgagaaacatgcttacgtggaaaccactcacaaaagctgacacacgcacattcctctcggcgccaaacgcgtctacccattctttccagctggctacggccaaaactcctggtaggagaaatcgctactaggcaattgctggtgcgcggctctaacgcaacactactgtcaaacgcataaaacgccgaacaacagcgtggaaaccaaaacatgatgtgcatttcgaatggcagaaatgctgtctcgagaactctagcaccttcgcactcgtgccgcggcaaaaacgccagaaacgagatttctgtacaggcctactcagcgcctttctctgtcgacccgttctgctgagcgtgtcgtcttagtgcctccgcggaaagtgcaaacagctaaatttccgctttgggtgtccatacaccgcgcggctgcagttgtttgctaagaaaaatagcaaggtgcatcatagtttcatctgtctttgcaactgcctattcggtgcacccacgcggacgaccaccgtaatatgcaggtgtcttccgtggttttgtccggggttcgtcctggacgggggtgacggctaaaagaccccgtttcgcggtgaagccgcgatccaaccggcgaatcgtgaggaaaaaaatgcaccgtttttccagtcggccagaaacaagagcggcttggtttctcggtgcgatcacgccccacctccagtgggttttgccggggcatgcgttttggtggcggtggtgggaggaactagccagaaaacaggaggaactagccaggacgggggtgtggaggaaacgggttacgacgacgtgttcccctacggtgtcgcttgcagcgcgctgcgccaaggtggggaagacgcgattggtcggtcgacacaccctccactacaatcgttcttctggatttctgcccattttacgcaaagcaagaccgacctgtgcttttttgcacgcacgcgtgttttcgcatttcagagtctctggagagagtgtttcctccgtgtgtcgacaaaa

SEQ ID NO: 2315 - DNA, 1157 bp, Toxoplasma gondii
  source 1..1157: mol_type = genomic DNA
tatacttgcattcatctgtgatcctgtaactccaatgaggagcggtggaagtgcagttttccatagggttttccatagacgttccagtcccattcgttatctccacacacccaaacacgcacgcacacatgaaaatatctatgaactgcagaattagaaacgcgtggaaacatctatacacgtgagagttgagttatggacatgtgtctgggagtcttacggttggagtcacttggcggcaaggcccacaccaggaggcagagaactggaccaccttcactgaacagtcttcttcagagtcggtcactttctggaaatcttccgccttcttcacgcgctgaaaacagaccgagaccagaacaaagaatctgcatcctcttcgtcgccagagtgtccaactatgtgcttccaaaataatgcagagatactacatatgtgcgcaccaccggaaaatgcgtatacatatgcataccttgtattcgtataaatgtctccttcctcgtgtgtgtatcacagtgaatgatgcttctggtgtttgaggggtgtgttacaactcgagcgctcgacgaagactcgcaacaacgcggaaggctctgaagagacacatatttagacttgcttctcaaaagttcatcggtccaacgcattgcttttcctatgcatgcatgcacctgaatcaactcgttcaagacttacgttgacgatcgttcgaacttggaaatctccgcagaagcggttccggatgtcggcggtcgccgtttgtcgctgcaggatgccagtagcccccaaagaaaacctctgtctccatgagaagagagaggacgcagagaaagaggagaaggaattgacggaagaaaaaaaacgcgaacgaggagccagcagagtggctgcgccgcgccgaagtgccaacatagtggtctccgagtaccggtctgaggaggcggagtcaaaaaaaggcggcccaggcacacaaaattcacgtccagccggcgaaaaaaaagcaggaaatgaaagggaagcagcaattggtaagagggaattgacccagtttgaagccgtttcgccggctgacttcgcgcgttgttgggcgcgaaaagctgaacgcggcattcgttcgctgctacgggaatgagcaaagcgggtcgacagcagcgcga

SEQ ID NO: 2316 - DNA, 734 bp, Toxoplasma gondii
  source 1..734: mol_type = genomic DNA
gtgaggcaaaggtagaccaagcgtagacaaatttggagaagaaacgcattttcagtctcatcctcaaatgcctgttttcaactcgttcctgttcacacacaaaaaggtttctttgtttcgagaaatcaatctcccccggcctcacacggtgcgcatctggtgattgctccagcatgctcttgacatcagtttaccgacggtggcagccggtcgtttttcggaaagcagcagcgctacaaaaagagagttccacattcctctgtggcttggaaagccgaggtttctccttccgccttcacgaatcgagtaaaaaaagagcactggcaagtcggggaagcgtcggcagactctctgccagcaggctcggtgggagagaacgcaaaacgagctccttcgacagacctgagcggcgttttccgccaaattacgcggagtcaagcaactccatccagcagcggcgatctgctttcttgtcactgcttgctcgtcgacaggtcctgtctgaagctatcgacagtatgttgaatacgcgagcgttaattcaagaattcatgacttttgaaacggaggtggtggatgctagaggatttgcgtgcaccgcatgatctgcctagttacttcaagtagtgctattccaaaagcaatacaagtcttatctgatagaggagtcataatcgaataccgatgctactcgccttatgcgttgcatcttctgcatttcctgcttctctcga

SEQ ID NO: 2317 - DNA, 1991 bp, Toxoplasma gondii
  source 1..1991: mol_type = genomic DNA
ggacctcatgtcgacgtaacaagacagaagaactggaccatctttcgggtgtacgtacgttgccttacagccagaagggaaatccttccacacctaccaacagtcccggaaagaggtcccgctcgacagcgggtgccgagaccacagtgactgcgtgggattcatgcagcatcccgcacctaaaaacgaaaagcggcagtggaaaggacgagttgtagcagttgaacaatttctatcagaatgatctcgatagacgctttcgaccccttcagggggctcctctgtacatgacactcgtggtatctttcattgtaagtcacgggtcccccacttttgaaagtgacgttctcaaggcgaccattcgtgggtttgacgtgttacagtgcattcttttcgttgaaaactttcagtcttctgttgggggctacacagcagaaatgtgtgtccagcgcttgatcgctactgggactttctccccctcagtctgttttcctaggaacctctgtttcctgcgtctccccgtgaacactccgaaccagcaatagaagccgcaaccgttcacgagataccttcgctactttagtagctattcggcagtatgcaacccgtgcccactcccctccccccccgtttcactgaacatcatccatatcgatcctactgtttacttaggcggctttgtgcttgagttgagacgtatgaagaaatttaccgttgtcgttctgcccgcttcacggctcctatctacgtgtagaaacgtagcggttgcgatacctacagacagagtctttcgtcgcgagtagaaccaggtcgtactgcgtaagtagaaaccctcaaaaacggacatgcaacgcggatggttggttgtcgtggccgctgaggccccagcccgcctccccacggctgtatcggtatctggtgtacaaaaaactgttaccaaatcaggtggctccctttccacggttctgaggagcaaggctgcctccggtctacgcactgtggcctgcctgaaaactagatagcgggaactgacgcacgaacttccacataccgtacgcatggcatcgacacttgttgcacgggggcagatcagatgaggataattgtatgagttctcgacactgacgctgcagaagccgacagttcctaggctaccacaaaaaagtcaatatcccacgctcaagacattgacgccaaacgggcgaagcaggaggtcgtcttcgcctgaaatggcaacctacatggcggaacgacgcacggtacgtgcgtctccaccagaccaacgatccataatttcttcatggaccatctacagcacaatatacctctccattctctcccagatgtccagggcgtcaaccagcatcgctagtcctcctgactgttggaaacaaccgtcactagtactcctgactgttggcaataactgtatcttttactcatgactgttaccaaagagcgtcgcgtgtcgcgcaagcgttcaggttgtccactttttccagaggtttctcgtgtctacgccggtgcgtgtacaaattaccccacgcacagccctgaccctgcatgcgggatgagtatgtcctcgtctcctgctttcctgtctactcagacgttgttgatgtgctgaaacgaactcgctgtgccacctgcgagatgctgcgaaggtgttgcacggattaataggcgaacgaccccacccctatctgagctggcgtcatcagcttctcgtcgcagaaggcatgtggggaggcgccatcgccaaattcggttgccgctccggcagcggtgcttgcggacgagggcgcgcatccatgatgcagcaccccgtcccgctccgctcttgttctccccaccagtcggaggcagggggggggtgggatggagacgcttgaactgaaaacaatcttttgtgttttgggcttatttttcctggttgccgttggccttgtgaatttttttgttttccgttgtttgagttccgtccgccaaaa

SEQ ID NO: 2318 - DNA, 2283 bp, Toxoplasma gondii
  source 1..2283: mol_type = genomic DNA
ccacttgtctcttccgcgcatccctatagccctcccagagacaggggtggcgccgccaccggcccgccgacgctgtcggttgcctgacttacagaggagtgtttccgacgaaaactttgcctgaaaaggagggaaaacagagaactcaggaggcggtgaaggactgtctctttcactctaggacacggccactctccgtggaagcacgtctcacgttttgtctctcgcgcccttcccggcctcgcagcgacccgttgctcccgtcccgtgtctccacctcgccagcgccctccgtccgcctcctcccgatcctctcggctgtgtctcctcgttcgccgctcgcctgtcccacaccctaaaaacctaggaatcgaactcgcagctgttctactataaacagattgtgcgcaatcctcagacacgacgagtcccagggcgacggttccggccacactagcatctgaggagatgttcaggtacgctctccccttgcacccgcgcaacttgcactccgcgctctgcttcgtccctctgaccgcacaacgcgcgttccagaaacgcaagaggccaagatcctcgcctgaaccccccgaacgcgaatgcgacatacgttcatcaattgggtcggagtcgtttcccttctctccagaaatcgtgagcgagtcttcgtcgtcgcggcgtgtctcctcgaggtcttctgcagtctcctcgccctcgttctcgcctacgtcctcctctcggccttcctgacgccctccttcgccatcatcgcgagcttcggcatcttcgtctctggaggcggcagatccctcgtctggagcctctggcctgccttccttttcagactcccagccgtagcaagcgtcccgctcctctcgctcgtggtccacgtcgctttcctcggggtctccttcatctcgcttgctcgccactctctcagaggcctggagataaggcgagtcgtcttctccatcgtactcaactggaaaagacgccgcatgcaactcccgctctcggctcacgctccgactctgcgcgacaacgagtcggccccctctctgctcaccagcctctccccacccttcgtctctctctccctccatgtactcttcctcctccagcgaggttgtcgccatcgcagacggagacgcttgcactgcgcccgagagagcgagagcggaagcgagcgaaggagaggaggaaaaaatgaaaaaagagagcgagagacggacacgaggcaggcgcacaacacagagaggcaaagaagaggcgaggtgctcggagggagggggggggtgacggtatagaaaagtcagagattgggaatagatgcggaattcgtacacgagagaatcggaaaggagctgagaaacaagcgaggagaaaaggcgcgtgaaaggagaagcgagagggtggcgggggggaagtgtcggagtaggacgaaaggtggacagaaaaagcggtctgaaaggtttccctcactgcccgatcttagggcggggaaaacagacagagggcgggaaagcaccaccggggaccagatgtatgaagaggaaaacaggcgggagaagattcaggcgtaaaacgtcaccttcccttgagatgaaaaatcctaaaaccgcgagttgagggcgaaattcgtcagttggaggggaccacacggagcgaaaagcccgcgtcgcgcacaagtaaaaaagagaaacgggaaaaaatgccacaacagcggctctgctcgtaaaaaagtagaaaagggaaatgttgactgcctaccttttcactgcgtgttgtcgactcgccctctcggtttttggccgggaaggaaaggactccgacgaaaggcgagggacgagaagattgagcgtgtgatgcattgaacaaagaagaggaaacgggaaagttgcccttgaaaagcagattatttcgacgtgcaacttcgtggaaacagcgagaggcagagagtggggtacgagggatcgccgctcctcttcgtctccccgccacacatggaaccgatgctgcgacgagttcagaaggaacttttctttcctgggccgcggagtaaaggccaccacgccgtggcttgcagaaaaagccggcagacagcttttctttcgatgtcgcatgaaggcaacataaaaaataaggagaaacggcgcctagcgcacacgcgacgaagagggtggtcagacacacacccagagacaaacagcaagggcccctgcactcctgcgcacaaagatacagaaaaggacaccgttctcgtggctaatctgttgcgtccga

SEQ ID NO: 2319 - DNA, 2031 bp, Toxoplasma gondii
  source 1..2031: mol_type = genomic DNA
cggtgttaggcaattccgccaaaaaccggtggtttgttagtatttttgtcatcaacatgtcactgaaatatcaataacgatgaaacttatttgactaccataacagcatagaagatatagattttagtacctgtaggaatagcagtcataattgtcatagctgagaagtatgctcgtgtatctacttctagacagacagtcatcatgtgatgtgcccataccagagaacgggttgcgtgtgttaaactccaactcgtcactgacgtaaagaaccccgtgtaaagtatggcaaagaactcgcatgttctcgacttcgccctctggacgagcgacaggggtatatctattggacgtaaacaacaagactgaacatccctttcctttgaaatacagtctccgtgtttgctttgtggaagctgtagtcatcaacagtgttggttgtatattggtataagcagagagccagtcccgtagaatgtctaagatagtactcattggccattctcccaaccccgttttctcgcttttgctgtgcgtagcaagacctcccgtggcagcaggtggagtgcgacggtatgtcagcgcgatattgtcactcgtaagcgtgtttgaatgctggaaaatagtgaaggaaaaccgtcagacaagctcacaagcttcgtagcgcagagtcaccacgtcagacacgtgctcagtcgttgtcagtaagcagaagcgagcattcttcgcagttgttcacttctcagggagatcttcccagctgcggattttccaacggcataaaaaagcattccaatgatggttgggacagtctggttcgatgctgcgaccgcgcgccgaaatactgtgacaacatgcgttttccgcgcatgcagccaagagatgctgtggtaggtcttggcagggaaacaactttgcgctagtgacgcctttgagaacgactagcagaaaaacacccatgtgctgagcctttggtgttgcgagcttgttggcgagtttcatttgcgaagaggctcgtgccgtttcgctttttcttcagcggaaagagtcgccttgttcctccttgcgccacttatcttgcacagtcttgctacgctgtacctcagagccaagctgagtgtcgggtattacactcgacagatgagtccaaggggctccgaagacagcctttcgctgcagaagcagaaaaaatgtttctttcgttggcggcgaaacagccagtgttttctaaggaggcagtgcgcgcttcttttttcgccgtctcttcgctctggaagcgctcgtgtctcatgccgcttcccctaactttctgactgcattgtctccaccttcatttttcttctccgcatccggtgaaatggttcttctgaaacggacatcgacgcatgcgttgtgcatacgctttgtgtctctgtgccggcagaaaggttggctctggcgacctcagctgccgcagcaagtcccagctgcgttcggctccgtgtgactgttgtaccagttcctctgtaaattcctctcttccttggctctctgtacttaaccgggaaccagaacgcttcatttcccccggccgttagcctctgtgcacatttcgtttgcggcgctgaccttttctaagccgtcacctcagcttcttcgcaggcccatgcagagctgttccgagaaattgctgcgtgttcttcccaaaccggcaacatgtatcgcttcttacttcctgtacacacatacgagcagatgcgcatttctaccgttcatcagttgtgaggtgcgacggcgcgctgggggacgcctgtataggcacaggctgtagcggttccctgaccgtatctgagttttctaggcgcccttctctcattgtttcttttcctgtaacgcctcgcgttcggcattcgcaacaaactcgcacgcggagaaggcgagaagatctgctgcgtctccaaaagtagaaacggatcaggcggtgtacatgcaactgcagagagtgctgagtcttcgtcggcaggcttcgggaaagggagaaaagcgaaacca

SEQ ID NO: 2320 - DNA, 2050 bp, Toxoplasma gondii
  source 1..2050: mol_type = genomic DNA
aataaaaacgcaactctacgccagggcacatgtacacatcgctacatgtaaatatatgtataaatatgtatatatatatatgaatatatttatatgtatatatatgtatgtgcatgtgagtgtatctgtgcgtgcgcgtatgtgtagagtgtctgcacatcttggagttgtgggagactgcagctgtgtgagggttcgggaacggcggcgtctttgtgaaacgcgttctcttcgtttctgctgtgtttcgctgaagagacgagagagtgttgtccaactgagagctcgcgcgctccagggtccgttcggcttatattcggatgagacaggcgttcccaaagagaacacctagccccctcgagcgacgcagggagaaaccggcgaagcgtgtggagagagcctttgcgtgttcgagtgccgcagggtcgttaacgcgtttctgttagagaggccccagctctcctgcgtttgcgaatggtgtcttctcagtcttgacagacatttgcttgaacactcatgcgaggcgaaactcacgcgttcctgtatccagaaagagatcttcgctggaggtgcgcggccgtacccggcgacgctgagtcacatcggcgacaaacgaagcgcacaaatacggcaccatcttctctttcctctgtctctcccgttctctcacgaactcttcttctctgtcttctcagctagtccggaggagcgcttgacgcaactccatggcccagacaccagcacaacacaaggtcgctcagacagagctcgttgcagagaggagctcccgtgtgtcaacgtggagttgtcgtcgtgactctgctggactggcccactgcttctctcggggatctaaaccagtagtccacctcgtagtatatactcccgtgaaaaagggagtttctataaacttaggaatctcattttataatgtgtaacagggagtgaactgaccacggcgcatgcaaacgctcggagagacgtgagcctccacagcactcgttcctcggagagatctcctggtcgcgactgtcgaccctctcggtctcgctcgacagattgctctttctccctctttctgcacatgtccttctcctttccttcagcgaacaaggaaagacagagggagaaactcgagaggaaggtcactggcaggcaggaagggagcatgcagagcgaaagaaaacggagagaagacagaaaaaacgagacggacgagaaaagacgaaggaagagacagagaacacgcagagactcagaaggacaccaaaggggagagcgagaagaagaggagagaaacgcgacaaagagaaaaatgagagaaataaacgacatgtgataaagccattttttcggagtgcgaagagtagaagtgtgcatgtctcgtggcaaaaagcgtgttgcccgactgcccagctgttttccctcaggagattttttgtattcgtccgcgtttctttaaacgaaaaacgcagtcgttcccctctctcaagcgaggttcttcctcctggaaacgtatcctttctctgcatgcatttgccttgggtttcttgcgaaaaaaagcgccacagaatgtgagtgtgagagagagacagcgagctgggaatacatcgaactggcgcacgagcgcctgagaacctacccaagcgtcgctgtgcgtttacactccttttccggttcccccgagtgacttcttttatttcttcatccgcgtttctcactgtaaagaaccgacaccgcgcgcgtgtatgcagcgatgaatcaaaggatccagaccatctccggtgtctctcttgtctcctctaccttcttcccttctccctcgtatcttctgcttctttcgccttccctcgctcctccctttcctctgtcttctctctcctctctctccccgctcttcgttcttttctcgctctcctcgctttccttgtcttcttctctttccttgtcttcttctctttcctcgttttcttctctgggcggtcggttcctggtttgcctgtcgcgtaacgcgctgaagatgcagaactgacctgcgcggaagagaaga

SEQ ID NO: 2321 - DNA, 2411 bp, Toxoplasma gondii
  source 1..2411: mol_type = genomic DNA
ttgagtgcccaggagtgatacaggctttgtgtgtgtggtcatgcgtcaggcgcccacgactggttgatggatctgtggaattatgtgtacttgcatttttcagtgcaagcatgttcatttagggatctcttcgtgtctgaacgtatgcgggaatgatacttgtactcgtgtggtgagatcatggctttgtccgacttagctggtccccgttttgacgcgactaaagaaatgaagcaagccgcgagggaatttggaagccgacggggagaattcgggtgatggcctgtcactgcttcgcgggcattatttatagcctttttattgaggagcgtcaagctcgccgtatcgtatactcacttgaaaagttctacaaatagtcttgtggcgacgacgaatgtgcctaccggacgatagataacccactgtacgacttgaacttcaggcggcatgtgcactccgcttacaacaagtgattgtccaaaaacgatataagcctagtgactagatggaaatcaatcatagcggtcgaagctcgcactttggtttaccccggcgattgttgtgttcgtgcgggagcgaactagaacgttttggcatctgtttaggactccggccgagacgccgttcacgcagtaaccgctggaagatgccattcaggatgtgtgttttgtcatctgctactcaagtgccacgcaacagaaagacctacgagtcgctgcctcgttttgtcgcggaaacgaatgatcgatgggagccgcaaagcgccagcagccgaccacacccttgctccactgacagtgtacgtggcataacaaacttcaaagaatcggtctggacaatccgatttttgcagagaaaatgagcagggaactgaatacgtcaaagaaaaggttaacctctgttctaatttctcggggtacacacacaggtagcgaataccaataagataacgactgaggctagacttcatttgcttgctatagccactgtcttcttcggatatgctgttatgatgatctgttcaattgttgaagctgggagaaagaatagtgccgcgaattacgacgcatgaactaccactcgagtggcacctcgacaaaacagacgcccttttaacgacggcgtttgctgcatgcgtttgcgagattcgaggcaagtaccaaagtatacttctcgtctgccgggggccattaaactcgagacggcactttccagtttgtgccacagatgcacggctgctcccggcaggagggtcacgcagtcatcgcatagctgatgtttatcgatgtttcagtgttattcaccttcaccgtgtgttctttatgtagagttgctttctacaaattgaacacggggtcgaggatgattgcttcgcatcacctggtcgccaaagggtctcccgacatgactcttaaataaccacatacacagtaccagcggtagaggtaaaactgtagaatagtcgagtattccgacatctctcaagatcttcagcgcctgtctcgcttacgcggaatgaaggatgtggttgccgctagacaatgtaggtcagactgcttcccggtagcggctaggagaagccggctccgagatgaaagtgcagtttgcgggagtttcaggaataatttgaagaaaagattacttcaccacacggtgtttttgtccaacaggaatcctggcgttctggtttcttgtgctctgaaaacaaatgcacccggtaccttgtccttatcctctctatttcggatcgctccccgatgcatccgatatccacacgtccagagcgagttacgcgaaacggcacggataggggtccggtaatgacaaccttaccgagatgcgattctccgaagtcgtacttggacatttttgcgaagttatagctgtgggctcatgagtgtctctcagaaactagctgagtgcttgcacggctcccccctcccctccccacttcattgcccattaaggtatgtagcatttcccgtgctccacagtattgcagccctctgtttgtaccgcgtgttaatggtatttttcctaaagtggaggaaaagcaggtgagcaagaggcctcctcaattgattcccacaggcgtcgtgcagaaatgaaagagcacccagcccccttgctttttcatcggcctctcacacgggtgtttgggtgggcggcgatcgatgtcgcgagacacgacgcggggtaccactgcccggaacgctgggctctatgtggagcgttgtggaagcctagcagctctgctcagtcgatcaaaccatgttgggaacgcattctttccctattttctgaagaggagacgcatcttagtgtctgacgcgtctgtgagcagagtcgttgcctgccctccccgtcagggtactcgacggaatggcgccggatctgctggattttctcaa

SEQ ID NO: 2322 - DNA, 4425 bp, Toxoplasma gondii
  source 1..4425: mol_type = genomic DNA
ctgctcgagcatgttcgtcctcagcttttcctgaagacgcacctaccctcgccgtctccattgtcctccgcgatcccctgctctcgcaaggagacgacacagtgcaggggtcggtgttgttgccttgttgtttgccgcaagattctggacagggggaacagggggggccagtcttctcaggagacggcgagcacatcgttgcctcgagcgagactcgcggctccgcgccctgctggtgcggcagcgactcttcagaggtctccgagccaggcagcttgccgcctgaggcgagggaagaaagcgaagcagaggatacagaagaagagggaagggaagaagacggagacacggaagaaaaacatacagaagagaaaggagaggaagaggaaggagaggaagaggaaggagagagagcagcgggaagagacgattggtccgtgatggtcgtcatggagagaaacaaaaggtcaggattccgtggaagtgaggaggggagatggcgcggcgagtttgtcgcctgatgcagaaaaatcaacaagatgcgcagagaacgacaaggaagcagaatatggccaagacaaaggggcggctggagagtgaaggcgaagttagaggaatgaagggaaacacagagacgactgcaggcgttgacagtggccggtgaaggaaggtgggctctgggaaagaaacggggcgagaagcatatgaagagcagagaccagagacgatgaggaacacctggagccgaaaaaacgtcgcatggaagtccgtgaagtgacaatatgcaagcacggtcttcgtgtagctggtgtgcgtgcagcgcaccgaaaacaacgcctaagagagagtggaagacgaagcgaaaaggttcgcgtcacctcttgaaaagacttccgagtccccgatctcgactggcgcagagaaagacacgatgggcggcggttgcctggcttcctctaactctgcaacggcactggaggatgtcgactctcgcacttactagcgcactgtccctcgttttggagagcgggtcgtcgagcatgtgcggtgaggatccacacagaaagttgcccaggccgacggcgtttgaatttcaagtttttgagaaactgaggaaagccgttccctgcaacgtgtaaaactgccctcgtctctgtcgcgggtgcctcacacgcgagcggtacaccgggagcgtcgcgtagtctgcgaaacggtgtgtctggctctccgtggagatagcagaaactcccggaaagatggcggaaaagagacagagaaacgccgaagaatgaggaggaaaagaaaccgctgccggacaagggaagagcgagcgcgccttttcgcacacggacgacacccctacgtgcaactttcgcgaggcgccccgtcggcggagaccggagacatgaaagcaaacaacgaggcttctgcaacagagaaagagtttttctacaggtgttagggcaagaaaagagagacgcagaaatcaagcgtggagaagacggtggaagctcaccggaagaaagtgaagcagacgaacgtcgagcagctgccctcgacactgagaatttgaggtgtacatacacccagtgagtggtcgctcgatctgcaagttcctttctggcggctttcccgcgagtgtcaacacatttgtgaaaagttcgtgctttcgctttctgaaacgccgctcctgctcacatctttcttcctcgtcggtgctgcattccagccgccgtctcctcgagaccagcaagcgcgtgtctcgaccctacgccgcttgtttgatatcggcggccgcgtcgtaccacgcgacgcgggctcccgcggaagtcgcctcgccgcaaatgccgtcctatttgacggtggaaatcgagtcagaggccacttcgtaactcattcgcagggtattgcagaaaacgcgagtcagctgacagatatgttgcggtttcttagcgatacacgggctgacgtattccgtcatcgctggagccgctgaacccgcgttggtcaccggggttgctcctcgctgtaattttcacttcatgccgcagagtccactgctttcctactggcaaaagtcctctagtttgctgcgttactgtgaatggtcgtcggtactacacgcgttaccaaggaactggaggcgcacgccgttcggagtggtaactcctgttgtgagcaggttccgcgctgattgtgtggcgcgacacagcgtttaaggttttcccgtccccataaagaagtcaccctttgctgtgaatacgtggaccagaaagagagacgagcgcgtctgtgcatgtcttcggggtcagggccctgtcgcggagcatcctcggcaggagagaagcgtgcagtcggcggcagctgtcttttcggggattttggggacatgacaaagagactttcttttcggttaaagcctgagagaacacctttcgtaaatgtggctactgctgtcttcactgtaagtggtgtcacacgagctgtctcgcatttcacactggctccagagagtcgttgcttttcagcaggaagagtctgccagcacggggagccgggtaacaccgtgtccgtgcaggatattctttttcgtgaagctaaagcttcggtttaagcgaaagtagaagccgccgcatccggacctcgccaaaaaacgcaaagcccagagggttttttctcttcccttgaaagtgtgtatttacacgcaaatccagtagaatcatcacgaatccacccgctgctgtacgttacaagacgttttttgcagaacagttccccgccgttcgtcttgattgaagatcgaccagggcatttccctcgacaaaggagtcattgtggaatgcagccttccccacaaaacatactctctacatataagacgcgggaaattcagatgtcgggactcgtctttttcgaatgcgagactctggtaggaagattgcagggtgtacgacacgagtcgttcttgcagggaaatggtttctgggagttgaggctttggcgctgctgctagagtagcgtagttggctcagaggcttttcgtgagactttcctttgtatttttttgcctgccttcttgatctgcaatgaaaacagcagacactgatgaagcagctaaccacatgcgcgcaggtggatcctccaacagacttcaaggaagcccgttgttgactagtccatatgctagagtaatcatctttcgctccccacgaaaactcatagtatcgtgacggacacacactcctacgaagggaaacggcaaagttccacttggtcaccacgaggatgacacatgcagggaaggcggaggagtcgcagaaactgaagtcgcccctcctttttcagtgcccgcctcgccattttcacaactctccatcatcgatacagccagggtctgcgagcatgtttgccgcgcgaatcagatacaatggtcacagcgtttcctaattgtgtaaacgtgtgttattttctatcaccggcatcctcgacagcgttttgtgagctcttcagcgacgatccgtgggtgtctgacgaaccccgcctcgcatctacgatcacaacttcgatgactgatgttccatcgatgtctgtcgagtacaagaactctgcaacttactgagggaagccgcgttccgattgtgaatagccggtgaaaaacgtacaaaccaccccggccgaaaaaagtttgacagctgctcgacacagaagcttttctccctaaacaggtattcgggtaagcaagtcttttctactcgagttgttcacgcgcagtacatattcactgtcgcctttaaaattttttaaatggaagggcaagagtgtgcagacgctttaggttccaacagcgcactctcacgcgttttttacatgcgacaaagttgactccgaagggaggctctccaaccgtcccgtttccagggagactggcatccgccgccctgtgttggtggcacctttccagctggggcctccagccctcaccgggaatttactggaacggtttggaacggaaagcgcacgtggaactgaaaagaaaattcgtctgctttcctttcagcgtttttcgtggatctttccatcgtttcgctggatcggcttatattcgagtaaaaacgcgagtccggcacagtcgcgctcggccccccacagtgtctgacttctcgcgtttttccccacctctccttgtcgctcttttccccccgcgcgtggctgcggcctttctctgtcgctgtccctttgctttgctggtttttctgcggctcgaatcccctgacattctctccttttttcagtccggactttcccgcttttcgccgaggcaggttccgcccccggcgccgtccttcccttccctgagaccgtacttttcgcgcttttctcgcgcgtttcgcgcttccctcgcgcccgcaaaactcctcgtcacca

SEQ ID NO: 2323 - DNA, 1175 bp, Toxoplasma gondii
  source 1..1175: mol_type = genomic DNA
ggatgcgcagtagggtaatctctcgacgagttcacttcgaaaaagattcacagaaaaaggcttgcatccgctgctccccccttgtcgtgccacgaaatggaactgcgactgccagtataacggggctcccttttcccgttcccgttcgtcactcgtcatattttgccacacctgcgattgcgtgctgtccttctctttgtctttctctgtgactctttcatttgctcctcctcgcttgacacaacgtattgacccctatatgtataattaggtaaatgtgtgtgtgtgtgtgtcaacctcacgacatggcctttcacaggcggcaaactgtagaacaccagcagacggataggcaatcttcaagtgtgtaggaaccgaagggatttcatgttgtgtgtcacgttacccagatacaggagacttgcttggtttcggtgatcggcgcacacctctacctgaagtcgaaatgcaagaagtgcattcgtgtgcaggaaatacgcactttctatagaaccgcgtggctccaagcaagatagggcatccacggctcgaacctccaggaacaaatccagcaggactcgttgtatctgacttggcttttgtaacgtcacacatatcgccggcagtgttcgttgttaaccaaggcgagacacctttcggtaaccgcggcctcagcaacgctgtacgatgactttctgtggaacaggaatgtggacctgttgagtagaggctgacggattggctgccaacagtcgcacagcatcgcgctcttttcccatctgcccccctgtgcgaatgtttttttcttatgcccctctccactagccaccaattttgtgggaaccatcagtccgataaaaagacgtctttcaaacggatcaggatcgttgccctaatcagaccctcttgttagcaaacacgagcgttttcgacgatgggacgtaagcggcgctcactggaagtatttgtttttgggtggttgtggccagaattaaataccgagttttgattctggtcagcgactttttcccatttctgccaactcaaacatgtagctgctccagtttctgctattccgtgtgcatcgccgtgtcgggaatctcgtgcgtgtgtgtcgtaacctgaaacataacgtcctccgtcatttgcatgccccgctcccccatttggcacaa

SEQ ID NO: 2324 - DNA, 2026 bp, Toxoplasma gondii
  source 1..2026: mol_type = genomic DNA
cagggctcccgccgtttccctcgaagagcgtttgtttccatttgtctccatcagcctcctgggcgccgagggagactgctgctctctgctcactgtgcgcaggagagagcgctgcattccgcgcggcgcccgcgagactcgagagaactgggaagatgcgcgcagtcgatgtgtgtcgatgtgcatcgccgccagacacaggccgcgacacagccgagtcgaacagggggagttgaatgccgaaaggcaacgacgcagttgaaggcgagggcggagaagacccagaatttggcgacagcggggcagggagactcgccattgtgtctgacggccgcaggtccaggatgcagaggaaggagaaaagcagagtcagaaccgcactccagggagatggaaggcgggaaggggatgagcggtcttctcttcagaagatgctgagctcagaggagacagactgcgttggtcacagcagaagaaaggagaagccgcgagcggaacggcaagcccggcgactgctgaagagttcgaccccgacagaagggcggcctatattcgggcagatgggaaggaaagacaccgactggaaacaggcacgagacgcctcagggacctgttacggacgtggaaagtgagaggtcggaagagagaggggggagagagggtgagagagacggagggctagaggggtaaaggagaaggacgcagaaagaaggaagagagacagaaaaggtcgaggacgggaagcaaagaagagaagacgaggaaggaaacgacgtgcggacgccgactttcgaggtaaacaacgctctcacaggtactcgaagagagagggatcgcggggagtcgcgagaccgcaactcgaaggggagagaagggaggagagggaacaaggaaggacagaggcattacatgaggaatgcagtcgccagggaggcttctcgacttacaaaaggagcgacgcaaacgggactcaagataagagcaacgcaagtcagctgtctgccagcatcgacagcaaccgtttcagagggcacagggagtctgagctgtttcgggatacagaaggagtgaaagccgcggcagagaagacggggaaagggtgaggcagaggtatgaaaagccttcagcgcattacgaagaaatcggcgatgtgtaggtttcgatgcgaagtcacgaggtgcatacacattgcatcggcttctcatctgggagaggcagccggccgcagcttgattcccggcgcaagaaaaccacagacgaaacgcggcagtctgtaatccgttggagaggaaagtgtgtgtttgagggaatgaaaagattaggaaagtgctgcaaaagccgaggccctctcaatgccaagaaaaggcgaccatttcttatcggcactttctctcaaagttgcagctcaccgagcgcggtaactggtggcgcgctcccgctacaacactccccgtccagatacggcgtttttctccgtccgtcttttctttgctttttgttcacgacacgtggttcgtttctgcttctagcggtcaacacgcggaaaaagtttacccgtgaacttctctttccggttctttgaaatgcgcggtgcgctcaagccggtcagctttgcgttcttggcttcttgcgagtcgtagacgccgagaaaaaggtccttaccgtgtttccttttccccttacccgctggcgtaaacgaagcgacggagttgctgcgttttcaatccggacgcactggctttcgtagttgtcggattccctttctttttgtcctttcttcgcttgttctgagcccgcgtggttaagtcagcgccctgaacccggtctctctgcgttcagtctcacccgaggagtgtcctattttgtggccgcggattggtttctgagtcagagaaatagccgacaaattgaccccgtgcacaacttcgactctcgcagatcccttggtttttctgccgtgactttgttcgatgcacggaccactcccggtttcctccccctttcctaaccccgtctttcgctccga

SEQ ID NO: 2325 - DNA, 3818 bp, Toxoplasma gondii
  source 1..3818: mol_type = genomic DNA
gtacgagaagcgaatcaatcgactcgacgaaccgatcgacatttacggagcgtggatcgatgcatgtgtgacggcgaacacgcaggcggctgagcaggcacagaagaaaatggggtcgaccctagagggggaagaaagtgtgttggagagcggcgttcctgtgccgtctaggaagccacgcgcttcgagagaggagagacccggcgtcgacagtggagacgacctggagttcagacggagtccagaagcctccgctgacgaagaaggcgaggcaagtgaagaggacgttccgcgaaactccgaggaaaaacgcactggaggtgctcggctgaagcgcctgcgaaaaagagaagaaagcagcgaggacgaggggagcgaccatgtcagtggcagggacactgacaatgctggtcaggaagacgccttgcgggttctgaagactctgcgggagcaacagagaaatgaagaagacgctggaagtggtcgcgatgaagctctttttgaagatgacgagtgacgatgcgtctgagcactgtgtgtcttacaaacgccacgctatcaagttcctctttcgtttgttcaggctgatggaacaagttaaaatgtgcgcggaaaagtctgcctcctgcacatacggaacgaagtactatcttggatgcatagatcgacagccagcgccagcccgtgtgcgtcggcgcgtggtacacactgtttttgagagcgaggcgagaaagggtgacacaagtctctacggggtagaaaaacgggaagcacgcagtgatttcgtggcttctgtccaaacggagtaccacgcagagcgacttttggatatgtctcgtacatctgcacatcgttccaacactcgctgagaaactacctcttgtcggaagcgtctccacacagctacccttacctcagcttttaccatcgataacggtaacgaacagcggaatctgcgagtttgagttaaaccacgctgtctcgtgcgtgagggcaggtgtaatgtcgggatgaaagtcttgagtcgcggacaaaaccacagacacacgacaaaaagtcgaaagctgctctgacacggaatgttcaaatcaactagactcaggtggaaaacggcttcagacaagacgctttgactatggagtcacggagggttatgttggtggggaaaacaatttctgaaactctctggcgaccaagaagcctcacgattcaacacagttcggccagcatcgactttttcgtaggcaatggtcttctcgaggcaaagtccggaggacgcgcttcaggtactggggatgtcaacggggaaacaaactgtcacacttcggcgccgaaattgttttgactacggcagtagtgtcttgaaacaccttgtgaagctgctgtttctgctccgcgtgagcagccgctgctttcctttccgggagaaacggcaaacttgtcgatacaagcaccctttctgttatttctcattgagttctgacacgcgagtgaagtcgtcaaaaagtctcatgtggctgaatgcggcagagatcgaaagggccatcaaaacagatagggacttcgtcggacgcgtgatctgtccccatcaaaacatattctgtttaccgatcttcaacatcaccttcaaaacagctcagcagaccatggttccgcgggagtgcaggttgacacggagcagtcaaactgaactgcagtttttcactacatacctctgaggtcttctgtgtactttacagcaaaatattgctttctcatattgtaggaactgcaagactgcattgccgcagatggtttcttgcacaggggggcgctgtcagcgttagagtcacccgctgccacgagcccgccctaaaggcagcaagtaaggcgtcaccagtacaacttaggcttttcaacggataaagttctacatttctttcgcctttgcacacatttgcaatctcaacatggaatatcactgcagcagttgtttataagacgcgcaggcaactggcaagcacacattcagttctgctttcacctgcattctcagccttgtagctcctcaacgaagttgctacgtattactgtgaacggttggtcatctaggtagtctacagtttatacggtaacaggtagcacggccactttcaccaattgccatacctaatgtttgtttcacgcggtatacgcaagacaacgcactgactcttgaatcacaggctttatcctggcaaagtgtaaagaactctcccaccgccaagttagatgaacactacccactccgttgcgtctggcatgcactgggattcaagtattattcctttctctttttcggacggttgttcaaagtccacaatttgccaagaagcgtcttttatggactcgaaatctgtcttctctgccgctgcattgctgctgagttccacaccgcctgtcatggcgcgatcagcctcccgccgtctcatcggcttgcagcatttcgggcagatgcgcggacagatcatttcttggttcagcagatcggatctagcccctggagatgtcttgcggatagtgctgtttaagcaactgccggtttgagaaatggcgcagccaactccacgtccgtcactgtttctctcctccaacagcacaaatatgccgcttcgcgaggatagcattttcttggagcctcttgggaagccagaaaccttgctaaagaagctggcggtcgcaaccaggcgacagaggagagctcccgctagataagacatcttgcgcagtacaagatcaatcgagctcgcaggaatctgcctggacaagatatacagaaaagggatgcaggccgcgccggccaaccctgtcaggaaaaacctggatataagctcttgccaatgccggatgatctagactacgaccgtcagaagaaatctagtgacggcactagacgaaaagttagagttcgctccttgccgctagctgaggtcgacggaactcgtcaagctgcccagatcaagacacaccccccaacggtcgcctcactcacctccctttccccgcatgtaagcgacggctgttccctgctctctgtctagaaccacatgccagaccatcacgcttgtgtgttgctgactcacaatctgacaaaaacagcgatttatacattccttccacgctgcatgaaaaaatttgagaggccctctgcgccttcttgtgctgtctggccgattcttaaggacaacaaagctcgttcttgaggcgagtggtggctgacagccaggagaattctagacggcctgttacggacctttgtttctcattcgcatcggcacgcttatctggatcaacatgtgcactagcgtgttgctaggacttttaagcagtttccgggggcgcttcttgtgttgaagatcgaagagttgtgtatagtgcggttgcgatcttgctcgcgtttctacgaacatgctgtagctgtggccgagacactactgagaattgcttcaacatacctgggcaacatgtctacattgaacaattccactgccgaatatgggccgcagcggtaaagaaccaccagtgcctcgttgtgtcgccagtacgatggggaaacaagctttcgttgatcggtaagagtcctagctgtcgacctaaacactcgcgttttttgattcctgtgatatagtgcgtgaacgtgtttaaccagtctactgagatacaacgtcatctctgaaattcgcactgcaacccatggtgtctgtgtgtgaagcaactcagataaacaatcgacagaggaactgaggccgtgattcgatgcttgccgcgacgcagttcgtcgggatgaaacaaacactgta

SEQ ID NO: 2326 - DNA, 1854 bp, Toxoplasma gondii
  source 1..1854: mol_type = genomic DNA
ggagcagttaacgggtcctcacagcaaccgcgatcagttctgttctatcggtgcacgactgagtaggagctttccgtcgctgctatacggcgtctcatgcattcctcaatacctggaattgccatttgtcaaggtctttgttcacggtgatcccagtcctgattgtagcgaaacagcgagagcggctgaacttcctcctttttcatttccggaccttccagatctcaacaagtggtgcaacgggcaggctctcttccgcaaaaaggggtgcttgcagaaaccaaggaatcccactgtagagagcgcaaaaaacagagagtccgttaggcagctgagagggaggatgcaagcgatgtgcgaagaagacgtcgtcagagtaaaacacgcacaagtgcgtgggcatttcataaactgtaaatgtgccatctttggcgtttgcttgctaatatttcacagcgttgctttcttgcatgcggttttttcgtctgacaaaacacctcgcactgccgcgtggtggtctccaacggctgaggtgtgtttttctgaattttttctcgagctgatgaaacaaagctgcgatacgggttcacgattctgctcttcgaaacagtgacactttcgcggctcaactcagctgcattccctcagtgctatgtatatatagaagtacataaatatttatatatgtaaatagaaatatgcagatgtgaatacgcgcatatgcgggtatatacagaaataaaattatatttaaatatatgtatatatatatatgtatatatttgtgtttatcggtaggcagatcaaaggtatgtttctctgtttgctgtaggaggcccgtggtttcgtgttgcttgagtgcttctctgcttccgtcgggagaagagttgccgcagggacgagaaaggcttcccaggcaacaaaagagatgttgacacaccatgagtcagttgttggcaaactcttccgcaaacgaagatcctcgcgcttttgcatgcagtccttcgttgtgtctcctcctggttgcagttctttttttccccgttccagctctctccgagttcttcctgttcgttctcttcgtccttctgtttcgaagtctcgttcttctgctccccattttccccccaacacaacccgcgaggaacagtcgccttagttgcgccttcattttccagcaggggtccgaccgggaaaagaagcagcatctagccatggagcgtgaaggcgcctggagctctacctcgcgtaaaaactttgatgtgtctcggaaaaaacgtcttttcgaatttaggtcaaaaacgtgaagtccgtctcctggttctcgtccaccgtcccttttttctccgggggaagaaatccacactgccctcgcacctgtggcttttctcggggctgcatgcgccggagacaagcggtgtgcgtgtctgctgcttgtcgccttccacgcgtttggaccgttgcttcggcgtttctcgaaaaggactctccaagagagaacccacgacatcttttcttgctgccgtctcgccctcgtgtacgagccgccagaaggcatctttccttgcctttttgagcggttcattccctagattcgcgacaggacagccgtggagagcacggctagtctcctgtgcatttcgcggagcggaactgagcgtcctctgttgaatctgtgacctctgtcgtattggttaatggagcactcacacacagacgagtcagtgacaggcaggcggttcgtagcgccacttcacatcgtgccttcagggtatttccgcgcccaccgtctgtggagctaaagtaaaataccatctaaaaccgatggtcgattgcgacttccgctccgagcca

SEQ ID NO: 2327 - DNA, 1055 bp, Toxoplasma gondii
  source 1..1055: mol_type = genomic DNA
cagaaaaagactgtgcacaatcattcgtagacgcagaagaagtggaggagagaggtggagaagtgacagatgtttctgcgtctacgcgctctcggaatttctttttccactcgtcgctagccgggtcgagaatgtgactccattctggcttgacaacagatcgcagcaagttgtagagttcttgaagcgaaggtgaagacgcagcgacggccggagccgaaggtggcgccatcgtggaaaagaactgaaaacgacgaaagaccctcctcgtgcgttctctaaagcctgttgccctcgatgtcgaaaacaagcgattttttcagccgacattgattcgttcttccgtcaaacagcaacaactcctctctgagtagctcgaaggaggcgtgcaaaggaatatagcggcctgcaaagacggcccaaggagggttcccacgggaggaagatccaagtcgcttgtgcgctttttgttcgaatgaaagtcacgttacagcggaaggacacaccagtgacccgtctgggcgttttccatatatacatcatatattctatgtctttgttcgatttgagttagaaacgaatgtggacacacacgatgatcgcataggttgctcctgaatgaagtcttgaggcggaacgagctgctctccaaattgaagtcacgcggaagaaaaggggtggaaaagagtcttttcttcgcttttcccggtggactgcgagtcttcggaagggcgtcgttgactgacgacgaggctcctggcgtcgtgacggcgtcacgcggacgcagcgcagcggcagaactgaagcattgaaaggaacggaaagacctatcgagtccaacggggcaagaaaacggagaagaaaagggacggttccagttctttggacaaaaacgagacggggacgctcaaagttcgtgcgagaagcgccccgagagtcgaaaatcccatgacctccgccatgtgcctcaaccaaggcggtttggaaaaaattactagtacgggaaacgtttgaaggatgttcaaaggcgtttcggagggaaaggaggaagccga

SEQ ID NO: 2328 - DNA, 1964 bp, Toxoplasma gondii
  source 1..1964: mol_type = genomic DNA
ctgggttactaccggaaaagcgaactaggagcctcttcacaaagtgcctcctgatatctgcctgacaatctcggagaatggcacgagatgacagagggctgcttctttggcggtccagttcaaaaccgaccggcgaagcatatggttaaagttctttcgaagaagaggagaaatctgacgttggctgatttcgtgcggcaagaagccgggggtgcagaatgaaccatgaaaacccagagagacttcccacatacagagaggtacctaagaaagcaagtttccgctgaaattcctccctgtgatctcggcctgaagaagctcactcttttttctgtaccgtcgttgagttcatcaaagaaaactaccacacctgcgtcgacacagagaaaacatttgtgaagcaattcgccaatcccaaacccaccgaaacgtattttccgaagcagacgcagttccactctctttctccaagtatatacatgttcatatatacattgtaaacagatacaaaggtgactatgtgtgtatatacttatacttctccgtgtgcagcatttctaaaaactgaacgccgaagaactgcatggaagcagctcttcctttcgatttgcttttctccatcgtttctgcgactcgaggcacatgaatcgtgtgaccccgccgatgcaaaaggacgctgaagagcccctcgagaacgataagaaaagagacagaggtgtacaaagtgagaaaggaacggcaaagaacgaacaagaacaaagtaaagaaaacggacttcccagttttacatagaaactcgcgcaggcacagcgagcgacagcaagtgagtggtgcagctgactgaacacgaaaccggagggaacacttcaaacaagacagcactcctttagttcgtgaaggtccttgtttccctgtccccagtttcattatagtgttgctctttccattaagaggcgaccacccgacagagaaggaaacagaagaacattcttttcgtccaatgcagagcttcgaaccgaatccgggaacttttcctgggagcactgcttcctttgaattccgctacagtgcttcttccttgagcactgagacaagagcgcaggccgaagctgtgttagttatcgcatttcgttcgtagaacgtttgctcacaacaccggcgttgtcttcatagcgtgcatgctacggaaaagcagcggcatgcatcgtggacttttcaagtcgtgggtttttctcctctcgtcgtttcgtctgctttgcctttttcatcggctctccagagactcctttccatcacatttacttcctctggactgcggtttcctcgcctccggtgtggttcttttgaggtctgcggcagatccgtgcatgcggctttttttcttcggaacacccaggtgaaaagaaagcgggagaaatccagaggagacgctggaggcgacgtttccttccttctcctaaagtcggaaaccgagggaaagtttgaatgagaactccaacggttctcgttgttcggccacacagacatggcaacagatctggttatcctgtctccgtggcacaggcgacgcagcgaagatcgcagccacataaagtccctacgattccgtatatttacattcacgtatttatatagatttacagatgcctgtatctttactggactggaggaaaaccggggtggacaggagagacggaagagttccggcttccggacacagagaggtgtgacgcgaggaagacaagagcagctgcgctgagatccagagccctcggcctctacgtttcctcccttttttccgatgaagctctttttctctcgtcttttctttcattcccagcgtttgacaaggaggaggctcgctttccaccgagtctccaattcgcatttctgaaggacactcaggtagagagccttctgctcgtttcatgttcgtgactcgtgtgttgatcttcgtcacacca

SEQ ID NO: 2329 - DNA, 2172 bp, Toxoplasma gondii
  source 1..2172: mol_type = genomic DNA
ggttctgcgtcttggcgtactgccaaatgcactgcgtgacctgcggccgggacatgcgcagctctcccgcctcgtgccttttctccgaatatacggcgaagacgatttcccgcagaaggggcgacaggcgcacttcgcgaagcagcgtcgcgcgacccgcagcccgctgggcggcggtcggcctccggcgcctgcgcgaggccttcccctttcttctgcgtgtctttcgacgtcgcggcttcttcaccgccggtgggacatggaagtcaccttccttcttgcaggccgaggctcccgaacgcggtttcccaagctgctgcgccgcacgaactcgcgccaacgctgcctgcttgtctgcccgacatgtccacgccgtcgtcttggaagaagagccagatgaagagacagaggactgggggcaagatttgatgagcttcgtgagtggggtctcggacttggggcgggagaagagacaggaggagacggcaggtttcgtttcgctttttttcacaggtggaagagagtgggaggagctccgggtggcgctgcacgcctgccggccgccctctgctttcgggcgtctcttttcctccttcatttcgctcttttcgagcagtactgctctcttagctgcgagaaaagaggcagagagtgcgcatgggagaagaagagggtctcttgctggtcttgctggtcctcaggacagcggagagagacacagagaaggaaaatgcgtggtggctgatgtctacttcctgaactccgccccaatctttctcgttgaggtcgctcgacaaaggcctagggcactcatccaagtcttctctctcttctcagtgtctggcgtcggcgacagacagttccctcgccatgccgtctgcgccctgacagtgacgtttcttcttttctgtctcttctccccgtttccgcttcttctctccacacggggggcctcgccccctcggtgctcagccttcttctcctctccactggctcttctcctcctccacgtagcggctgtcctcttccgctcggcagcctcctcgcgcgccgccgtcgcttccgccgagccgcgctacagcggaggagtccgcgttcgacactgaaaagcaccagaaaacggtgtcctggctcgagtcaagggaatgaggaaactggaggaaagaggacgaagcgactccgagggctctcgttcctgagagtcgcccgcagaactcagaggcaggtgtgtatgtacacccgatctgccactccgagtggaagcgcgacccggcgagaagcaggagagctgttggacacagaaagcaaggagagaaactcacatagacaacacacatgtaaataaaagggtgcaatggagaggtcgctgaacaagatggaagaagcagagacagcttttccgaacgcgcgcgcgttgttgccggaacacagcgaacggctgcgtgtgactttcgcgtatttttgtctgcctcacttctgtgtcccgttcagctgctttctttttcattcggacttctcctttcacttcgactcgtttgcttctctttgctcgcttcttttctgcgctgcagtgcgtgtctttttcccgcctcgccggttttcgcgcgcagactcaccgcgccgtgcacgctgatgcgctcagatgtctcgtgaccgccttctccgctgtctctccccttcgtctctcggtgtgtctctctatctccgctgtctccttctttccaccctctcttttcagctgcccgtccccagagagagtctgtgcagcgcgagtcggtcgttctgtcgtctgcggaaggggcagggagagctgcgagcgcgcactcccagagacagggtgtctttcgactcggtcttcttcggtttttgagagacacaacggaaaccatccccattttttcgcattttcttatgcagcagctcttcacttctccgcctccgagttgcgtttccctgttgtcctccctcttctgcgagagagcgtcctccttttccagacgcgaattctcgagtccaaacctcgccacgactcggcttctgctctctgctcgcctttcgtttcctcggtctcgccttctctcttccactgccgctgcggatttcttctctccgtacttcctgtcgcgcgctcgacctgttctcgccctctgccgctgcgcttcttcgccagca

SEQ ID NO: 2330 - DNA, 4799 bp, Toxoplasma gondii
  source 1..4799: mol_type = genomic DNA
gcttcgactacggttgttaccagacgttaaaacgggcactcgcaacaccagcaggttggtatgccatcctctttcagtatcttcacacaccgcgacagcgtctgggcacgcgttgaagaaagtgcgatgccctttaacctcatcttacttgtcgtcgagcggctgagtccaccgacaaacagtttgcgcatctggagctccttgtccggttcttggggtggagagcgttgtccgtcggcgcctgcggcactggaggggtcatcggcatcagatgagggtggaggggagccgctgttttcctcctcattccgcgcgccttccctcgaatcggcgttttctccgaacgcatgcgcgacgtctccggcgtttgcgccgtccgcgggcgccgccgcaccctgctccagactctggtggttttgtccttgaagcatctgcattacttcgccagagttcggctgggcctgggcgacttcatcctcgacgaagggcagcggaatgccagagtcgtcttcgggcataccgacagcgccgttgttgtgtgagtcgaaagccattttggaaaggttgagcttgtggctcgcgacacagagcgccacgcggggggaggatgcagaacgaaagtgggatgtgcagcagagcgcggcgagtaactccgacccagacgggagacagcacaaacgccaagaacagattgcaagcgggtgagaggcggccgaaacggaacaaggacgggaacggggactgcggattcctgcagaaaaaaggaactcgtctacgtcgaagacgaaagggaagtcgaaaaaaagcggcgaaaggcaaagaaacgggggaaggtacgcgggagaatgacgaagctcgctgggacaaaacgggcgtggacgggaagatgctacgcaggctggagtggccgacaggctcttgtggaaacgtccacggcaattggaacaggagcacagaaaatggaaccgagaaaatttgaacggaagagttgccttcacaagactttgcaaaaaccaaaaaagttgggatcgacgagaaaagtgctacagagagtttctccccacgcacccggtacggtgttggagggaacgggaaacgctccctttgaagagcgaaaagacaccgcaaacgtcaaacgtgaatcggtaagggtctaaaagaaaaggacagaaaacacacagagagatctcccctttatggatatcagcacacgtgaccctacattactccagctgtagccttttccgaagtccaacagttcccctctctaggaggccgcgggttggcgtcctacggtccgagtcccgctcttccttttcgaacgcgacacccttcttcccatataagcctgtattttttttactacatagcccgtttctagaggcgcagcttggatccacgtttccattgacggcccaggttttcccatagacttgcaccgtgacgccgacgactttctgctcacactaatcaaggcgttccaccggcatattttttcagcagagatcgggcgggtcgctttgttggttgcttcgccacgtctcccgagacgcaagcagcagtttcccgtagagaacgtgtgagctggctgcgtggcaattcgccgaaatatggacgcgataaacgtgaagcaaaaaaaatggcggatgggagcagacgttacccctggctacgtggaaggggattaagtgtgatgtaaaagaaacaactgatttgaagggatccagagattcgcaggcgtctctgttaggcgcttccgtattcggtcgacgaacgcgacagctctgtgcaaggaacatcatcgtcgttacgcacttgaacacatactttgccaatgattgacgatcatactctgccgaacgtaagctgcgtgacaagtaggggctcgttcttctgcaggacccgtgttcgccgacagatgaggaaaggcttttcgagaagacaagctctatacgcctgccatagtatttacattacagaaattgagtgatgtgaaattggttcgacaccttgtactgtggaagcctagctcgtagttcgagggaatatgcatacattcgggtaccaccgattacacgacgctgcacgcctgctcgctaaacgtaaatgttgtcgacggcgtcaatcataagaacgacacgtgctagtgtggctggctgaaatcgtttagagcaaagtacgttttgaagagcgcagagggaaaccgagaccgaacagaagcactcgctttccaaggcagccctccactcgtggctagaatacagcggtcttgaaaatgacgctctgtcagagctgaccgattttattcacgtttggtacaaagcagtttagaagcatattggtgtagtccactgtcctcgcggagccacttccaagcacaggagagatcgcatgtcaacgctgccgttgcacgacccttcccctccccagatcgcagggcgttttacttcccaaaatagaaggctgatccttcaggaatctgccagaagtgtatgaaacagtctggtcgcctgacaagacgggattcaaatgagcgttcgtttgtcggggttgcatgactgaaggtgcacggggaaagcaggaaaggacgaagcttccccgcttatgtgatcttgattcttttctccataggagaaaattgtcacgacaggaagccgctaaaagtagaactcccttgtcgatgttgtcctctggcaagggttgcgtgctctgggggatctgcgtgtttacactgagttggcatccccgttcacaattcaagaatggattggagcgcgcgctgtgaaggattcgtccgcagtgttttgttctccgctttctcttcggaaattttttcgcaatgtatgcatggcatcacttgactctctagggcttttcaggtgccatggaagatactcgcgagttgctcatacgtaggcacaatagtccttcacatcgtctataacccttcgaatggtgttcatctctacctttcgggcaaatccaatatcatgtggctcactggtatccacctcccagagcagagtgaccatcgattctgaagcagtacccgtggctcttgcggaaagcgcgcagactgccgaggcagaaaagcagacgtcaccgcgtgcgcaccgttgctaaacaaagaccgccagattgttgtttcgcaccgccgactcccccgaaacttcctggcgttctacaaacttcaagctcttcaagcgagtgctgaacgttgaaacgagttataatatcaccctgacagaagcattaataagcgtggcacctccctggtcctgtggctcaataacggctgctcgaccggacaaatcaagaacaccccaaacattcgaccgttgtcaatccagagaaaggtacctggaatgtctcgtgctattctgaggcggcattgcttattgcaagcgacttcatgtttcatgcaatagcttccagtcgagctcgtgtgttcggctgtacagcgggccgcctgaatactcacagaacatgtgaacaatggcgcttcgacttcttccttctgcgcgaatcactggtaacgcaactaggttatgcttcaatgacgatgtctcacaccccagtgtcgatccccctctaatacgtagtttttgtaattctcggagcctctgccaccaaaaccgtccgtctgaatctagtgcccgcagcggcctaacacatgcctaaatgtgggaaagctaactggcacagccacaagcactacttcaatatttacagtaatgtttccttgataaaaagcaattccggcctgcaggggctctgagggggtcgactggttccccccagggatgacagaaaaattggtttccagccgtcatgttcattgcaaagccaaggactcgtctgattcacccgatgaaccaggactcacgaagtctttgtttagttgctgctgcaggtcaaggagaaagacactacacaaaccagcccttggatttacaatgacgtagaggtgaatgaaagttctctttcaccactcctagtgaggcgtcactgctacagagcaccacccattttgggggtctgatgtctgtcggcttaacatgaaatctgcttcatcaaccgggcggactctcaccagctgtgcagaagcatgccgctagcagtgccggaagtggcaatgttgtggccaggtaacaatcggaaagggcatcccatcaggacgtagtgtttcctttaaaacaatgcctttcacggggaaattctgacaaaggggatcaatggaaccactccgtgaaagacaacaggagtcttgccacttgccgtgcaagacacgacgggcgggaggccttcgtcagcaatagcatcccgagcttgtttcgcttgctgaaacttccttcgcccactcctgttcccttttcgctttgttgcttccgttattgcgtcatgttacgggaaggaaaaagagtgctatttcggcgcttgcctctcgaagctgtttttgtggtccgttctcgctgcatacattggggctcctcattcccatgtatcacgtattgccgtcgtggatcggaccgtgttttcatgtccttcttgactctcctcactctgcaaggccttgaatacagtatttcgaagttgttgctttgaatgggtatgcttctcgtacacgactagacttttctgacttgccagtctcgggctagctgccgtgacttttatgctcaggacggagtgccatgtcggctgcgattagcggaatttttgcgagagacggtatcaaccacatgcctagcagaaaacgcaagcaaaactgactacaacaggacaaaaggggaagataa

SEQ ID NO: 2331 - DNA, 2904 bp, Toxoplasma gondii
  source 1..2904: mol_type = genomic DNA
agaagctcgaagaacacagtgcgctctgactcaacgcacagagacgaagagagaggcagatgtcggtaaaatggctgagagaattcattctgaatgtgtgttttcttctgaagacaagggcataagaatcaaagaaaggcttttctagaagagctgaactgtaaggcccaccatattctgaattatctgtccaggggcatgcggtgcttgtaaaaactgcgggtggctgtatgcgcaaaagcagatgtcaacagttctaattggaaagaatgcgaaacaacagtcgaaatgagaagaagcaagtgtctgtcaagtccttgccgtctccgaaaacaccggttttattgcggggatgcgtcggtggagtgcgtgatttaaagtgaagagagacctaagcgatgtcccgtgatcgcaggtgggccgtatttagtttttttcgttttttcaatcagaagtgtcgtaggaagatcgtgtatcatcatcgtggtggaacgtccacattgaggcgacaacctctcgaatactgattcatctagaggtacggtcgttgtcttgttgaaatatcggcaaccttatctatccttcacgtactcagggtatgcaatatgccactcagatgactatgaagcgagactcactggtgcacataatagaatgagatctctcggtttctattgccgccttttctctgaggaacatacactacgaaatcgacgacgacaggcttagatcgtggacgtctttgtttgccgacaaaaagttcgactttgtttctcttggcgaccatatcaactgcacggagtgttctcgtctccacagagtatccaggagtctcgcgtacaccctcggtgcagaaacacaggttccggtccttttcgaccggtgcctacggggaaagcaaagcgacagacacttctcagtgtgtggggtcacaagcataaaactatatgtatatatatgttgtagatcttgttcgatgttgttttagaatgggtagagacaaacacacacgtggtggtctaaatgcgtaggtttttgagaagcacaggacggaagaacgaagagcggtagttgcacgaggcagggaagaagcgactgccactttctcggagcgccgcttaagcatgatttccacattcgttttgatctcttgttcctttcgacagtcactggatcagctggatcgctgcctcgtgtagacgctactctcagcggtgcctcgagctgcgtgtccgacgcgtaaataaccttttcagcttcctgggtcctccagtcaactcaccgtatcatgtttttctccgaagccggattctgtgtttccgtgacagcctttctgctgccttagccgcatatatatctccctctcctttcaacatctattgctgtttgttagaccccgtatctgactcagctggatgtggttttctgcagcggttcagcctcgagaggagctttccaccttcttttctccttagtcgggctcattgcggcttactcgacaaactgcatgtctcgaatctttcgaccatcgattgtttgtatcggttctgtggtcctgttgatgcgcatccgtccgtagcttcaaactcagttgttgacacattcctacgcgtgttgccgcgtaccgtctccaaacttctagtcagatccatctatttgcgttcatatgcctaattcaaagtccagttgcatgtgtgttgatgggtttcatctttaacaatctacgcatctcaatctgtgtgtctatatgcatactgtgaggtccagctccataaatacacctctgtgctgcgagatcatggtgactcacgaaggtaggcactgatgtgccgattcatggcggtacacattgctgtgacccaaaacctaggcgcgtgtacgtgaatatctggtttctgtgttggttgagtacgccccctgaaggggcgaaaggggaacgctgcgtgagaccgaagcgacactgatgggttgtgtcgcggaacgggacttcaactagatccggcgttctttgtggaacgcagctagaaagcttaactgctgctggaagtacgaaaccagcgacttgcctccgggcaggggaagcagatgaggagcaaacaaaacaagacacaccgtccatgttctgcacagttttgggtctgtgtaaaaatcccgttcgtgagttcagaatccgtgcggggaatgttctttgcggctggtgcgcgcgaacgcccgagacggctgatattcggagaagcggcctctctccccgtccaagttgaacctccccactcggctcgcccccctgtatcgttgtggagagataaatgcatgggaagcaaaagattgctttctccggtttttccacgcaatttcagctgtatagggaggtgtttaattccaagtttttcgggttttcctcgtccccacgggtcggcacggatttgcttcagactcgaagtgaaagatccggtccaccccaactcagtccgatagtcgtttgtttctttgtttttgttgccgccggggtttcttctttataaagaagaacacttcgccgtcgctgtttttgctctcttgtcggggatttcccgtgctgtcgctcggcgtcagccgttcgaacgcctttccccccacggagaaacggctgtcttcccactgtgagtttcgggtttgaaaacccgtttctaaaagacaaagcccctttctgctttcacgtgtggtgtttttcatttctttgctgccttggctcctttccgacgctcctttagattgagacctgagtcgtggtattgacttctctccctgttccacctgagattctctgttgaccatggcccagacgcctttctcgtgttagagaatttcgcgtctatcagacggacgaacaatcaggtttctctgagagtttccgcagtggcaaga

SEQ ID NO: 2332 - DNA, 2654 bp, Toxoplasma gondii
  source 1..2654: mol_type = genomic DNA
ctgcgctaaacagtccctgttgcaataccacacctgcagcactttgggctgcccctgatttctctttgtggaaagcacggagaagaacccgcacctctaatggcaagttgcaagtgacggggagtaattcttttcactttgagatccttgctggcgtttcccgccaactcgagaacttcggcggtgaggtactcgagaatagccgatgcgtagacagccgcagtcgagccgacacgacctgcgtgcacacaagccgcggaaaagccaccgaactctcactgagtgcacacaaatgagccaaaatgtcgagacaaaaaacacacacgatcttcgtgccccccttttcccgaagaactcgcactcccgcattccaggtaaaccgtttccggccaaccacaggaagtatcatgcgccatgcacgcacacacacacagacctacgagacaatctaggtaaatccggttgtccacacactacgccttgtgtctgacaaaagacgacaaaccaccagcttcagggcacggctcccacagtttttgcggaatcggtgggagcgactcgaagtttcagaaagcacacgaattttgcgtagtatgtgcagtcagaaaagactcctgctatatgacgatgaagacttaacagagactcgattccatcgagtttggcacgtagttcgaaacccccatcgactgccggctttcgaacctctcgtccgcgacgtggacaactcgacacaaacgccacaccttatcacaacgcttttgcgaaacaacacaggactgaagacctggaaacgcacgagaggacccggtaggcagagagagtgagacacgtggaagcaactctgttgttctgaccggtccacagggcacgcgagcagcggcacaggggagcctttttttttggcgtcttcagataaagacttccgaagaccccgtgcacacaaagacgcgtctttcgggcgattcgcgtccttaccttcagagctgatgcggctcttgagcatacggtgaacgcgtccgacggggaactgcaaaccggctctggcagcgcgagaaagaggagccttcttgcctttgccgcttccactctttcccttgcctccctttcccataccaccgacctttccacccacttttcctccaacctttccgcctactttgccagctccgtccattgtgagtgtgtgagaaagagaaagaactctcaagggtggcttctgccgagaggtcggctctgcacaaagacgccaggagtcgcacgaaagcgagtcgaattctaccgttccacacccgcgacgggggactggaaaacactgcgaaacttgcgcttttgaaaaacgaacttttaaagtgcagcacgcattcagaaaagttgtcgcagacctgtgccaccctccggagtgcgtcgcactatttcctgacacgcaacatcagtccgagccaccccagcggcgcccgtccttgtcctgtcccatccgcgtgtattctgcaaaaagggggtgtagtgccgcgcgccgagagaccgtgggtgctgtggctaggaaggcgaagcgaccgcgcctctcttcgacaccgaagcgccgtgctctcgcacaacatctccgtctgctgcaaaaacgctgccagtctttccacagaaaaacctcaaatcgcaaatctccacgccaacttcggcgcatttccgccaacagagtctgctgtgcagacagacgccctttcgtaggaccaccagctctttcaaccgtttaggtgcgccgccgctgtgcggtgctatatacagcttagacgcggcaacaggactgtgtcctattacggaccgacagagaaagagaatctctagctgttcttttaaatcaacgccataaactctcctctattatattacccaccaccgccgttctgcagtgggctcagagattcaacgaagacagtacgcacgcgtttagatagcgacgaactcgaggaaacacgaagtcgacctggtgcaccaagaagggacgcccggtgccaggcacgttagctaatcacatagtacagtaagatccgaccatgatcaccgtagggctacgcttttgccgcaaaaagaccaagtctacacggttaaattctcttgtacagtgacggtttggtgttgctgcgcggtatattcactagatacaacggttcgctgtagaaggtgtaaggctgggcacacctccaggagcaccccttctctctttgcgtttttgtggaaaccctcaagccacaacttggtgaaggcatttcattttcacactcgtctacaggctcactcgtctttccgcgtttggaaggccgtcgaagggcagagttccttacacacaagccaacacattcaggaaccttgggttctcccattccccgtatataagccgacatacctcggggctttttctcggaagccgagggccgaatggacttctttgtattttggcggtacgctgtgtctgcttgaatcgcatcttctgaggcagaacgcgaatgtgggcttcagcatgcgcgtgttttcgcagagggcgtgccattgtgcgatgagctccatttttcttgctctctgtgagtagtcctcggttttcttccgaactttccccactcttttgaggccgcgaaaactccgctttcttgctatcacaa

SEQ ID NO: 2333 - DNA, 1956 bp, Toxoplasma gondii
  source 1..1956: mol_type = genomic DNA
ggctgtttccttctcgccgtcagtttctccgtcacttcctctctgtctccttctccgctcgcctgtctccgcgtctctctgctgactggcgaggcggaaacgcgcttcttctcgctctcgctgcagctgagaaatccgcttttcctgaaattcaattttcgcgcgctgcagctgaattcgcgcatgcaggcgattcacgtcgctcggcagaggactcgaagccgacgtatcctcgcaaggcactctcgacgacctcaaaggagttgacgaagaagctgaagaagaggaagaggaagcgaaaggcgaagaagagactggagggaagcgctgagaagagaagtgagatatgcgaggttcctccttgttgtcatcatcgacgacgacggcgtcctcgaaggcctccattcccccaaagcataagacagagcggagggagacgaagagaagaagaggaacaagtggaagagactgtctctgagaagagtaagaaaagcggctccgttagaccagacgaaggcgaagacgcaagaggaaacgagacgcacgcataagcggaagagagcagcgtgagtcgaagtgaggcctttgatgtcgaaggagactcacagaaagatgagaaaaaagagggaaaaccaaggagagaagagagaagagaagaagacgcgccgagacgaacaggccgcaatggagaccgaggcgctgtcgctttttagcgtaggcaaagaggagacagaagacccggaggcgcggtaaacgagagaagggggacagagggggagagagtgatgaacggattcaaagtcgagggaggatcaaaagagggaggaaagaagagaagatggaagaatccgaaaggaggaggatgaaacgctttctcgaggtgtctgacgcttctctctgctgtgcgtctcgtctccttaaattcttcttctttctgacggatcggcggaaacgttcgtgcttcttcatttccagcggtccgagacggacaactggaagagtgggggcgctttgcagcgaattaaacaaagagaaaaatgtgaaaagaaaagaagcatgtacaagacacgactcgggtggaacgagacagagaaagaggagggcgttctcgctcggatgcccccccccccccaggtgtctctctctacccttcttcgtcgaattcgaaggcgagaagacgacggagttgaagattcgagtggacgcagaactcatcaactcgatgaggcggtcttctgcaaaaaaaaacgacggtcgacgctgttggacttcttctcctcgaagcggcgaaaaaattgagcttctgtgttcgctgtcgtccgcgtgtctcctcggactgcgcatgctctatataccccctgaaacgcaggcagaaaacaagaagaggcgagagactctaacatcacctttggcccgcaaaccgtcgtccatatttcttcattttttctcctttttttgtgtttttgcagactctgttcttccgggtctccctcgtctctccttcgtggtcacctctcgcgggagaccgtgtctccggctacaccacggaaaccgcacacaagagagactcgcggctctagctccgcaaacgccgacagagaatcctttgctcttgtcgctgttccttttcgcttccttgcacctattgtctcggctcttgtcgaccatggggagaagacgttaaacccaggaaaagaaacgagccacggagcgcgagcagctcgtcaagctcaagcgacgccgcagagcagacaaggaaaaagagaaagagagaaaggacagaggccagcacggttgacgtatttcccttcccctcgtttttccttctccccgcggttccgtctgcccggaacttctcttctctcccctgtttttcctctccacgctccattcaaacgacctttttagtcaccttctgacccccgtacacgtccccctctgctgtctctcctccga

SEQ ID NO: 2334 - DNA, 4588 bp, Toxoplasma gondii
  source 1..4588: mol_type = genomic DNA
tatttgttgacagcacctgctgcactggcgaactgcgcgaaggccttcgattttgcggcgacggcgactgctgcacctcctcgcgcgtctcggctgccggcgcagggtcccccgggaagcggcggatctgttcttccttcctccctccccctcgttgtccgccctgacctcgacgacgtctctcccgtctccgcatcccctggcgacccgcggcgcttcgcgaaacctcgagcctctctcgcgccgcggtcgccacagactgtggcctgcgcttgctcctcgacgaagagtcggagcgcgtcgacgcctcgttgcagagcgaagagagagacggcgcccgcgtccacaaggcgcgtgaacacctcaggagtttgagaacttgcgccggggccgtccagctctgaactcggcgaacgtcctctccgcatgcgcagctggggaggcgacgagcagcgggaggccgcgcgaggctcgcctccgtcgcgacgagcactcgcatggctgtctgccgccggctctgcgaccagggaggctccgcgccgccttagcatcgccaaatggtcctcccacagctccgcgttgcttgtgcagagcacgacatggacaggacgaggagagtcttcgtcgccgtcgtcctccgaggctcggcggttgacggccgcgccagccagaggcggaagctgcgctcgagcgcgtccccgggggtctccgcagacatgcaggaagagcacccgcagaaaacggtacgccccgatgtgaggtttgaccgtcgttttgagggcgtgcaggacgcgttgcaggaacggctgcgaagacgtttcctcacttgttggcagcgaacgtccaggagcagaaggcgaacgctcgtcactgctcggagaggcaactggcagaaccttcgtggtcgagaccgagtcgagaacgcgtccacagagggtctggacagagacgcccagtgcggcctcgcaaagcggcgacttggcggcttcggcggcagagaagagtctcggactggaagcctcggcgacgatgcgcgcgccaacctggagcagagaagagccggggacgagaagctgcgaagtctcctcggcaagaagcttcctgccgagcagaccctggaggaggcactgcagcaaacttccccagtcgaggacgagagcgtctgcctcgacgagaaggactgaggggagagagacgcgcttcgacgtcggcagcgcgccgaggcgcgaagcagcttccggaggccgaggcgacggtctcgacatggctccggacgcagctgaagacgacaggactgcttcgagttctttttgtccgctctggaagtgccgccgcacttgaatcctcgcggcttcttcttgcagtgtcgcaagccacagcagcgggagagagaacgggcgtcctttcgcgagcccacggacggaagagagagaaaaaagaactgccgacgcgcaggcgaaacagacgaaaggcgtcgacgagacgcagggcgcgacctgcaaaggaagcagaagaagaaggagaagaagaagaaggagaagaagaaggaaaagaagaagaaggagaagaagaagcagaagaagaaccagctgcggcggccgttcacgccgacggtggagcatcgacgaggagtcgaaaactgttcaacatccgcgaggcaggaaaactgcagaaacatgcaggtcgcattgcatctctgctgcagaactctcacagaaaagagccgaagaaaagaaacactaacagcaggcgtcgctgctgtagaccaaacttcttttctcgagtgcagacgtccgacgccctcaaaccgacaaggaaggtgcctttccgccgagaccagcagtccgagagacggtacccaagagagaaaaagctccttccacggaggaaaaaatttcttttgaacagtgacttctctatacgcgaaaaggagacagcttgtcgcgcggacgcgaccgggcatgctgtgacgaggcaaacgcccttctctgtccggtttttctccagggaaaacgtacgctttttcatttgtatttctattcgccgttgaattctcaagaaacaggagacagcagactcgcggagactcagatgtacaggcagacaaagaaattgcctctttgcagctcagaagcgcgtggactcttcgacttcgttgctcttttgaaatcatgtaatcccctgacacaccgaaaaggattttaaaaaaaccgcgcacaaccttattctcttgacgcttgcaaaaaagtgcagttcgttcctttttcgtctccctccttctgtctcctctttcacgctagcggcacgcgtctccagtcctgctgcatgcggctaaggcgtttcttcgtttgtctcttcccctcgcaggctacgttcgcgaggaaatcgggagcaccctgaaatctctgaacatgaatccaccaacgaaggtgccatgccttgactctccccggaaaaggcctccttttctcccctccgaatcgagacatatctgcatctgaattttaggtgaaaagtctcacggcgcacactctccagtgtcgctaccacgagccataaacgtgaaatctttgattgtccaccaggaacaataccatttgaaagtctttaattaagagggaaaggtaattatatagtcattgaaccgctggaggaagtttttctcggaacctagcacttgaaagtctttaattaagagggaaaggtaattatatagtctttgaaccgctggaggaagtctttctcggaacctatcatttgaaagtcttttattacgaggtaaacggaggtaaggagtccgctaaaggtcttggatgtatctggagaattgtggtttagatgctcctaaggaagaagagaaaggaccttgaaagcctttccaaactaacgcggtcttctgcgtcctagtgccatgagtgaactctttcgctctgatcctaaaagtacgtcgcgagctatagagatacaagagacaggacaagcatttctggattcacgtaaccgacgaagaccacaaataccccagcagcaactccgcaggacgagacgaggccgtctagaaaaaaaagcccgctagctctgttttttgcgacgatagcgacgcttgtgcaaggatgaaaaggaggcagtctcgagagaattaacgaaatatctggaattgctgagaagcgcccggtgcgtgtgagggcgtttgttcacgggctgtccgcgaaaacggcatcccgcgtactcgtcgaagggggttattacgaatcaaatttcaaaggtcggcagaactgcttttagtacactgcatttctgatcggtggttggcgcgaaatgccggacgtatccgaggtaaactctctttgtcttccccgtcctttctttctctgcgctcctctcccttctctctcgccttctctcgtttatcagagactcggcgcctggggagctgctgtgtgcagctctccgcaccgtagggaactctctgtcacccgtgtcttcgccaaacttgaaagagagggaacagtcgaacaacagagagaaactggggacgacgaacgccagcaatcaagaagactgtgcgacgctttcgcgagggccggcgaccggactccagggaggggaggcgatgtccgcggcgggcggagactcgaaactcggagaatttctgcggacgtccgcgaccgctgatggagttctttgcgagtcgattttctgcctataagctagattttttcgaagggagagaaagtgagaactagacacggtctttgtaagtgacaaaaatcatcttttctccacgacgaagcgccgggcgccacaccagcgccctggaaggagcagagcgacagtctttgcatgcagtgctcgactgcttgttgcagaccttcgggggtttcacctttgttctccaagactccattttgaccgattttctgctgaagcgtacacaacaacttcttgcacactcttggactctcgagagatgctttttccagcaattcttccccggcgagcgggtcggcttctcgcacatgcacagagagaaaaaagtctctgagcaacgcgcgactttctcgcgttttcctcggaagaagccacgaacgctttaaggcgttttccggcttcgtcctagcgttcaggcatccacccagtgaactctttctggtgttacgtcgccgctgcttcctcacctggtcgacgcgaacttctctgttccgcgaccggcgccgacggcggaggagacgcgtctcccgactggctctcttctttccaactgtgcttcgtggtctgttccgcagacgcttcgccgcgaagaggccgtttctccatggagtttacttattacacgcgtcaacggcatccggagactcaacgctgcccatcgccgtgaagcgaccttgcgtcgacggccgcacagctctgcgcagagatagaagaagagcaaacctgaggggatcgcggcactcaccactgcttgcgcgacggaagttcagccgccgtcacccgcgaaaccagacgctcgccgccagccgcactgaggctggggtgtacgtacacccccggcaaggcccgcgtcgctctccgggaacctgcggcagga

SEQ ID NO: 2335 - DNA, 2290 bp, Toxoplasma gondii
  source 1..2290: mol_type = genomic DNA
caacgcacggagttctgcatacacagactgtgcgacatctgtgaaagcaagagacacaacaccgaactctgcaggagtggacgcatggacgttcacggtcttcagcagggacaggttcttcgctttcatgtggacagtcggaaggcgatacacacttacgttcttgtcaaaaggtaaggcatcatcgcagtcacagtgcgaggagcctggtagtactggcggtaagcgacattcgacccaaagtgtcgagtcgccaccctgcagaaaaaaacaaggccccgaatcgctacacaaatacacccatgtaaatatgtttacatgcacaggtatacagatggaaacaaacagttctaaagacatccacctttatatagaggcacgcacagagatatccaggcctagtacatatataaattggaacagatagagtaattggtaggcgaagacgcaatttgccgcacgcagacggagtccaagaacagaccatgcacctaccactgcagcatagtgtgtgagacacaagaaaacactgaatcgaggtgggatgcgtacatcacagactctccgatggagagttgagcacgccagctccgccataatttccgtcactgccggacgcacaaaaaaccacgcccaacatcgcacgaagcctatcctcttcatgtgtctattctacaggccttcagggtggcaggactgccgggggagtccactcgtgaaaaaaaaaatcaagaaggcgaaagctcggagtatgacgggggttcgaggttgcttcggaaccgcactgtatcaggatgcagaatccacacgaaatccacggacggagagaccaacagtagagctcaaaaaaacatggatgtacacacaagcagctcaattgactcctttatgcgtgtgggtggctctgcgaacaaaagggatgtgtagaacaaaaatgagggaaacggcttcaacgcagcgcggcctcacaaaaggggctccgaagggcaactgcgcatccggaattccaggcacaaaatgtaggcggacgcgggtgcattcacttgcaaagcgagtggcaaacgttctgggaactgatactgaaaggttcctcgtcagatccgttcttcgcgctgttgctgcttcgctctgccccgtcactcgcgattacctgtaagcagtccggaaggtcccgaaccgcattttgtagcggacacaaccggaaagtggaaggaattacaactcagtccgaggtgagattttccgaaataacggcgggacaagctccccttttatctgttcacgagtgaacagagaatggagaaacggcgcgccgtttgtcagcgccggagtggggtatggctgcgggttttcggggctggaactctgtgtgggtgtgtggagggtcgactgtggctctgtcgctgtatacgagaagtcagcgcacactcgagacgcaataaaagggcagtgcatgctccagtcgagtgtgcacgatgtgtgggcatgcctctgattttttcttgttcaaatccgagcagaagagccgtggttttccgttagacatctagtgtacgtacagctggttcgcggcgcgattcaaaaatatcgcaccagagtcagtcgaggcattcattcttttgcagcggtgctaaggtgttcatgtgccgtcggacttgctctccactccactgccggagcttttccgaggacaagccgggactcagcacagtcgacatattttctgcggcgcaaaatcgctgcgaaaaaagggtgccgcgtctcgcgcgtcctcgcgattcaggcccttgagccacgcttccgttgcttcttcaccagcgaagtctcaacgtgtgcgggtttaagaactcacgcagatggtcgattcattattttaggcaaggcgatttttcaggactgcaagtacgtacggtgattcatcgaactttctgctgtatctatagactcgtgagggacttaaaaagccgccggtgagagcagagctggacaaatgaccagacagaggcggcggcacacgagggagttagcaagcgactgggcctgcgtccgcttgcgttttcacaaccgaacaactgtggggggcgacagggggttcggttctgtctcctgcgctggggtcgtcgtgggtctgcctgcggactttgtccggtaattcggtattttctgaagaacgcgattctctctcatcgtttggacccacaggatcgtgcagtccaacgtttctcggcatcgaatcatttgtacgaagcacggtccattggcgccgctttttttgtgacgggtcactcaa

SEQ ID NO: 2336 - DNA, 3638 bp, Toxoplasma gondii
  source 1..3638: mol_type = genomic DNA
acagctgtacactccggctaggcactcccagagccttcccaaaaacacccccagaagtttgccgccgcgcgacttgtcagattccgctgccgacgcctgaggctcgtcgaagccgaaagcgccgccatcgccctttggtcccaagctcgtggggccggaggtgcgaggccagagccgcgagagacgaaaaagtcccgagaggaactgccagaaggaaaaggtgaggaagcccgcgaacgaggcccaggtgccaccctctccaccagcgggagagtccgctcctgaagtcttcacctctttcaaaacgaagtgcgtcgagcggccctggccaccaccggacgggccttggggctgggaagctggcccttgacgggcctgttgccccctgccccgccgcatgctgcagaggcgggtcgcggggaggtctggtaaagaaggggaaggtgaagcatgtagggtgaaagcgggtgaagcaagtaaaggcgggtgaagaatggaggggaagagccggtgtaaggctgagggccgcacgcggggaaaacgccgtcgtcagcttcaacggtaagcaaagatggaacaccaatggagttaaggtgaacgcggccgcagaaaaaagccgtgtatgggggcggaaacttgcacggcaaggtcgaggcagggggtgtctatacggtggcgctgagcagccgtggaagcgaagtaggtgaggtttcgaccccacgatctagcgcggccaaaggctgcgccgtgtttctccgacctgcctgaaaagcaaaaacactacgcgacaagagagacgccggacaatcaagctccgaaagtagcgcgccgccttccctggtctcgctgcgacggacaacggagcgggctgagaggaacacgtgcatcgtcttaaggcctctgctccccgacgcagcggatggtgcaaccggttggaacagagcatctctgagccggttctttggaaaaaaagggaaattccccgcgtttagtcatgatttccgagaaagacaaccaaggacacgcgggcggtaacggcgcatgcagtctccagtggcctcgtccacggaagccgcccgcctcctaccgtcgtggcgcgtgatcctacctacgaaacgactgtcgaaaaaactctaggttgtcagttgctgcaacgaaagggcgagaaaaaactggacaagcggatggaccctaaaaaccggtggcgtgccgtgcgcactagctcaagttcagatctgcctctccgccgcaccgatgacactttccgggggccaggaagatggcaaacacgcggagaaccggaactgtgtgcgcttcgccgtacacgaagtgaggacgaaagttcatcatgacttgccagaacgaactttgctgagaaaaacattctttccaagcgcggttacccccacgcagtgggtgctgcaaccgaatgctgcctctcgcaaagatccgtcaccgtcgcgctgcgaaagcttcgcaacgggtgtccccagtcgaggcgcggtaactgaactcgagttcaaccggcaggtggctgcatgcgctttccatcgacgacaaccccgacagaagcgtgaaatccgtgaaaacgtcctccccagtatacgcatgcttgatacgggagaaagtttggttgggacggcacgctgcacaagacggaaacaccctcaaaacccgactaggcatcaccgcaaagccgccgaaaacgcgatgcgtggtttcggtctctggcggtcccagccctccagctgtcgttaaaacaaggaaacagcctcgattgacagtcgctgctatcggaatgaggtgattgccacaaacggaaagattcagcacggccgcagtggtgagacacctccgcgggcgggaaaagtgtaagaccgaacatgcccgctgaggcgaccaccaacaacgtgcctacctcaaccgcttctgggcacccaaagacggttgcatgacagcgaaccgtcaacacagagttacgtcagtgatttcacaggttgcgtgtgcttggagcatcactgttgctcgagtgtgcttgtcgcataactctatccatgcaaaaaggagacacacacgaatggcgtcccccgaaagtatctaagcctgtcgattttcgaaggatgcttgcagagtaccccaagaaaatagggcccctgacagtgtctgaaaagaagcgagaacgcgtccgaaaagtgcaaagcccgcggctgcgatcgaaagtggagtggactgtgtcagcagacaccaggtgatcaaatgcgggaacgaacatattaccaacgatgtggaggcgtccaaaccagaaactcgcgaccgatgggctgatacgtaaatcgtgaagtgaatgagatcatcagcgggcagaatcaagagagatcttttaatgcgtttcaagtgaacccgctcgcctaccggtagctccagctccagttacatcgcatattacataatagacgcacgaaatgatttgcaaatgacctctcagcgtcatgtcccagccctgtacctcacgctgttgtagcaacaatttcaagcacaaacacaaagcacagcgtgcatatttggctgttcgtggaggaatcggtcgacgaacacgaaaatcttaaacaaattttgatagcgacagcgaccaactcaaaaatgctctgaaacgattcgtgggaaaagcttcgatgagtctgagtggcaaaacgcagcaaccacaacgaggggctgtatgccccatattatcttctcatcttattcccagacaccattcacttgattgctgtgaacgtaccatgctgtgccatgtaacgcgtttgaacaaactggtccggacagggactcaaattactctctcgctaccatgagcaaacgagtgctcgtcaggttttgatgctatcgtttggatgccgaaaaacccgtgcagcctttgtttcttacgaaggatgaccgagaggggtcaagagaggaccggcagagcactgttgtgcccctgctcatccataaaaggcctaattttagcggaaaattcattcagcagcgatatccaagcccccggtacacgaactgacagacgggtgttgcaagcagagcagtgacacagctaggcagagcaccattggtgaccccgtaaccagcataacgatgtttaccgcggagtgttcgtttttctctcggggtggtcgttcgaagggtggattctgtcaggaggagcaagcgaacttgcagagttttcaacgcaaactttcgaccacgctgccacactgaggcatgcagggcctgtccgacgttcatcgcggcgatccgccgccgcacggatgcacatgcaaaagtcatcctgctccgctccacccgccttgggtccgcgtgcgtctgcttgcgcgtcgtcccatgtgcagttaaacgagacttcgatgccacaaaaaagcgtctccatgttactttttcgcgctccttactactcagggggaagcatcagaggaaacccgcttgaatcccaactcgcaaagtcgaggaaggtacttgactgttgtcagctgcacgcagctgtcctgccactgtgaccgtatgtgtatctgagtgtcagcactcggcacctacactctatcgcgacatttttcggtttttaccaagcccatttcagagagacacaa

SEQ ID NO: 2337 - DNA, 3379 bp, Toxoplasma gondii
  source 1..3379: mol_type = genomic DNA
cttgccaaggtttctgtcgagcaacaaggttgctcgtgacgatcagctgcttctggcgcaccgccacaggcttccccacgatcgacggatccaggagttcctcgacttgtgcgtagaaacagtccatgtccacatgtatgatgacccgcgagacgcacccgccacagccggacagtccacccgaagaacaactctcttcgccgcgttcgacgtagccgagacagggagaagcaggtgaagcagacgaacgagaagagggagaaaaggaaagagtagaggcggcagaagggggcgaagaagaagaggaagaagaggaagaagaaggggaagaagcggatgaaacaaggtggagaaaggcgcaacacgaaccggagcaacagcagagaggatcgccgaggcggcgagccgcgcctatcgaaggctgcgcgttgcggcttggtttttcttctgtgctcgcagaacagcccaagagaggaagagagacggacgaagaggtgatcggggcgtcggaagaagaaggccagagggaagctgacgaagcaggagactcatgagaagacaagaaatagtccttcgaagcaaaggatgaagtgcatggcgcgtcccggagatgcggcggatcgggcgaagaagaggactcatccagacagcaagttggcgaatgagagatcgaccctggcggggtagggcaactggtctcggactttggtggagaagaggagtctcccgcgaacggctgtctgctggcctcacgcattatttttgtgcggcaacatcagatgtctccgaggtgacatgctctcgcgtttttctcttttcactttgggtcttagtcgtgtgcttcgttctttttaaaccagttggagaagccaaacgtcaaatgcctagacgaagaaccgacacaccaacaatgaaaaagcgctgcaattccccgcctcactcactgttcgactttcgctcgcgttctcttcgttctcaactccctttttcctctccacgttctgcccccttcgtcttctgccgtgatgcgaaactaccgcggagtcaaagcgaaaaactgctgaggaaatagatcgagtttcgaagttccacacccaaaaaatgtaaaaacaaaatgcgctgagtacacttgcgtaatgcaacagtgaaatgaagctctcaaccacatacatgcgcgtatatgtctagctacacacacatacaaatatatatatatatatatgcgtaaatatgtatatgtatgtaatctctgtagaataaggggctggtagacagagagacgagatgtgcggtgttttttctctcgttgtcggcagctgtcgcttctttttaccagtgccctaacgtttggatctgaacgagatattgtacactttgttcctttaacgtgtctaaatcgtcgcgactgtgcagaagtcgtctctaaacttccacgttttcggcgtttgcgtgcggccgagtctttgtcttctttgcctcgtttcactgcacagagagacccgatgagaactagcgacatctggaggcctctcctcaaggtctctctctcttccctcatgcctgctttgttcggcgacgcaaactcgattcaggtgggctctctactccccacgaaaagctgggcaaagatcctgccagagatgattcatcagaccgctcgcgaattcaagactccttgacatgttcttctacaccattccttctcgcgtgaggagaatttcgactttttccgtctctctctccccctccccctgttgcgtctgtctctctctctccctcctactcaggctcttcttggcatcgcactttttctcttgcttcctacctcgagttgcccttttcttggtctcgcgatgtctctccacacacccgcatttgcgctctctcaccatgtcaattcatttctgatttactgtgaaaattagcacaacatccagaaccgtttaaatgcggaacacaaacaaccatttcatacaccccccgttttctgtccagctttctggaggcgattttgtgtgtgtgcagaaggcctttcttttcttgtcagggacctctgccttcgtcctcttcagatctctcgcgttccttcggaaattccatttctgctcatttttcaatccccccgacctcgtccggaaaccgacacagccttcatgttccgccgatgagcatgcaaggggcaaggcgggagcccccacgacggaaagagcagaatattgcgtttctgcagggcgggaagagtcccgaacggccgccttttgatcaaggtctatgagaggagaaattgcaattgaaatgaaaccgtttcgaatgaaaacccacaggcagagagcagcctcaggcgcgcttttgccgcaagctggctgctcaacgccctctggctgcgaggcgcggcgtgtagtctgaaacccgtccgggcatgtcgcttcgtttcgaaggacttgcggagagagttaaaaagaggagcttcagcgaacccaccctgtcctcaaagggatggccttccagagagccttcggatcgaagatgcgtggaagaaagcgacggggaaacacggagaaatgagaaaaggaaaggaagcgaacaagggtgaggaagcgacgctcctatacggcgcttctaacgcacagagagaggcccaggtttctcccgtcgcacatgtcttcgcagcggacttccgaagtggatcttgacaagacccaaagaaggtttgaaaatcgacagaaggtttctgtgcattcaagagaagccagattctccgcggaggatatgagacagttgagaggaaggcgcgaaggccctgtctcctcagtcaacgcgcctctctgagcgcatgcgggaccgagagcctcgtgttccccctcttctctcgctgtgtcggcgtgacctcattttgtgaaagggttttcgtcttggttcttctgtgcctttctcttgttctcggttgacacgacgaggtcgataccgttccgtcttcccttttccctgtctgagaaaccgtaggtttcccccctccgtcgcgcggccgcttttctccctggactcttggtcgttttcttcgaagttccccgtcttttctgcagactctttctcagctatgcagcctcttcgcggcagagccgagaggcctttctatccccgcttatccaccttcatttcttccacctttctccctgctgctcaccccggcagcgcgacgcgttcgctctctgtgcgccttgcgtacgacgcctctcccttgttttcccagtgtgtgtttcctgtaagttttcgttgaattcttcgtttttcgcttttttaaaaaccatcctcgcttcggagaacttgctcggcggattgcatgcgcacccggatggtccgcggttctggcgtgtctgca

SEQ ID NO: 2338 - DNA, 2714 bp, Toxoplasma gondii
  source 1..2714: mol_type = genomic DNA
ggctcggagtgttgagatcggtgagagagaagcaagtgacacaccagaggcaaaaaacagcagaacgatgtgtggaagagttaagaataaggtcgagagagtctcccccgtcgacatgaactccctaatgcatgcgacgaaatggtctctgtttattcaatttaagttacacccagtgaacgcatacgaccgaatatcgcagtacgctcctggatgtagcgatacaagctacacgctgagcgctagaaagataaaagaacgatctatgtaatgcaagtaactctttcataagctccagtaaacggctactgtaacgagaaggctgctaaggcagcgaccttcgttgtcgggtgaccgagcgtcgggaaagtgggttatttgttaacaccactgatacaagggcgtccagagaggatgtcgaaactcacacgacaccgtctagagaagaatggacagagttcggagaagtgaagcgaggtgcctcgcaggcaagttgtgaacgcgcgcatgtgtgttgcaagcgggatatctacagtgcatcgagatgggagggaaagccttgcggcgcggtgtatcagcgtagagcacagaaggaatgacgcattacctcgtttgcagcagcacagaaacttgagagggggcgagacaaacgaatagactacaggaaacaccgaaagcgtggataacgccaacagacatcagaaaccgctcctctgacgcgagtgaatccgaacttggtgagagacactgactttgttaggccgtagagaagccgaaatccgtcttgggtaagtatgttgagtactctgcgactgtcgtccagtcctgggcgtcccccggggctgtcctgtctccgtccgtcgccgcgactcttccagttcctacttgggggcgttcctatgtacccgggggtatcgtcccggcgttctctaccgtatctgacaagatatgcagacctgtcaggctcccctgaataactcgacgaacctgcagaacagccaagctgcaggaggtgccgcaggcgctccagagaggcggcgtattcttcattgctccactctgccgggcgggaagggcaggaatccccggcccagagaacgccctcgcacggggtcgagaaatcagattcggacgagctagaactgcaagcagacgctgttgcaaacgtatcaaacgctggagcccgctcaagagctttcgggtctccagacgacggtgggatgaagacgcacagacggggctggccggagtcggaacgtagcaactgagaagaggagcttcgctctagacctgcggtctccagcgtgccaggcagctccgagaatgccattgtcaagcaatgagaaagagaagagagacgcggaagtggcgcacaaaggaatcgaccgactccgttcagttcactcggtgacacatactgacgacccagaaccaatactgctgttgtcgaagaggtcgaagaaacagaggttttctccccacaaacaggcaccgacagcagttctacatggctttctccccgtgacagtgtttcctagtcccctagggacccggtgcttgcatcagtggagagcgcagtggcagctgctgtccactgtgtgcggcatttctctagttggcaaaatggcggcaaatagttgaagggaaaaggatagccgcgttttttccagagacaagagtcacttgtagctggaagatgcttaccagcgttccctgtccccgggacctggagaattttcgtgtcttgtcaccgggaaactggcgacaaagggtcacgtgtttgactgcggcacgcacatgacggacggctacacagggggcgtctacaccttgacaatactggaaaacgacacactaaggaaagcgcgaaaagcgcgggaagaaaatccgggtcgcacacggccgcccgcctgaaaatcactattcaacccccagaacggacgaaaaagctgtgtgttgtagtgtgtgtggagggcggcagtgttcggctcctgacgagacacgagaaagcagttatagcgtcgtttcttcagtaacaagaaaggaaatattcgtggtccactcctctcaagcattaacagagctgtcgggacatgcatgacatcggatcagaaaagcggtatacggcgtgtgcttccccgctgtacactacgccgacggctccaaccgccatgtgcatgcatctatgacgtgatatcaaagaatctatgagtgataaacaacgaacacaggaaaagagcagacgaaataacctggattttgttctgcatttccttccggaggacaacttggcaacattacatatctccggggagctccggttccagaaagtccataaaaggacagcagaatccggagagaaggtagtccttctgtggcaaggattctcgatgctgtcaacgtggctgacaacctgtgaaaagaaatgaagcatcagcttctacctatacgacacatggaaatagcaaccgccagcggtacccaccgcagcgctacattccaacagaacatcggcaggaactgcacacctactcctcgtggaagctggtaaaatagtgggcatgaaaacgcacgaatagaatgcgtatgtatgagtcaattgaagatcgggtaatgcagtgcagcaaaccagctcatgctgacagtcaaaaaatacgattttgtaggcagttgcactcccacagtcaccttgtctagccccatgacccttcgac

SEQ ID NO: 2339 - DNA, 1739 bp, Toxoplasma gondii
  source 1..1739: mol_type = genomic DNA
ccattgagcattcaacgtcggttgcaggtcttgtcttgaccaccgaaggcatgatggttgaggaggaggagccagagaagcattcacgtgatgtaccagacatgccaatggcatgatgttcaaataccgcagttaacgagattgtcctgcctgacagggcttttttgtatgcttatgaggtgcagctgaaaggttcgttttcatcgaatgtaaatctcgatcccggacacctgacaggtgtgtgtcatttctgctgcgaaaaggaaagaatgactgaggtgactcactccccaagattgatcgaagggatcatcttcttgtatctgaatagtttttgaacttcactttcgtccccgggctctacctaacttgccgcttaccgtgctccccaagcctacagttacatattcttgactgtgcaacacagcaacatcaatcggtgctgcaaatttcccttctccaacagctcctacgaagaattcggacgtaacctgactgcacaacgtcatgtgacgcgtcatctaacctccacagacatttacggcctcctgttccatgtcctgcgaatggctgatgggtcgtttcatcctctgtagaaaaccaaatacacacaggtttggtgtgctttaccgctctgcccaaacgtgagtgagctgtccatgttcgcctggtcaggaggttgctgatgtaaatccgctggaccaacgcaaaacggtaaggatacattaccaatgtccagccgcatgaaacccgtttctccagcctaacatcgttggagaattcccggcagccgacaggaaaatacgtttcctcacttacccatgcatcaataaagtggaaagtagctttgacacgcaattcagtatgaggtggcagtcttccgaacttctttgtaacttcgccctacactggagtggtaaaagtttgcttttagatgaaattggaatttcgtaatacccttgcaaattttccgaagccacccagcatggttattccagcacatttcgatacgatatctctggatgctggtgaaaagcatttatctcgaaggatcatttgccaaaacagcaactgacacaccagtgttatcccagccggttgcttctcctgaggagagatcctccctcgcagcgatacgaaactgcttaaccccgttgacatgcaagtcgcccctcaagtcaagagatcttgaaaataattgtaatggaggtctgctgtggagaggtagcagatcgtgcatgattcttacgaggcagcgaagttcgtggcagtcaccgtcatgttatcttccgaatcgacctccagaagaggagatctactactttctacaacgaaacgtccagaagaatccatgccaattgcatagtacgtctcttcagatccaacgatgatctgggaaggctggccgtcagctgatccgactcgcaacacagatacggtcattccgctttgaactgtcggggccaccacagcagaaaccggtggtgcccaggcaaacaacaggcagaggcctgtcaccgtagtcagcttcattttgatgttttacacggggattctaactctgcattcgctcccgtgacaactgctctaactacaggcaaggatgatctcgagacaacggtttccacggcaagagacggagacagcagggagtacgtacacacaggttgtgccagtctacgcttggccactctctccgaggctttcgcacacaatcggctgaccccaaagacgcatca

SEQ ID NO: 2340 - DNA, 1864 bp, Toxoplasma gondii
  source 1..1864: mol_type = genomic DNA
gaccaacaaaacggcgaggttcagattcctcagcctcccagttcgtcgggtgtatgtacacctcaggggaagccttccggggcgttcagccgctccagagcctgtctgcgcgattcgcgtcctcgacacacacttcggtgtttcgctaccatgcttgctctctttgcagtgccggctacttgcaacaaaaacttttgttctgcctatttctcgcggatagggcaggtccgcccagagggcagacgagcgcaagaaagtctcgcgaagaatcaggcagagatgtcggagttccagagacgggaggctcggccctctctggccgccttccggtagtgccaccttggacactcacccctgtgaggcgacttgtgcggccgtcatttcgtctgtctttttcgtttctgaagaaatcggtcttctcctctctcgggtgtctcccgcgtccggtggatgtccacagggtctggatggataccgtgcttgaggctctgatctcttgcagatggagaaagcaaaagaaaaagcgacagacgtcaaatctgagagacgcacagcatgagggagccgacacaaagatgcgagtcgacgcttgtagagcaccctgaaaacaagtggaaaaatgaaagcgatgcatcagaggtgcgcggagaaactgaggagttgcacgacccagacacctggaggggagcggcagcgacgtcgttttcaggagagaagccttctcttttcgcacaggacggactggagaaaacagtgcaaaaaataaaaagagagaagcgactccgggggagagaaaacgaggacggagcggcaacagaccggacgtgaggaggatggaggagggacggagacagtggaagcgcgaggacggagggacgggtcgacaccgttttttttcgagagaagcaagtcagtgcatgcgctgcccagtgaacaaaaacacaaggcaacaaagaactgagaagaaggcgagagaagcgcattcgcaacttctgagaggtgaggtgtacgtacgccgaggggggcggagcttgatgcaggcagtcgacggcgaagtggcgcgaacgcagaagagtggagggagacagaggcctggctgtgtctgagaaaaagaagagcgactgagagaaagagaagaagataaaaagagaaatgcaaagacgaacgccgccgagagggcagaggcgaacccgcaaggcacacggccgggagaggggggaggagacagccgacagcaactgcttttcgaccgaagagaggttgtcttcaacctgcgaatctgaaaaagcgaatcggagaaccggagaacgaaaacaagtctcctgctggagtgaactcgagggagagaaaacgtaccagtaacagaatggcacgcagaaaagaaagcgagacacgcttctctcaatctggagcgggctgcttggattcttttctggggtggtgaaagcacacctagtcttccggtgtgagaaaagtagcctgtagaactgtgcgtggaacctcgatcgggggagtgcatttctgaacagtctgcgtctcgaaaggcagataaaaactggactcgaaaacgcccagagagcagaactttgtgtcttttctcgttcgtgtcatccggaagaagcaagggcgtcagaaaactgacagcaacccccctcctgaaaccgccgcctccagtacgcttgtcttcactggcgccaccggcgaggagcgcgcgtttgcggacttgctggcttctttgagactggactacgcttcccccttgttgagtctggagacgggaagaggtctaccttttcttcagtcacgaggcaagcagaaggccgctgcacacggagccggaggcgccgtcaatgtccccttcaaa

SEQ ID NO: 2341 - DNA, 2679 bp, Toxoplasma gondii
  source 1..2679: mol_type = genomic DNA
ttttttgaaattcattcgaccgtctgttgaggcatcgtgtgctccgcatctgcctgagacggtgacaagtgtaatcctccttgctgaccgtgaatgctcaggctagaacgccggcgcgaactgtcaatgaagaactgaagtgtcggtctcatccgcagtgcagcacgaatgctaggtgttgcgcaggtgttcgaaagctcagtttgaataggaaattcagacgaaaccatagaggccactaacaggtacacacctgggctagaaaaagtgatacagacgcataaaattctcgatacattcctgtcagggacatccgtgtcgcgtgtgtgtgtgtgtagaggtgaaacagtttttctactcagacaacagtgtgcatgttacgttggcagaacgcgagtgctaaaaagtgaaggaccagtgtcgtagcgcatagtgccgaacaccagtcctgggtgagccagaacggcgaaatccgctgtggacctcgtcgggcacagcaccagtcgttgttttgctacaaataagagcgctgccgcaagcttcctacggtttgtcgacttggtgtttttagagaaatcaaaaacaagaacgacagttgtttgacgtatcgcgcaaatccagaactggcatcccagcattggtgaagtacgctttttgaacggttacccgggcagtttctcctaccggtcgcgatcctttgaggttgcctcgtcgcgttctcagttccaaccaggcaaatgtgtgcggtaatctaatctgaccctatacggtaaccacgccctgaaaacgcctgagttcccgaaccaccagctgcaggtcgcggccggacagaacctccccaggtgctccctccgggaccaccagggccgcctccacccgcgccagttgaggcagttcctgttcggttggctgccggtcttctgcccacttcgggacgattcgaaagcctctctgccagccggtcgaacatcttcggcgtgtagctcagcaagtctgcaccgcctgggaaacgcataacacagtcgcgagacaaaaaggatgtctgcatgtctcggaggaaactgtggaagagacgaaagtgcctgacagtctcgactcaccttgcgccggcagaatctctctgaagaagtagtaaatgtgtccggagaggaggccgatcgcgtccgaccagagatccttccccatcaaaagatgtagaaggagcagaacgaaaggcagctgatgaccctggactgtcagaaagtagatagacactggagtgtacgattcccgccggctccagtagtagagaacggcgaagaggagagaaccacccagcaggtgaaggcctgcaaataccgattaatgcgacacatcacaccaggcgaccgaggatactcataaaaaggaaagaaacttgtgtgcgaagtcggctgtcctcggcactctgccgtcaacagctacagtagaaacaaacgcgaaaccagaaagggcacgagccgaccttttgtgtgaagaagcggacttacccgtgggccaaaaaagaagcagagagatgcagtctagacagagggtctgaagaacgatgaagtaaaggtacgcccctttgcttgcttgaacgaacacggcgttgttttcgaggtcggagctgacttgggtccacatgtacatgtgcagcacccaacccagagagaacctgccgatgtacaagacattggtgagcagcctccagacctgaagtttttggaaaaccaactcccagtccaaaatgagcaggcgagcgggcatcagttcaatcgacgagagcagggtgcacgcaaaggtgatacacgtgaccgcacgggtcactggcgggagggaaaagaaccatgcttcggggccgttcgacggatagccaccgccactgcccactccgtgggggagcgggtccatagtggtgactaacagagaaaggaacaagcgacgcgagtccctggaattgagtggtgggtcgagacggaaggcattccacaggttggctgtcgcacggagctctccctaaattccaccgctgcgacgccgctcaacatgcaacagtcctcttccgtatctgcaagggaaacgggaatccccgtaagacgacaaaatgagagtgtgtctggatcaagacatttatacgaaaacagcatgcagcccggcggcaggctaatgtttgcgaggcagacactcctcatgcgtgttcaccgcgcggcccagtcgcgccaaacaaaaaaattcccgtcaccgcgttctggaaggaacgcattacgacagcaaatgatgacagtgccgtctgcaacttctctgtccgttagagaacgtcacaggctttgtgcacgacaaaagctgtagcgtgtccgcgcaggcgggcgtcagcgtgtacgagacaacacacaaggtctgcgttgcacaggaaaatgttaccagcggcttcccgcgccattaccaaacgctgccctccagattccttcttcaacgccagccagccgcgataagcccactacgcttgccacggtcaactaacgtgccgagtgtacggacaccgcactgaatgtagcacaaggttggtggcttctgcatgcgtggcgtgttttcttcgactccacaaattgatacgggcgaccgacggcagcgttttctgttcccgcagctgtaggtaacgcgtgtccgcgaaacagtcca

SEQ ID NO: 2342 - DNA, 4480 bp, Toxoplasma gondii
  source 1..4480: mol_type = genomic DNA
gaacgttatctcggacgttctgttacgaaacgctggtctcgcacggtgccaggtggcgaacgaatcgctgttcgaccaatagtggaatgcgttatcgcttcaacagaattggacatagtatttctatctgacaatcgttgatgttcggtgctatgtggaactagcacccgacagtgcaccgcgacattttcttgctgtggccatacaaagagtgcacgtcgaagcacccactgctactgtattttccgcagcgggaacttgccgcaggtatacttgcacaactcgtctgaggcggtgaaggggttagggaaactgacagattgtcaacattcgtgtggtctcccaaaaacgtttggcaaatatgaggaagtctgttaatggtacaggatgcaactcattcaccatatttgatgcagtcaattcttcagtgcaaggatttggcaaatgtccacagctggtcacgtgatacattcgtggagtgctcaagaggacgaacatatgacgcgtcgaattctactgggacagtcaaatcacgatatttcacgggggtcattatcttttgttgcttgcgctattagccagtgttaacaatacggttgagtaccctggtggcatgagcaatagtgcggaaaaatcgcctccaccacgacacgatacgcgattttactgacatccgatgccagtcacctcacttgcaaccggaagtcgtttaaggcgccggcgaggtggacaggcgaactcggcgcaagaatcgagcattcatcgccatgcgttggtaaactgtggctttttgcgcacgagctgcagacgggcacctctgtatcaggaagtgccaacagcgtcgcaacacgacaggcccttgtgtagtagacctcaaacgccagacgcgtgtggtgccctctccgtcttttcttcaagaagaactgattcagtcgctcaactgatgttgcactcgtcacattctttcagaggaggttgttgtgtcctattttcacaccgagtgcgatggctagcaacggcccacgccccgaggtctacacttggcagatagatcatcatagtcgtctatatggacacgtggctctggtatatggtgtctgtcatcgttgtgcaccgaaaaatccgcgcaccagcagctttattttgctttggtaatagcaagagcgatgtatcaagaagtgtttgttggataatcagttacgagttacttttatctggcatccacagcattcatacagatggttatctgtggcccatgatcgcgcaaagtaaggacccgtgatacgcattgttgtttacattgacactggagttataccatgatggtgctccacaccggctcgtttgattctggtgtaagaacgatatcggactgagaaaacaacgacttgaccacaacaactgctccctttaacttgcatgtaaagaaacaaactgcgggagtctctttcgtacctgcgtgtctgtctcaagcaggatacaaatttattgatactgcgggagctctacaaatccttgctatggaattgtaaagtaacacgtgcccaaaagaaggaaattagccttgagcacagggggaattacaccgtaaaaaaacagaagcaaaaacagtgacaaacggatctgcgtcacctccacgtagtacactgtgactgaaggactaccgtcctgggaagctcctctgctacatgtttctttctcccgttctgcgccgcatcaagctgcagagaccccgggacgtttccccctagtatatagactgcgtgttatatgctccgtctcagttgcaaccgaagcagaaggacattacatttttcacgcgcttctcctagaaattgtcggctcagaaaccttggggaccgcacctcttcggggatgaatccttctgtactcttttaaccgctggtaaagcagttgtccagccgctccctcccgtggatgtggcagatccggcttgaatccgcaactgaagaaacgggacatcataaggagtttctttcaatgattgaatttagaagaatctctttcccagtacatccttttcaccaacaccaactaacgagttgtcaacccagtcagtcgcatgcttgaccctgtttgcctgttttgggacctcgctcatgtgtgtcagatgaaaacgcctcagaggcaattcagggaccatatagacgacacctgatactacttcataggccaaacgtgcttcatggcaatttgtactgttgttggcttcggtgtgtgtgaaaagcaagtgcttccttgagtcaccctatacctatagtggccaaccgacaggaaaccctcattgactgcggcctgcctatgtcattcagaaagtgccaacaacttctggccaagcaatccgccaacagcccttgacagccgagccatcaactcccgatcccgacgtccgacctacactcttgttgctccttcacgaaagacaagggacttcttcgaacgaccacataagtagagcaaaagcgactttgatacctacagtatttacccaaccagggtcagggtgtggatctgaaagaaaggacgggcaaacaaactcgaaaaaaacacgcttacgttgtaatcactcgtttgtcgtagccgcgagacacgtatttccgtaaaaaccgtgatttcacagcctggcctattagcaaggtgaaacatttttttgtgtaaatgagtcaatgatgtttgacacaatctgcttgtctaatgattaagccactctgcagcactctagaattccaggggatcacatcagcgttcgtgctggtgaagccaggctgtttccagttcgcggcgtagtcgagggacccatgtctcaggtgtgtgcttactagcttcaagtgcgtgcagccgttcccctttttcctttatcctacatacctgtcactaagataactatctgtagaaaagtgtcagtaaaactgcgtaacgaagacttgagcatcgactacgaagtgcacaatatcagcatatgctcctcgtgtcaccctatggagcggtttatcggtggaccgaccactgcactctgctctctgcatcacagtttccatacctttggagggagtggaacaatcgaaattcaggcaccggacactgaacaaacttccatatcgtcaacgccgttgcgtaccgctttcagatctctaaagcgggcccgacacgactgttccttatcttctcgaagtgagctcccttggcggatgggttttgcaactctgctttgaccgtctgttccaaaaacaattgtttctccgtcaaactacttgcgcaccccaacagtaatgatgctatttcttttggggtatcaccacaatggggtagctggtgactggggtgcctgtgcctcaaaggacgactaagaagggacgacttggttttgaccgggtctccgtccgttctgacgcaacagaaagatctctttctgtagcatcacatagacaaatgttctcgaaccactgcgcctccgctacagtcaatccatcagctttgtggagtttaatttggcagtttattcgcttcctctcggccacacttttctaaatacagacggtcaaaacggaaatcgcctctatgcaagccattgccgaccggtagttacaagctcgtcgcactgcacccacccgcgcaaccatgaggcctcttgcaagtgtcgcccgtttctttggctagggcggacagaagagctgttgtggtgttgccgtgactgtggtccccgtccagagaagggaaaatgactttttctctgtgttgtgttgcactttctgagcggctatactggcttagtactggcttttgtatgctaccgtctttttgctttgctgggagcattttctgaacaaagatccgtgctccgccagccgaagcactcgctgaactggcgttgcctcagcaactgcctctcccgcatcactccctctgcattggttggctcttgcgtttcttaaccgcacggcctttcaaggaaaccacaaggcaggcgcgttcaatggtgttttgtggggagatccgtttcgactgtgtaaggatttcacctcaactccacgcttcaagtccccgtgactagctgagtagcatactgctggtcttgtcgcaggctggccagtggaatttcgtgcaagagcgtggcgcgtttgtccaagaaacgacccataacaaccaatttcttgtttagtcgtacctcctgtggctttcttgtcttgacgcgggagaacgacgtccagtggtaggaagcgcctttgatgttttcagggtccgtgatcgtgtgctttcctcgatcacattattcctgtctcgcacacaccttccggacgatccagaccggcgcctgcaccgttttcattgtgtctgccccgttgatctccgctgttttctgaacgtactttccctgcgttgaaacatgcagccttacacgattcctcaacggtaatactacgctgttgccatcgcaccaacacagcagaaagagccacaa

SEQ ID NO: 2343 - DNA, 1817 bp, Toxoplasma gondii
  source 1..1817: mol_type = genomic DNA
aaacgtaagaaagcagagctcatggaagatataagttgaacgaacggtgcaacgaagaaagcaaatgaaaggacatgcaagagtaaagagtgcgtacggagaggtacttctggagagcattctgtttcatttcggattccaccaccaacagccgacatctcccgcaagataccccagtcgatctagatgacatggtctagagttgcttcacggcgcatttctgcaaaaatggtgacaaaagcccagcgtatttagtgttgctcttaagaacagaaaacggagtgcctcacaagttacaacagagccccgattatttccccgttgatcgttggttcgctgaaaaacagactagcgatgaaaagaagttgaccgaagttagcattatggtatttgtacatcttgtacccacatatttggtccgtcttccagtttccactcaagccacatatatttagatgagtgcacgttaacttctcttgcgcctgactgaagatgctcaagataacaccagcaataacatgactgacatgtaccccaacgatatcccgggggtggtttgtgtcgaggtttctctgaagtgttctgtcactcctagaacacacccgagtgcgtttaagtacaagaagaccccgaggtgaggcgtccgtcatccccgtcctctctttctcccattcgtagatacatttcttgacaagaaatacgcggaacggaacgtactcttggggcgaggtcccctattagatgacattttggatttcttcgctccagcggtctgcgacggaggcatggaacagattttcaactttttttcctgtaggtttgttttgaatgggctcgctttcaaccccgcaaattgcagtctcgggactctttaatggaggcatgtgtaacgcagaagtccagttcgtagattttggaggcgcgcgagacaagcagagagtcctagcgcttggcgtcgatgtgagcgtaaaggcttttctctacagttccagagaagattggatatccttacaactgaaaccactctcgaaataatttgtttccctcggtgtgtctcagcctgtctgtgttgttcaattcgagaaagtcccaacggactctctcgactagttatccccactgcgtgtgcatgcacgctgtttggaagagaggctggcgcggtccccccacagaaggggtcgtcggtcttggatttttcccagtttcttttctcttcttcgatttgcgattcttcgcgcatctctctgcaccttttctctgtttttccggattttggtctccgttctggggtctcctctcgacatgctccactccgttctgggtcgccgcccctggtcacccggcaccgtctctgcccttttttatacagacgaaaagctctttcttctctgttcttttgtctcacgtctcctttgtctttactaagaacgcggcgtttttcgtttcgcccatttctggccttcattctgccgtcgtcgaactgtctgtccatctctaacaaagaacatcccctccagctccgctgccttctccggatttgaactcccttcagctctgctccaaagttctcgcttctctccatcttctccactgtgctcaaccttccactttacacttcgtcgagacctagaaacccgtcgttcccccggtctgtgtccttcgcgcgcatctcgttcggtacactccgcctctccggtgccgccttccctgtttctgtctcctctcctgtcgtcttccctgtctttttcccccttcctctctttcccccttcctctctctcgtccttctctctcgtccttctctctcgtccttcaaaa

SEQ ID NO: 2344 - DNA, 2095 bp, Toxoplasma gondii
  source 1..2095: mol_type = genomic DNA
atcagcggagtaaagtgccattgttacttacgctgatatctcctctgcttcaccattgctagcgcagttcgccgaccccctccatatgcatccggctcctttctcgaatttgaccatgtctgcaacagatcgacttgctcgaagttcgatgaaaccctgatcggatatgcatttcctagaagcatgtgcgcgcatgttcccgaggaaccgttacgggtacctctctctagggggagaggacgagaaacaaagttcgagttggcaccattgtagtgcgaaccattgcaaagggaatgacaggaggacagcggacgaagccagagtgtgaacgtcgggggaggccgggaggagaaagtagagaaacagaggagcaaggaggacgggcgaaacataaatgacgctacacgctccgaatgtgggtctgctgcattgttcggtaacgcagacgttgctgaagagaacgaagaaggtcggggcaagtgagcgccatcgacgaaacacacaaggtgtttctgtgagatgcctccggtacgcctccccgtctgagctgaaaaagtcaccctttcattggagtacaacaaagaaacgataaaacaaaacctaaacagcaacgccaaagtcagggaccgcgccacaaccggaggacagaagaaataccgcatgcttgcagaccgccgaagcttcacaggcactagagggaaaccatgctgtcgcaagtgccgcgaatcacagtcgtgagggcgagatagtctgcttcagtggaagcataagtggacaaagcagaccatgcgagctctactcctggataaacatttttcttgatgtgtagaacaacgggaagatttgaaatataaattcaaaataagcgggcatgggtactctgcgtttgtgtcgtaacgcgaaacacggcggcggcagacttcagcagcacaccgggcagatcagcacctcagcggggctaaagcaccatagctcacgcctggacagagagttattctcgtctgcattcgctttcctaagttgcatatctccggtctcgagtggagacagcgactctaaccctcatcttgcagttaatataactgctgatgcactgctggttggcgcgaaacacacttcatgcaagaacagtgtcacctgggttgaagtctatacgctgttaatatggacatactcccgttcatgctttatagagtttgacgtgtctttttagccaggtgaaacgtatatccgaacatgtggacgcagacaaaggcaacttctcgcaggagtcgcttcaccagtttacgtgaactacgcttggcagcgggaaatgcatgcaggtcccttggcctgcatcctgcgtcgtttaggtctgcagccttcgtcgccctgtgctgcagttcgcttttttctcaatcgagtggatatcggagctgagacagtcctctgttcggcagttgtcttacccgtttgcggaaggtgcttcctggaagcccaggcacactgagcaacactagtcaggtggtgcagcacacattttgcgagttccttttccggagccacactttctttctccagtacgtcactctaagcgcggaaaactaatttcttagtaaatttctcactcgtgtgtgcatgccgtggtccgccttccgcgacggcagtcgtcgtgtatcacgttcgcataacaagcatgttcgataccaagttgccccgccagcaagccccagatatttacgaaacacacccaacgagatgcacactggccagaaagccgccttgacactgatcgttggtgtgtgtttgcgtgtctcttggcagcttcatcaacgagtggtggctcttcatgacaatggattttcgcacgagacacgcctgtttgctcgatgaatttgagctgtgcttctctcccgatcaggtgttatgaactgcgtcctggagcgcgaagtagttgttttttccatacagggtttaaccatcggcctttagtatgggccctcagtgcacggtactgaatatccccagaagccgaattgcaatttcgcggcgtgactgccccctttcctgtgctttggaactctaccctcagtctcagtggctgtatgcttcctga

SEQ ID NO: 2345 - DNA, 1310 bp, Toxoplasma gondii
  source 1..1310: mol_type = genomic DNA
ggtttcggagatgaccttgcggcctcttttgtctctcttccgaattcgcgggcgcgcgtccacgagcgagttccggacgtctcactccgcaagcactcccagcgttctgtttctcgctcctcttttccttcttccttctcacgcgctgtgccttggacgcggacaccaccagctgatgcggcctcgcttcttcgaagagaaacgccgaacatccactctctcttgcgcgcgtccgttgggctctgaacgaggagtgcgaacgcgcaggagacgcgaagggcgttggttctcctcgttcatcccctctcgcgcgttcagcctggatgcagggcgcgcgcctcgcgcccccagaggcctcaagagagaagtcgcgacacacagccttctcgactgcggctaaccagttatttgcctcgagtgtctgaacatctccagagcgcaggagagaggaagccgccagcgcccgcgtcaccgcagagcttagactcgcctgaatgcctagggaagctgcgtcgagaggcgaggaaagacacgcgggtgtcctgaagcactgctccaagatgtctgccaagaactcttcacactggacgtcaggcgagtacgcacaacgagtttgcgaaggcgcagaagatccggggaagccggcatcggaaatgtcgacggccagccaccacgttggacgaccaagtcgcgtctgcaaggactcacgggcggcctcggagattcttcttccacgcactgcgagcacggaagcagcagaggaagcagagtctcccgtcgacttccacgacgtctcgttcactggccaggaagacgcccccaccggaacacaggtttcagatctcttgcgtctcgccgcctgtcgctcttcctccatgtctacgtcggccgctttcctgctttgctgcgttgctggttcgtcggtcttcacccctctctgtcggtggtttgtttcagcagcgcgctggagggctttcgaggatcgacgttcgcgccggtccgatgaaggagttcccagctggaaggcgaaaaaaacagtttgcacggagcgaaacggaagaaggaacagacacgacggccttccattcttcgagttccgtcagagaaaagtctcttttctcgagactctggagaactgcggtcccggcgaccgccatgatcctggaactcggtgactccgttgacactgcggtgtctgtacacctcacacaccggcaacttggtcgcgcatgcgacggttccgctgtcttgatttgcggtgcaaatcgcccttgtaacgcctttgaaagtgaacgtctcttcgcgagcga

SEQ ID NO: 2346 - DNA, 4818 bp, Toxoplasma gondii
  source 1..4818: mol_type = genomic DNA
cgaatgaggattcttggtccttactcaagcgtagagcatcgcattgactttcagcagctaacattcaactgccgccgttgtcggtgaatctcagcgacggtgacacgaacatgatcaactgtgcaagcgacagaacaacaagtcgttgcaccggagctgtaccatatctcgaatacacggatggggtacatgagggctcaatgaaacctgaacctgtactgattctttctgtgacgcagcgtttttagaacgggaattcggttctctgacaccggtttttgcagtttgaatgctttttttcaacggtacaagaaaacagcacttgggcctaggatgtgccctctgctgtgtgttcgatatccgttattcactttggatgtggccgcagagcgctgcggagaaaatcgtctttgcgcaggtgaaaagggaggagacagagcaacggcgtggaggctagttaatggttttcccactaatgaaggactcgcacccaaaggcaaaaagaaaacagcgcgtccgtccgagatctgtgggctaatcgatccttcagggtcgacgtttctccccaccttaagaagagaaacttctaggcggaatccgcaccatttttttgttactgttgcttcatcgaaggactttttatgagaagccagatttgagtcttcacacattggccaacacgctaaagacagccctagacagaccccctaaatatcagccagcttccaccccctgttctaggttgctgtggatcattttttggacaacgttccaaattcggtataagtaaattagcggggtgactgtgccggggcagtgagaaacaactatttctgcggccacgtcgattggtactgggaggtaggaaggagttaccgaaaaaagagcttcctgaaactccgtggaagaaccaggtgtcacctcaatcagcccaactttacgatctttcgttctttggcgatgcgcgactctgagtcacgacgccggggccggggaaccagtggacctcctgtcagtgcttgaaactgtctctttaccaaattcagcagcttacctgtataaaggaggatgtaacacgtagaccaacgtgcaatgtagttgactgcttgcgacaccgacatgctattttttcctctttcgtggtcacaaacggccaaagacgttttatttttcgcgatgctctgcagggcttttccaggtccgaatctcgacagaaaacccggaatcagtccaagtgcatgcatgcacgctacaactgccagcaaagcaggcacaacgcgggtccgcgcccgattatacgagactgatgacatgcccactaagcgcattgtttttattgtgaactcactgtgtgctttcttccaatagcaacattctattcgaacttcagctccatcgtccctctttgtcctcctgtaaacgttccgtgacagccgcacagctcggacgccgtcgccttgctgctcgtcgatcggtgctgtgactgcgcttctgcttgcctttttccgacgacacccctcttgtgtcgtctacgatttttgatccatggccgggtgataggagggtcgtggcatgccttccgacactccaacttcggtgtcggatttgctcaatcgcaaatgccgctataattggcttccaaatgtcgtttcgttgctttctcagggaagcgcggctgctttgatcatttacctctgcactggtcactcgtgtgatggacagccctgagaggacctctctcgcagtccagacttgtgtaggcccagtgagccttcgtagctgggtctgtttcagacaagacaaattgtacttcctgaggcactagtcgagaaactgaagcattcgccgcgcccccatgtgtggttgacactgcatgcacacgccaattcatgaagcatccccgagtgtgggagacgaggaataaatctgctgtttcgtcagattgactcgcccagattatgcaccctgatcgtccacaggacctcgtcagtttccatagcctgaattctctgtattagatcagtatttctccctgaacatcagtggttttcctgtacaggaccgacaaaaagtgtcatgcgtttgacctatgtatatgtgtctatctgtgtatatggattttagtagacactcgtgggtaaggcacccctaagaggggcagtgagaggaatcccctacgaaaacccggacaacgcaggtcgttcctccgggtggtcgctcgcgtgaaccatcctagaatgtggcggatgattcaaatcagctgacgtaccaatggcatctgaagccgatatccaggtgcggttgcgccggttgtggcagaagcagcgggaaattgttgcgtcggtcgaagaacagttgctcgacctctcgtttcctcctggaggaacttttgttgacctggagaaagctgccagtcggacggaatcctacgtgaggctgctctttggtagggctagggctatggatgcggacgatccggcgtctccgcgtaatggtcaggaacctggctccgtcgatcccgagacagggccgcgcgcttcttcagctgaacagcggcctgatctggcgtctttgatgcgagttatcaaggaaattcacgttgttacgaaccggcacgctgctgacctgccttttggcaattcagcaagtgctgacggcggtgccggaggcgaaaaccgcgaaccatttgacgagcaagagcgtagcttcagggatggagcgtcgagacagctcgagttgcaaccgttcaccgaagaacaactggcacttttgcaaaaactgagaggcaatctcccgccggcggcgacagatgaatctacccagctgagggacagccggtgaccgaagtagctgcttttatggaactgtgataaaaaaacaccgttacataaatagtgctccacgctattgtacactgcgtgaagtctagggggaggtcaagggggtctgtctgaaatctcggcgaatgttcctgagtccctcgtgtacggatccgtgtttcggggggtatgtagattatcgtagtttatgagataccgctggtgccagggcgaaggcgagtacctggatgcggtaggaatgcgacgagttaagtcacgcggggaagcaaccttatgtggcattacatattctcatgttcccatattcgtagcacttcggcacttgaggaggaacctgctctgaaaaaccggtgaagcaacagggatttattcggtgctcctcgaggctggcgtcgggctcgatttgcctggcgaaaagcgtttgaagctgtgcctcactatatatcggatgcattgacatcagatgaaattgtgacactagagggtgcgcatttcttttagcagaatcgacgtggtgcagtattggagaggattaattatatccgtctgagcatctaggtttatactcggatatacacgttatacgcaaacttcttggctaaacatgtcttttctttcaaacgtacttcccttctcgccgttggtatcgtgtcaagcaccagaggaccgcagagagcagacttgcttctgtagtggcctctgcgaagacactcaaatatggacaagatttgtcactcacacgttgttacactgtcagttgtcgactgcggaaagaatgtgaatcaccaagttttcaaccgaggaaacgcctcagcacacacctcggtgacttttgcaaaatatggaatcctcctcctgcgggtcagtgagtgccgttggcaagcataacctccagaccaatgcaaacatacttctttctctggtttcaagggattggtacgaagaagttaccgcgtcttccgttaaggcgacatctctggtcatctttctgctcgttggaaaaggcaccctccgtgttgttccacaatgttggtgcccatcattcttttgcaaaccgcgtcaatcaagccagggaattccctcctcgttaatgtgtgtagaacttgccatggcatgacttcctctctgcggagttccgattcacagactcttgaattaagccacttctctcgaatctcgaatgacggaaagttcgcacaatttccgtcaagcgcttgctaccccagtgttcacgacgctgtcagcttcgtcagtgagactcaaacaatcatcggggtttgggttttaatacaatgtggatgttaattccttcatcctcgtctgaacctcattggggggccgtactggagactttccccttcgccggaaccagctgcttcaacagcactctggggagaacagccgcagacgttaattagtcgcttgccttcgctgcacctgcatgcaggaaggaaagccgtctacggactccctggtagagggaaatgaaagcaccataagacatttgttgtttgcgtgcacacaaacgcttggatcgagagtgagacagcccccgcgcttctccgcggcatttgagacatccagacgagccggacctcgttgcatagctagcacctataaatttgttttttttttacggtagcatgcgcttccacaacgatcaactagcctcgctactgtggatgcgggttgtcttcttttgtcactgtcgcgtctgaatttaccggcgggcgaaagaagaggccgggaacgaccgtggtcactttgagacgaagacgaacgccgccagctccgcctttgcaggggccgaccaacaagccacctctcggtgcgccttctttgcgcacggacagctgcgatgctttggaggtcttggcaggcgcaaatgaaaacattttcttttttctcaagccgctccgctcccccagctttccgtctgttaagtgtgacagaacgcggggatctgttctggatccga

SEQ ID NO: 2347 - DNA, 1916 bp, Toxoplasma gondii
  source 1..1916: mol_type = genomic DNA
gcttgaaagtgacagacgtttcacttgctatccggttaaaagacataccgaggcagagccccggactcgcgtcctctccccccatttccgccgccttctctctccgaccacctgaagctcttgctctctgcccggtctacatttccttctccctcttcagtccttctctcccctctgttttcttccctctcgtgtctcccatctctgtcattctctctctttctgtccttcttctcttcgtcccgtatgagagacaacgatttccagaaagtggagaccaagtgggcggccgcgtccccggtctgtggagctgaggacagcgaaaagagtggacggacacacagtcacgaaacgagacgcagctttgcttaggcgagtgaaatgcaggcgcctttctaaagagagatagcgagcaacctgccgaagactctgcgtcctcacagagaaacgcggggaaccgtgttgcgacctcagcagggagaccggaacgcgacggtctctcgctctctgcgtccgaaacaggaaagcgcgaagacgacgaacgctacaagaacagaagaagagttagaagaatatccataggcagattcgaacgaaaattagggagatcagcagaacaatgaaagaggtgggagaggttcaggagtatggccagacagtcgcggtgaactgagaaaaggagagaagacgagagacaaagaaagagagatatctgcagccgagaagaactccagctggaggagttcaggagggaagagactggcatcaaggaacgaccacagagagtgaaggagacaggaaggaaaacgtggctctccccagaaacagacacggcctgagacacaacggtgaacctctttgaaggagcgaagaagcaagagggcgttggagagaggagaaagaaagggcagtttcgactgaagaagaagaaaatggcgcgctgcgaggcacggacaccactgaagagactggcgaggaccgacaggtgagagacgtgcaaagacacagagcggcaggaaaagcggaggaaagagaggggagataagagtggaagtaggcagagatgagaggacacacgactgccaaatgagtttctactggttttttgcgccgcttgtgttttccacttttctccgctttctcgagagaactagctcgatgcacacggagcggagagaggaaaaccgtgcatgcagacaaagccaaataagagcccgtcactttaccgtttctggaatcacctcgttccctcccctctttcgactttatgttctttcttcctgcgaaaaagtctcgctggtcttctttttgtgcgccacgtcgtttttcttccgcgccttctcttctggatcgtctcccgctgtcctccctgtttttgcgcctcctccggtatcatcttgcgttccctgtaaaaactacaactttccttgcttccccttctttttcctagacttgaagcgcctttttatgttattcttctgcagccttctctcctttcgccgcggtgtcgggttctcctgtcttggcgcgcgccagtgacgacgccgacgcgtgtgaagctcgttgccgttttctcacgcttcgtttcgcaattttctggaaaacgactctgtctccacctttctgtccaacgcatctatgcgacaagtgtctcaggtctgtttgtgcgtggatgtcgccatagatttcaaggtcgacccccatttgttgtcctcgtcgaggaacgaagacggagaggcagctcaggccgttgtcttctgtctttctctcttctcccgcgcttccttcctgttaatccagtctccatctttcgtcgctgtctgccggtcaaaatcgcaggacactttgtcggagtcttctttctcggcttgctggtttgctgcgctcttctgctgtgcttggaaaaaccgtcagaa

SEQ ID NO: 2348 - DNA, 2340 bp, Toxoplasma gondii
  source 1..2340: mol_type = genomic DNA
ttctatggacggcgagcttttcagtgtgtacgacttcgttcgtctcgcgcgcgtaggcgcacaccttgacgccgcgctagtggaattcgcctgctgccacgacgtcgactgtaacacggctgacgggggaacgcacgccacagcagatatacagaggattcttctccacaggaatgcatggactgagttcacctcgtttgtggatcgcggatggctcatgattattccatatgattctgagggaggatgccctgtcatcaaaggaggccgtaaggctcattatggggtaattgtggggcacgcgtgccgaaagtctcagcaaagcgtgattatttcccaggcgggtttgctatcgccgtctggtgatgaggcaggcaactctgtatctggcggacaatgcgccgcgtcacccacctcaagtggcggggacgagaagaaaactgatcatgacacaagtgctcagcagccgaccgggccgcgagagttgtctaacgacgacgtttccgagcaacgtctgcggcatcgaatcgaggagtgtccgcgtgcatgtggtgagccgtatttgacggtggcaaatgcctcgcactcgggcagggcagtcgtgattcagcacggcaggtcccgactattaagtgtagcactctgggaccatctcatgaactcgaacgcacaactgtggaaagtcgacaagactgctttccctcacgcccgtgaaatgaagttgagaaaccgagccattctagttcgggggttcttgaatataaaaggcgcgccaacagggaacagatgagaggtgactacgaaggtgtttacaagaatagagaatggaatgcaatttgcattgtgcgcgtccctgcatcaaaggataagccgcctgcgacggctgcggtggtgggatttacggggcggcgaccaatatgaaatttgcacgggttttacgatacgcattctcgcggccaaaacatgtggacaggagattcgctggttcccctggtacggtgggtaaccgggaaaagcagtgcgcttcgtttttggtacaaagaacacacttatggtgcaggaccgctttcgtagttgtatggtaccatactgtgcatccaattacgtgatttaagtaatcgcattacttccgagaggtattcatttttcgttgtaaatcgtcaagggcttgacctcgacgtcctgacccggagtctggtgccggttgatgtccgtttgtcatgacggagaatcgtttcctcagcggattgcaaatattctggtgtttcttctaaaatgccattttggcattgaaccggcgttctgcggaagtaacagaaacatggcgttctgcatacattaatcaatgcccagtgagtgactctgctatctgcggaagtctgccaggattattgggtcacgtgttagggcgtcgctattcggtttacatcgtttgtgcagagcacggacaacgatccgaagctcatccgttatcaatacgcactgcgctctgagaatgaacagtattgtagtgagagcaagtatcgcactctcatcttctagctcttacccagtcaaatgagcagccatgacagagagcgggaagcagatagcagtccgttggaatatgaaattgtgttatattcggcgagactgtcagacattctttctcctctgatttatcgataatagaggattcataggcttctgcgtattcgctaggaagatctccgtggtcaacttctgttacatcagcacatcttacgcccaccataatccaagcagacatgctgtcgtaatacctcactagcacagattgctttctgtttatttgaaacgagtgtacgtagagagacagtacatgttggagaccttgattttgcttacagaaagcgggccgtaaacccggccaaatgccctttcgttcgtgaccctggaggtggtgacccccaggctattggattttgcctcctcctgtcagagctcctcagggcgggtcaaccgtaactatacatcgaacaacgctcccttttcccagcgtacactaactaccttttcaagcaatcttctgtaaggctaccgttgttgccatctagagcatagttttcttgcctggaccttccagctactctagaagaacaacccctcggagaatctcccatttgtcgccttgcaacgcgcaactactacgcgcaggctgctttgtggaagtgtgtgacaatttggtaccagctattcgcgtcgcatggataaacccgaaaatctttagtcttttcttcagttttttctttttgtttctgcgcacagtgggaattttccgttagcaggtagtcgggatttcgcggaggttccaacatcgca

SEQ ID NO: 2349 - DNA, 1459 bp, Toxoplasma gondii
  source 1..1459: mol_type = genomic DNA
cagaaaaataggcttcgcagagattgtcagtgcatgagacaaccgcgaaaagccggcagccgcggtaatacggggacgaggaaaacgactgagcgtcacaacagaagcagccgagtaaacggcgaaggaaatggaaaggacccaagtaaaatttcttgaagaatttcagcgcaacaactctgcgggttcttgcgaatagaggaatttcacttcctcatcgtctgatttatgctttcatcatctgccgctcaacagccgaataaacggttctcggtggcttccttaaactctacttcagtagttgaaactcttttgcttcacgagccttcgtctcagccctcaccgtcctgagttctgtctttgttgaggaaagctcccgctgaaaaaacaggactttgtttgcagatttccatgtgtgctggaaagtgagatgtgacttggggaagtccgctttgaaatttccattgttttctcaaaatgaaaagtctaaaaaatcgaagtgcgtgccccgcgaggaattcccctctgcagatttgttttgcatttgtatgtcgtttttacggagaaaagtcccaagctgctgctccttctctaactagatgttgaacgctagcacatatgcaccagatgcttctgaagtatacctaaacgcaccttgggaacaactgtgctcccattcataaaactcatacaagtcaccaagcatgccatacccgtgagacataacaacggaagctagactactcccccctgttattccacactatcgaaaaggattcctaggtttctatcctctgccttttcctggggcacactgcagagaaactaccgtcgcgcgtacctcccgacgtgcgaggcgatagcaaaacgcttttgaaggaaaaagtcgagaaatcgacgagtgcgtctcttgcatccgagagagagatccaacccaccgagttctcgcatgtgcagcatctgcaagaacgtgataatgcatgaactcgatcatcgccttatctgtgtgcatgcattttcgaaaaagaaaggcgttttctgcgcggagactcgcgcggaggcaagacgagactttctcttcttccaaactgcgagccacgggggcgcatgcaatttgagcatcacgcaaaatcccaaaacgggtggggtggagccgcaaacttttttggcatgcagcgttgagcctgagctgcggtgggggcttttgtcgcgagcgtggggtgccgcgagagagcaacgcggcgctacgcggccgacgggtcttctgggaagcctcgcatttcctcgacgggttctcccctcaattctcttcctttctctgcgtcttcctcaggtggcttcgtcaccggtttttctcctcgcgttcgtgctccgctgtgtgtccggagtgccgcgacagatcgagggcgttctccgcttccaccttgcggttcccaatttcgatttttctccgtcacca

SEQ ID NO: 2350 - DNA, 1509 bp, Toxoplasma gondii
  source 1..1509: mol_type = genomic DNA
gagaagacggaagacgaaagacacgagagaaagaacagtgcagtgtcgtcggtggagacgcaccatagggcgaaggcaaaacaggtcggttgcccatcgtgcttccgtcggtcaggagaacaatgacgaggatgggagaaaatcaagcagttcgcattctcttctctcatcggaccaatgctccaatggcagaatcacggccagaaatgaatcctattctcttcgaaaatccgttttctcttcttctctgcttctttccgtctccttgtccctgtctgtttctttctgtctcctgtttgtctcttgctgtctcctctctgtccattctgtctcctctctgtccctgtcgtctctgtggctgtcgaagagagaacgagaagccagaggaggcagagaggaaggagaaaaagattttcgacgaactggactcgctggaagatttgctagaaagctcttttctccgttcgcgcatcggacggtcgggcagaaggaaacaaaaaagacttgacgcgcaagacaggagaacagaggaaaacgggagaggacctgaagcaaaggaggcaggttgcgaacgaagaggagagaagagagagaagagaggcgctcgagcagaggggggaagaaggaaagcaaagagaggaaagcatccaagaacagcgagcacaggacaggccgtcgcgatgggcggggaagaggaatggagatgaagaaatacgaaagagagagaagaagagacaggaggaacagagaaggaccgatatggagtaacgggagacagacgaaggaagaagcagagacagatgttcagtgaaactgcgattccaaattgacagcaccccagagagctcgactcgtcagagacattttcccgccgcgtatcttcaaaaacaaaagagttctggatgctcgagcttctctgcgaatcttctgcctcggacgtcggtcatccttttgtcgaggagacgtatctcctaaaagaaagcgctcgacttgtctcgaccgcgtagctcgtaactgcagaaggtgacggcggcatctgtcgcctaccgcctaaaaaggaaagagttacgccagggaggaaagcggtcttgtaaaagctggtgcgacacacgaaacaagaaagaagtctcccaggccgtcgagcccgccgtggcaaaaacggcccgcgtttgcatgcacgagtaatgggaggtcgtttccgccctgtgactcaaatccgtagaaccttagatatttgtctcgacgtccaggctgtctaacaatttctcttgcaaagaaatcgcggctcttcaactctgcggtgctgcaccctctgtggcttctctacgagcaacagcagggtgtccgctgagccgtgaaaagaactcgccctgcttttctctactcgctctcttccttggggccatcggcgagaataggagctgtgtatcgtctctccctggtctacagcgagagaagtgtgcctttctttctccgctgtgcttttctccctcgaactcgcttcaagca

SEQ ID NO: 2351 - DNA, 1520 bp, Toxoplasma gondii
  source 1..1520: mol_type = genomic DNA
aacatcgtcaagtgaacctttcctccaaggagaaggctgctcgccaggcgaccgtccctgtatttgctgcccactttgtgaagccgaaacgctctccatagagagacacaacttgttcgtaaaaggcacgcataactcgaaatggagagagtatgcagtctttaccccagaaggacaggccatacagagtgcatttgacggcagatgctctggcacagtgcttaggaacagaagtaactgacagcaaactgacttttaaaagagcctcgtttggggacttaaaatgaccgacagaaaacacgcaccgagcacggcttctacgaaaaaacgtctacgctctggtatctatgcacacattttggttgcacgcaaagtcccggaactcagcatttatgggtgaaagaacttgcgataagcgcttttctcaacagccatcaacgaagagggctgacgtccttttggcatttctgccgaacaccctgaaagtgtttgactgccggcatgcacaaatccacaattctttgacagcggctttcctactctctgcggaagagaaaaagtcaaatagtctgtgaatggtaccttgaagtgctccttccgagcagtggtcacttctgtcggcacagcaaataggcatgtacagagcgcgcgggaaaaggtcttttcaagtaggcctcgctgcacatgtgagttcacagcagtgatgtgtttgttttcaactcgcctgcgacaagcgaaaaagaatctactgcgaccaactcccctagactgctgtttccttctgcgagcagaaatcacctgtgcgcagacactgattgtggttgtagttgcactggggatgtcttcatactaggaagccgcattcccgaaacggcggccaagctgcttcttgtacgtataatattgcgtcccacacaaacatcaacgctcgcgagggtgtgcatctcgtactggtgtccggttacctgggcaggaaacgagtttcgcatagagtgttgttggcaaaagagaatgtagtagtggatatagtcgcgtcaacagcacgctcgactcacgaggctagaaacgccgtcgagctgagacaccctttgaagagcagaccgccgttgttatccgcgtccacagcctgcgtgcaggcgtggctgttgtggacagcctgaagcaataccattcttttcttgtgtttgaccctcgtgaagaattcacacttggatgcgtaccgccaacgccgtttgtcgattgtgagtctgagccacaacagagcactggtgccaggtgggagtgcatcggccgatgctgggaaccgatcatttttgggaaacccacgatacactttcgccgctagtcgtgcgtctgcgccatcccacttttcgtcttcgatcgatctctggcttgcatccaccggcgataggaaactttccctgtttggtctggcgtttgcgtgaacgctcggtacgcactctgcccggtcgaagaaccgtcacatacaggatacattttccctttgttgtttgtcaaga

SEQ ID NO: 2352 - DNA, 3163 bp, Toxoplasma gondii
  source 1..3163: mol_type = genomic DNA
ttgtcaatgatgtttttctcatttgacggccgcacgcacaacgtactagatgctacaggtttggctgggtgggaaaaggcgcatggaggccgagctttcagtcgcttgcgccaagtaattcaacctgtttcgacgatgtcatgtggtgctgcagtcgccaacagagacaggactcgcatgccgttgaaccgttcactttttggatttcgaaaggttcaaactccagcgcgtacctaggagccttttctttatcgtttgttccacagttttttcttcgctcacgagtgaacaagatgcgtatacgacactgtggtttggatggccctcgcatagctgaatttaccgcgcgcttctcgcgtgaccgggcatcgaaggcggcttttgacgtgaacacaaatgaccggttgggttgttcagttgcagaggtacaagataccgtagcttaagaactgtgtttctacaatggccagactccgcataaataaaacaacgcgcgcttggcctatcagtggtgctgcagtacaagtttgtgaaggaaaccaatcggctcgcctgtttggaagtaggatagaggaaaagtgcatgtatagaccaacgactggccaggagttcccatgtgtggtcttccatcaacttgctcaacttcctgtccgtattgacagctcaccaggctagctaccagcgcccagcggaatccgtcttagtatcgcagtctacgacatattttatttatttccagaatgcttgtttgtcgatgtaattttgatgagttctgttaaaaagtaaacacgaggcgcccagatcaaacgcggatgcccctaaaccgtcctgtatcctcgaacctcttatacgagctgttctagggtctcccagttctacccgccttccgtgtccgctctctttcctctttaacccaacgaagaagccggaaaatgcaggaggtgtggctcaatctgcggcattttcatgatgtgggaaacgtagtcctgccaaacgagtatgtcgctctcttccttaccgcttgggcaactgtgatctggaagtatgcaaattgggggcacaaagtcatgaatcttccagctagcctgagctaactttttcttcatgggttctgtcctttatgatgaggtttgtgtcgttccaaaaaagtaaaaaacattacttaacggctcgcaccatgaatttacaggacgacgagcatcagcagtgaacacatgagaactggctctggacggcgaaaaccagtgtgctcggcaaaatgaatctgttttcctggtaagaaagatgcattcgcccgcttttctttaactcgtggttgctgttcacggtgtgcggccaaccactattctcgaactcggtatttttcgcctctttttctttgtctttttcttcgacctgggtggcgtgtcgtgggaatcgacacccactcccatcgcgaagaccaggtacaacgggtctgagacggttttacaggtacggtttcttgagaccccccttggaattcgacgacacactcatagttgccatttcacggaaaaccacatgtgaaacggctgcgggggaacacccgtgcagaaaggattcgagtgcatgaccgggcaattatgtcctgaggcggacagcttgttacttgctaacgaccagacatagccagtttgactctcacctgccgtgtcgcttgcgcgtcgctcgacgagtccccagccctttctcccgtctaaagaaaagacagcattttgcatttcgttctaccatgggatgaaaaacaaaactgtcacttgaatgcagactacgtattcacccacttagacgtacgagacgtacgcaggcatctttgtatcgataattgccgacacatatatgcggcacctgtgtatgcccacgcaaccgaaaaagcgtgtactcgtatctttacagttgaatgacggaaacgtaagtaaattttttgtaaatcgtgaagcagggtagttgtgtttctcattgttgtcgacactagacggtcgactatgcacgcgtggagttacacaagttttaaatgagtcaatgaggtgttgagccgcatggccgtgcgtgcgcctaaatgtttttttcggtgtgacgtaagcagaaaactgtaaatggggcagaagacggtgtgctcggcaagcagccagacctttttttgttatttcaaggaagttcgcgcgaaagcggatgactactcgtggcttccacgcatttcttcactgtcatcttgtcggctaggtaaacgctttttgagccccgtaccgccttgtgtttatgaaactgtgcgtggcacgcaggtcctcccagttgctcggcaacagtatattcaactccgcattagtcctttatccactcaggaatcatcagtctctttctcgggggcgcagctgtcaagtatttcacatcgaaagggacaccgtttttcactggcctcccctcaggcgctcggcttggtgagctgtccgagttacagtgttcgtttctgtttctgggggtaaacgaagcagcaaaagtgattaagcggcggcaagtatacttctgccagatggcgggagtatgcgcgaacataaaatcagatgatccgtaaagtggttgtgtgctttgttagtgttcatcataactcatattccgtttggatgtcttctccgcttcagaagaattcgggactcctaacaaaaggcgtatcatatctcgggcttcttcatctttgccttcttttcttcctctgcctcatctgctcctccccccgcctctgcactttcttctacttctcttcctgtggcgcgaccctagcagtttcctaaagctttcagaggctttccaggcacgcaaaccggcggggtgacgcatgcaaccgcccactaccctccggaatctgaggacgaacgcttaaaccgacagaagcgttgagttatctcagtttcgccgtcatacttatcattcaatcagctatatatatttatacattcccatacttcagacagaagtatgggcgtacataaatcctcttaatgtattcgggactaaatatgcgttgcggagacgcattttgagttgtatgtacaagcaataattttccgcttttttcctacttggcatagctgttgaaaaggcgaaacagagaaggaaccctttgtccgttggaatcagtcaacga

SEQ ID NO: 2353 - DNA, 2497 bp, Toxoplasma gondii
  source 1..2497: mol_type = genomic DNA
tgaagaagatcaaagagccgttgtcttttgggtgccgtgctttgcgccggttcttagaggcacttttgccactcgcatccacgcctcttgtcgcaacctcggtggatatgcttcgatctttgctgtcccgaatgcaaacacagttccgctatttgaaggccgcagcggccggcaagcgggcaagaggccggaaacaacctaggattttctttggattttgtgttttccgagtactaacctatcaccccagtgccgtggtgcgatggcagggaccaccgttgttcgtcatggagaaatgtgacgtcaccacatttcaaatgtaaaagcacagagcgcagtgttccaccgtcagaaaaacacggaatacgtccgggttcgccccgccggtgggtgggtccatcatttctttctgcgttcgtgccttacgtcggcacgtgtgtgtgccagccacttttggtcaagtggcagccaagagctgtttcctgcagcggtagaagacaagaaaatgcagtcgtttattcgacgaatcagcctgtgacattgtatctgttttcgaacgactccccagagtgggtacggattacctacggtagtgtggccgcaagtcctatgtccgtattaagaggagtaacacaaccagaacaagaagtattaatatcccggtggatattgtgggtgcgacggctcacggacatccgccaatgtgtgtgctctgtgccacctgtatcaccacaaccgttgtcggccaggtggcaaacagatcccaatttaatgctggggtgcgaaaaacttagcaggtgctgtgttttccgctagcttaggctccccagcaaaattagagcattactagtaaaagcatctagtcagttcagaagacgcaacagagcattgcccagtgagagtcgacacggtttttagtggactctcgtatcagataacggcgcgagaaaactttttttccccctggtttgtgtgtccgcggcagagaagtgtactgggcgcctgtctacagaaagagaaaggttcgctgtcggaccctgagaagaatggagcagattgcttccgttcatcttcaagtcgactcaaatgagtgtagtccgagcctgctacggattttgaaggagctcattcagttaatagagatggcttctgtgtactgagaccacccgtgatgagcgcagtgtagcagcgagcactgttattggcaggaaaagacgaatctaacagaaatgacagaaataatttgaggtagttgacattcgcggcacatcggaacaccagtgttgccattttctggcgtgcttatgcgggctgaccttgtcgaggagacctttggtgttgctgcgttaactacactggcggaccgaggccagtgaactagcataatcaacacatgggcatgaaatactataaaacagagtcatacatacctagaagcatagacgcgtacggccgctacatcgaatgctgaagttgtgaacgtgtgagggagaaatataagggcgccagctagtgctgcagagtatttcggcaaaacgatgtttgttctgttctaatggtaagccgccggaccttcaggtaccatctttgaggagatacgcatgatatagggatgactgcagttctttcattccacaaggagcaagggagatctcccgctgtccgcgtccttcgaagatgaaaataaccaaaacggattctcgaggctgaaccaccgtgtcggtaaacagagtcgtgttgcgatggtttctggcgagctctacagcagcccaccgtctgctgcatagtaacgccaatcctatatattgcagcgtcaacgaggatgtcctccaggcgaatagctcctctaaagacgtttgtgccaaactatcaagcggggaaaacagtggattcgtgtagattcctttgtgccttgacccaagcacggaacacaggaaagtgagaatctgaaaaatctgtaccgctggaagctgtataggtgaacttgtgaaattacgagaagggaaaaaacgcacctgtggcgtgcgaagaggaaatgaccgacttctgagcgtttgtggtctagtggtagaatacctcgttgccatcgaggtgacccgggttcgattcccggcaaacgcacgttctcacatgcttcttatttcacccgtgatagttcgaacctttgttgaaagaacaacggcaccggcaccagaacatgcttcaagcaaaagttttcggctgggaaacaagaaacatgcggtccccaaaagcggaaattcgaacagtgcgagcgtttgtggtctagtggtagaatacctcgttgccatcgaggtgacccgggttcgattcccggcaaacgcacttttcttatccagcgcttcgaaatcacacaggatacttgtacccgttgttgaaagcacaacagcaccgtcgccagaatatgattcaagcatgttttcgacagagaaacaagcaaagtgtggtcccgaaaaacgggattgtcaacgctgtcaag

SEQ ID NO: 2354 - DNA, 3309 bp, Toxoplasma gondii
  source 1..3309: mol_type = genomic DNA
ctaccacattgcctacctgcttctcttccgagagatcctcgtcgatgcgacagaggaggaagtgaagacggtcgagaagaaccacgcagagcaactggctcagacagacgccgcgaagaagtccaacggcgaagagaaaaacacccagtaaaggggaaacgtgtgatgtccagtggaggggttgaaacgtggaaagaggaaaggaaggcgaaaggtctgtcgctcttttgtccacccagaaaagaacggtatgcgtatacggcacgtgcgagtgcttctcgaccgtgtggatacacacgcagcctcggagatgctggaaaagagagaaaacaaggtaaacaggaccgtgcaaacaccacgcatttcgcaaacgcaaggaggaacgaacggtggcttgtcgaactctacacatgcgataaaggtgacaggcagtcctgtgtgtcacagagccactgagactttgtcggcaatccccgggcgctatcggtgcctgcgttccgagtattccagaagaggcatcacatgcgcagaagactgctgaacttgtggacttgctttcttcattcttcgcggacttcttcggctgtgatcgaaacgattcacgcgtgttccatcggccatcaacaaaaagactcttgagatacaccaaacagatagatgtatgacacctgcagatagccagagagatttatggaatttcagcgtaggcaacgtcgtacatgacgtttatagataggcagggagcttcacagccttcaaccaaacgagctcggcgtgtctgcggcgttacagtcccgtgggccgtgaataattaggaatgtcaaacggcgtttaggtggccggcgtgcgcgagggcgtcttcaccgctgtagaaggaaaccgcgattccagcctgttcggccgagcgtagagtttcaaccgagaaaggcgaagagtttagtcaagcaaaatctgcaggctcgctgcttttccgggaaaggtcacggaaactagcatgcctccggtgacgatcgacgctccaacatcacccgcgcttcttttcgggacttgtagcggcagggaattttgaggatagctttgctcctcggagtcgcgcggtgcctgaatgcccgctggcacaacataatttaaacctcctgtcgcatctcctggcaatcttatttcgtggaaaagtgtcgtccccctggttacgggtaacgatggaaaacgcttgctgaggctaaagtccggaagaacgcagcgcccacgagctccaaattacgaagtgacggtttggggcgtgtgagtgcctcccattaactggttgagagcttgtacggtaattgtaccactgcaggaccaaataaggtgtgcagcatttcctatgctcttgaacgtttggtcagtgtggctcgccggatgactggagtgtctacgttgctgcttcgaggcaaactgttggcttcacgctaccaaaactgggaataactgtcgctcgcacgatctgccgtcgcacaacccgacacattccctttaccactgaccctagaaagcgtgcacactgccggcgtttcttggtttcgcactctgagtgcacccttgcacactcttccctcaacatcatcatgtgttatccggagcactggtattccggcagctttgacatcgctgtcgagtgaaacggcccgttctcatgggggcgcctaaccagcgagagagtggtggtggactccagctcaccactctcagggggtggaacctgcgacaacgcgacgtcaatgtgctggccgttactgcttgaaaggtggcgaaagaaccggcgctccaagtcaactggttgaattcgttaatctgccacgcttccgtctcagtcccccgttctggttaggcagacgttgtcgccactgccgcctttgcagggcacacccgcgtgggaggtaataaagatcctgcgtcagagacacaaagtctcacagaacacaaggcaagagcctgtcgttttcttgtccgggcacggtattcgggtagacgcttcggaggccgtttcggcgcgaattgcgacagcagcgcgttcggtatatcgggcagtttaggggttggttctgggtttttattagctcgagaatctaagcctgtgtgcctgtgagaccaaacacagaacagtctgttagcaacttgcatcgtgcgttccttcgtcgcgtgagcgccgaatggaccgagacgcacactggtgtgctgcgtgtctcgaggtaaaacgcggttttttgtgttgggttcgtagtggcagacacagtgaatgctggaagtagtgtccggttgcgacacgtcaaccgcgttgcttgttgtgcatttgattcgtgtgaatgagaaaacgcatctcgtcacgggaggtgactgtaaggggtgacacacgtttggtcgttgtacgtgcacgacagggccggtcattgctcggtaacgtggatggcagtctacagggatcagcgtctctaaaacgagtggtagttcgtctgtgtacagcaaaggaaaaggataggacctgtacttccccggtttgcccgaattgatcaggggtcgcatgtctagttcgctatcaccgtttgcaaggtctgaggatgcttcaggttgttgctcactggcgagaaagtcggcagcgcagcttgaccttcccgaaaggtgggaatgttcaagaaacaactgtacccatcagccgtacagagaaacgtgctcgtgatgcaagtgcgttcagctgttttcaagagcacgtccatgaaagtttgaaacgtggagtgtcgccacctacgcagactgagagggggagtcttgtgattgacccgtgtctgaacggagtaggcaggctgtttctctagtttacagcttgctgacccgctgatacaagcctataacgtcacacaacggccgttgccagcagtgagtgtgaagatgtggtcgtggtgttatcgttggggaacttgttttttctggggtcaaggactgtcatggagtcgctctggatgtggcgtctctggtggactcaggtagggttctgtgagtgaaggcgagactgtgaggtttcaagaggccggaggcgggggtgtggacgccggcgcagaattgagcctgctgaaagttgtgatctcagaaatctgaattagtgtaaagacgaaggcgtttagcggcggagacttgccctcccgcgggtctcgtgtctaccgctccgactctttgcgtattaacacgtctggtgtgacggaagagatctgtgcggcggcagtcgcgagaaggaaattaggcatttcgaatttgaagtgcattcgccttcagtggaaa

SEQ ID NO: 2355 - DNA, 2710 bp, Toxoplasma gondii
  source 1..2710: mol_type = genomic DNA
acgcccagaaactctgtagctctgtctctccttactcactaagagccccgcttccaggaatgaacatctacacacgggaatcgtccccatcatatgtatatatatatatatatatatatatatatatatgtatatatcgatatatctatgagtacgcgttttggtcactgcttcggtcgttttttctgtatggctttacccggggagcagcggacgtgcttcagcaggtctgcctggagcgttgagggcgatgaggctgtagggcatggattgtgtagcgcccgttgccgcttcttcctctggattgtgggtgattctctggaggagcactcttttctcctcctcaaaggcgaggccttcaccgtgaaaggctcgtgcgagacgaagcggcgaggcggaaggtcggttgagagcgatcggacgcatgcgactgccgcaggactggtgccttcgcttcgcagagggaccggagggaacggtggggcaggcggcttggtctgcagagtcgacgaccggcggaaagaaaacgagatgcgccatcgtgaacaacagggaaaatcaggtgcaagagtgagcgaagagagggaaggaaagggacagtgggtggcgcgtccggtggaaatcgaggaaggaccgaatcaacgtgatggagtagaccacgagctacgggagagtggagcccggcggaactctcagactgaggccacagcccgcgaaagaggagggatcagatttgatgcaaaggagcaaagaaagaaaggagagacacggggaaaacgctggacggcaaggcagagagacacagagagagtagggaccagtctagtctgggatcgaggcgtcgtcgcttgttgggggaaaagaaccggggaaactcgaacagcgaagccggaagctttggcgagattaaccgcgaacttttgcgctgtgtccgccttctttcgatggcaaggaaaggggagaatttcttcgtctcgtgaaggacagggtcgccgccgacgcgagtcaagacactcacgtggactggtgagcccgaacctacagattttaccgactcgagttcgagaggagcaagaaaagacaactgcagaatcgagagagtggaccaaagaagtctctggacttgttgctctcaagctttcgcggatgttctcccgacgttttcagctcgattttctcggtaggcgaggaacaaacgcaaaggcacgaaccggttgagctctctttgccggcgcgctacgatggccgcgcagctcgggtgcgagttagcgagtccgccgcttgcgcggaaacagacgaagaccgccgaagaaagtcccgcggacagctcaaaaaagcgacaaatttatctgcaaagtcaccaggcagataaagcggggccggacgctcaaagtcctcgacaatttccgccgagctggcgtcgagcgccagctgcagcgcgaaaagacgagagggcgcgcgcggtcatctggcactgggaggccgttcttgagtcggaggtcagcaacgcgagactcacgggcagcagcagacggaacgccggcttttcggatgacgagtacgagtaagacgcgcaaacgacacgtggatctgaaaacggagatatccgccggaggaaaaggcagaaaaagtggagaatacgtgatgtgcatggagcctggcgtcgcagcgagctgccgaagccccgtgatcacctccgtgtctgggatgtacataacgcctgaatgacgtcggcggttcttgggacgagaggccgagcaactccagaacgcggccaaatgcgtgtagaatcgcaagggcaaaagaagtttggttgcggtcttgccacgaaaagagattgcgtctcatttgcacgggaaaaggccccaaacggggaaccgcacgtgaacgcccgcctgcgagtcaagagagtttagggtctacgcagcagcagctatcgctcaagcggagacgacatacgggacagtttctgaatgtattttgtcgagatttcttcctcaacgacagaagcttcttgcccctttcatcgttctgccgttcaggacgaccgattggactgtctacaacgggtgttaccttgtcgccgccgcggcggcacagcacaaagtctttttgctaggttgttccagctgtcttcatttgccgactttttctcatgtgtctttgttggtctgcacaatttcgctctgctcgtccctccagttacgcacgtcttaggtcggggcggcttgcactttcctctccgttgaaaaacaatttctctgtttctctctcgtgcttctctagatctgctgcatgtgcgaccgccacgtgagcaactctccaggtctctccctcgcattatttcacactgctgtttaggcgtcgacgtggacgtgaaagggatcctcacctcttcaaaatcgatttttgcaggtttcctcggcagtcgagaaacgcgcagatgaacacacacaactccatgggtgtgtattcaagtgttgccgatagataatcagtttggagttgaacactaccgagctgtcgaggcagaagtgacagacacagtgttgggtgccttgcctcgaagcgtccccgtcctctacctcgtacaaagcggactccgccagaagaagcagagagcagtgggctgccaagggtggtcgccagggaagcacagcctgaggaacggagaagacaggaggctgagggaggaacatagcggcgaaaa

SEQ ID NO: 2356 - DNA, 2048 bp, Toxoplasma gondii
  source 1..2048: mol_type = genomic DNA
tccaggagcgtagtgtacatcgggcacccgcgatttcgccatatccgagcaagtccgagaacttcttgcaggggaaggaggagaccttgaacgtagggaccctcttctccccccctccggctcctccacccctactgatacggcatacattttcaatatcgacgtcagtgttctacagcttagaagaaacacccgatttctccctcgaacagaacaaacacatgcgcagcatggatcgtccagcaaggcagaaaacagcgctcaggaaatcaccgggaagaaagggttcggtggataaagaatatgctgaagaaagggttcggtgaagaaggagtatgttgaaaaaaaagggagggatgtgcggaagcaaggcaacgttggagagaagccggagcagccccacgcagactaacgggggcactgtattagaagttaatatgcgtgtgcaatgaaggcatgaactacagaagacaataaacggttaaaagaccagaaattccgcgtcgtttgcttcttcaatccttcgttgtggtcgacaaatgcagttgtttccagcaattcgatgcgtaagggcaagccgaagaaacaaaccgaaagctggaacgcgcaacgaaatgccattaaagcatacctgcttgatgagaaccctccataacccttcgacggaggttttacccatctattttctccactctcgtggaacacagaagaacggtaaattcacagacgaggtgcaaaaccgggtcttcgtgtggtcagcgcggttccgcgacttagcgctgcagtaccaaagaagcagcagatcgtctcaagacccccgttgtcgcgtgagttcagaactgctgtagacgcaatccttcactgcaaaaatgtacgtcgtttcaggaagaatttgcagggaacggagaccaaacaactcgcatttgtcgttggatgccagcccgccagcatagggtacttcggcaacgcctgcgctcaagacgaagtgtcgccggaaacagctcaaatccccgaaaacgccgtgtaaagatccggtatctttgaaaaagaggcacagtctttcagcaatttgtccctttctgctccacgaatctccggagcactcaatagactcaagcgcccaagatcggtgcacatgtcctggtgggtggggatttatgtgaaaaggaacggaagaaatgcagcctgtttcattcagaaaaggcacctgcaacggtgacatcgagatacggtttctgaggagaatggtaagtcttgaaaacgcgatcgttttgcgtcaacagtcgccgtcgcaaccggaatgttggtggctcggaaaccaccggacaccgggactgcagcacagacgccgtcctattgaaggactgtctacgaaaccctgcagttgaggcacttcttaaagatatcctacggacaaaaatgctgagcaaagaaagaagcgagatacttttcccgtcgcgaagatgtcggggtgctacggaccgcggtaggactggcggtacgaagacggcagagacttccaggggtgtcgcagcatgcgagggaaatggttggacaaacagggattttcactccgaagcaggtaccagaatctggggaaaatggcagaaaaaggctgagtttcctacactgatgtcttccaaggctgattcgccgatctggactttccatgatctgtacagagacctccccttcattaagacttgctgaagcccatcgtcttgtagctgacactgtcgatggtctgtgaccgcatggcgaaagtgtctagtcagaaaaaggagttcccccgaaagtgtcttgtcaggaaaaggatttcgtcccgccagatcgaggtatccagatgcctcgagtagttgtttgccgaacaaggctgccgatgtgccaagcggctgaaggaacgcagatttaccatcgaacggccagacacacaaagtgaggattgaggcgtttgcctcgtcctcgcttattccctgatcttaggaataaactgattcggaatgcctcacagcatgcgtcgtgtaagacgtagacaagtgctacaacta

SEQ ID NO: 2357 - DNA, 1649 bp, Toxoplasma gondii
  source 1..1649: mol_type = genomic DNA
gtgaaacgtgtttcaccattcgactgggtgtgtaagcgacgacgggatttcgcagttcgttttttcaacgcttctgtcgctcctgatcccttatccaagccaagagcatggtgaagcaataattgtgttgttcattgttcgacagcgaaaggtccgggttgtctgtctcttccgaatacgcaaatgaatcgattcacccctttacccccttagtttcattgacaggcatcggagaccctcgcaagtagctttagtcactctgaagtaaggtttggtgtctctaggaactcctccctgagcagtgccacatttgaaccaggaatgcacctatgtgaatacgtaatcgacgttgtcatggtagatgggagggtgtgcaactagacaacgactctagaagcaactcgcgtgagaatggctctatctccctacgaaaccgaaaatccgcatccatgtactcaattggatagcgtaagagcatttgcactagaaatcgtgaagtgcagatgctgttgactatcctttttgcgtgtaggcagttagggaagcgaagataagacgtcccgaacatccgtcttagcggggtagttgcagcacttgaaactcgagagtagacagatcgagataaacttcatttccgctttccctgccgataagtcaagtaatatacagcggacgtcggagtgtacttgtgaatcaccgcttcgccttctctactccgagctatttttcaaatgcactccgaaaagactctcgatcgtctacgtcgccagcgacgtaacccaaaggtggtgtgtgccgggtgtggtgtgaacgctctagtttgaacactggactttttctttgccaaggcttttgctcgttgctggagcatcgtggcttggattgcatatctttctgattctgaaagcttagccaaacgcttcttagtagcgtcaaaggagaaccaaggaaacccgacactttcacgagtctccaagaaaatgtggagttcattgaggtgcattttaaccagcggtgtttaacaggtctgtgcttgcctgcagctttcatttagcttccgtcggcgtggaaaaaaaccgactaagcttgtatcgcacgcgagcaactcttggggtacgacacaagggaacgccggaagcatgcatgttcttgcactttgcgtcccggtgcacaaaaattatttggggctctaaatgcgtgcatcgaaccgtttttacgccgtttttgtgtcggcaagagtcgttttctttgtgaaaaggcaggagagtcttgaacgtgggagaatagtgcaaaagacggaaatccgaatttcgaggcagatgacggtttcactggccccggctgtccttagaaggaccttagatcgtaattccgcagtgaagccacgtcgtcgtttcgtgttttactagccgggagaatcaagcgcgcacaacggttggatattccgtaccaatgacgaacgaagtaatccagacctccgactctctctcctttgtttgcttttctcttccgctgtccggcgttgtgcatcactttgtgtagcaagacagaaagcctctacgcgcttgcgcagcgcaaatcaactcactctgcaaaactgctatacgaaggggtcaaaaaagacactcaatcggctaccaaaaccgcga

SEQ ID NO: 2358 - DNA, 3865 bp, Toxoplasma gondii
  source 1..3865: mol_type = genomic DNA
gcaagagtgcgagaccggcaatagtggtgatcatggacacctccctgcttccagctgacggctccgtttctgctcctgccatcggatctgcaactgctgtctcgcccgtccctgtgttgccaattggaacggtaggagcaccgtttccttgatggctgttgccgtatggagggacatatgtggggcgttgaccctgaacgtgaccggaattctcacgcaaatgccggtcggtagttcgcatctgtccatgcggatggggagagcgagtcggaacatgcccacgttgcccgatatctcgattgccaagagtgtcagttctgtaacgagctacgtgtgcgtgggtgttctgcgccgaagaggtgccttggggcgtcgtgcctataggatggtgagacactggggagacatgaggatgtagcgaaccaccaactggatgagaggtagctgctccagctcctgctgcacgtgcgaatcccctcccgcctgtgttttttgccgccacatgagcgaagtgagcaccgtgagatgcgatgtgcgctgcttccccggttgtcgcagttagacttgaaggagcggaagccgccgctcctgtagcttttgaaaggaagcttccagatcccttaagcgcagtcacggcaccctttgaaaggaacactgcaccggcggctttccctcccccagccacagcggtccctgccgcacctgctgctaatgaaacaggagcagctccggttacggtgctggcagctgctgctcccccagcaggcaaggatgttttgagaagcactggtcctagagcagtcaaggcgatcagggaccctcctccgagagctggcattgttttgcgtttcgaataggaacaaatgtttgccaccaagcggacaaaatagcatgggccatcgagcagtgccacgtcaacagttgttttcctagatgacaaatactacgggcatcttgtggcagctaccatctctcacgctaaacgaaggaacacttgggctcagaacaggacagagacgtttgaactataacagccacaaggttgggtgatgcgttatcccacagagtcaatgcttccgcaatggagcgaagacgattctgaaggcattttgtgtcagccacccttcggacttgggcccgtgtagcgaaacatgaaacgtcagcatgttggactttcgtcgtgaccagccggccagcaggtagatcaggctcatgtctcagaaaatcagaagcaatacggtttcaaggtctttcctccagccatctgaagagccatttacctgtctattcccggaaaaaagtggaccttacaaattctgaacatgaagtggaaaagtaatgatttcggggacattgtttaaattttccgggccactgatgggaggaatgagcgcggaacggcgcaaatgtagagaagtgtttgaatcaagcagtgaagtggatataatcacaaggaactcgcgattgccgggaaaccgtttacacgaaagcgctaagtcgtagattggaaacaagagctgcccctttttgtaggtaaccaatagaaacaagtaagtcgacgtaaatgggatgttatgaataagtggcccccctccaccactttctttggctcgctacgtggtgtgcgagcatgaaaagacagccaatggaccggtgcacagatatcaaacgtgcgttggtcgctcacgcctggactacactctcaaatgatcgacacggcgtaaaagttagtgatgatgtggctattctctcaaacagactcaaagtctctttgaaacaggaatgaagtcggtttgaaagaagctcgtgtaggggaagcttaggtcctctcggctgtgtacaaataaacggaacagtatcctaaagcatagcttggtagtgtctgagactctcgaagtcaccagtgtactaaataaaacgtattctcggctgagacggttctagtgtcttagaactcgtttcaatgactggacaaacgtggaggttgagttttccattttctttaaatttcaacaggggatacgttcatagacctcccaaaagcgccgggtcttggagatggaaggacgagaggggcatcaagctgccgggcacccgacacaaatatcggcgcctaaacgtaaccggcttgtacaccgaaaggtcttcgaaacaaaattcatatcatcgtgttcatgaatgacaggaacgacagcgaggggagacgcttgctactggatgagataaggacgtccggtgggcggattattctcgtcctggtgtgacagtagacaatgcctccatgacgtttacgtgcatcgggtatccttggtctgcaatcaccattggttgattcaattgtcatcatatctcacactcatgaagcgatcagtatccgttcacccaatccttggacacaccaaatagaaccagtaactgcgaagttctggcagcaccaactacttcatttaatttctgagactacacaggctgtgtctgtgcagaacggattgtacctagacttgtatcaacgcgacataactggctgttccgcaaacggtgaatggggcatcccttaagaacgacgtgactggcagaagcgaggaacgaaaagagggaacagttttgttacttgccacttcgcccgcaatcggaatgttgacatttgatgtcaacgtcatcttcttgtgcagacctttcatggttgacgcaactgcgagattgcattggtggcactgagggaatcatcgttgggatgtggctgaactttctgcagcttggcttgtccaccggagcactcacgtgcctttcacgcttcactagaaaacgtgccaaccaagactgcagcttatcttgagttgatgtaagcgagcgaacacagaattatcatgaaatgagttgaggcatcagagttaaggtaaagcgtacgttcagcagcccgcacctacagagtgtctgtgtgacgaacgtcactggcgtgtcagtttgctcggcgtgccagatccattgacgacggctacgtttctcagaaagctgggatatctttccttctcgtaacgggccatctgccggtgactgcagaccatacaatctgaacagttttccttcgtctgtgcgacttagaaggtttctatctgtggctgaaattcgtagaatcaagaaggtactcgcttacttgtaggacaaaccaggcgtgcggccaactgatctgaacgagacgtcggccgccacagctagttgcgacgacgtgaggggcgctggatggatggtttgtttccgtacatgggactatctgtggagtactggagtctctgttgcagttcattcttgtttttcaaattataagaaggtaattgtggtagcttatgaacaacgtcttttcgcttctcttggcttaaaggtgtctcgaaggtttccgtgggggtgccgttgccgttgcgaccagcgtaaagcgagaaagtaacgcttgggtttgttctgatacttcaaagttgaaaatctcaacgttccttataagtgagcaagatgttgcaaggacggatctctagaggtgacactgcttttggtaccttcagtggacagccgtgtcgcagcagtttcgcaagcaatcttgtgtcatacgtactgcgcagccaagcgagtgtcttcacagtctttgctgttcttgtgtcttgtgtgattacaaagtttggcaccttgttcacacgatgatttcgtccggagggaacatgcacatagtttagggaaagcactgtattcagtctagtacgtgctttctggacaggcaagcgagctgagacacacaaaatgatgttgttctcttgttcacgagtctgtttaattccacaggattttggccccatttgcttctttcgtgtccagtgga

SEQ ID NO: 2359 - DNA, 2226 bp, Toxoplasma gondii
  source 1..2226: mol_type = genomic DNA
ttacctgatgtcgaacgaggtgaacatgctggtggttaggtaaggaaacggggtggaccaaataaatatcacgagatttgtgttaccttgccacatttctctgcacgtatctgtgcaggcgtcgatgtacacgttgccactcgagatttcgtagagcatgaattgtttgaggtgcttgtattcacctgcagatcaacagctttttgttttactcgtgagtgtttacgatatcggcgtatctcacacgtaaaggctgcttggaaattgctaaggagtttgaagcaacgagaggggtcaggagcctcagcaattagcccctaaaaaagggttctcatcaaacacgggttgaagtgcaccagcttttccactgtccatacccttcggaactggaatgtagtaagagcaacggacgtgcacggtagtagaccaatggtctgggaatagctgccctctgtcgaatatgcgcccacgaggaagcaaaaacaaacgcaccgcacacagatcggtattgaatttggagtaaagtctgtcaactcgtatgcacgcgccgaccggtcgaagatcctcccacgcttcggcgggtccttcactggctcgtacctggagattcacgctgaagacgatcaaaatgaaaagagatatatcttccttcactgtcgccatcatcctggacaacccaaagttacaagggactcagctatcagacgcagttgtaaatttcctgcagtttcccttcaggaatggaaaagatagcgagactcagttgtccgcgatctcttcaagcacactaagattcggttgtacaggtgtctctgtgtacatacaggtgcgtggaggaaaagccaactgaaaccagtgcgtgtgaagggtgaggaggacggctcaacatcgaagcagtgtctgcttgtgtacaccaagccgtctatcccccaattctgaccccgaaccttcagtgttttactgtgcactaacgccttctgctattgtgattcttatctgaacgccgtttctccccaccgatctgtcattgaaacaggcacactgagcgaacgccctacggaatgcttgctatggctctgaattccgtcgtcctgtagaagtggctagattctgccaaaccgggaagcaggaaaacaatcttcttgggtaatttaccaacactactgcagtagttctgtgcatcttcgtctcgactaccggtccaaataccaagttgataaacgctccccggcgggagttgtcgcgactataattgacgaaacaagacattcgccttcagaggcaatcgaatgttcttccgttcatgtgttgaccgacatctcctctaaaatttttgtagtagtcgcaaacacagctctcccagcttgcaatggtgcatctcacctggggttggtgtcgtcccctgaaacaacgctttatgccttttgagtgagagtgttggcgccatctggtggcatgagagcctcgcgttagcattttcatcatacaagaactggaggcatctgaggtgtcttctaccgaacacctctctgcagcgttgttttgcctagtggaaacgtcgcgtgcttgccagctcgttcgctaaccatatcgttcacagcagtagcagcagaaagcatcggcccttcccgatatggttgcctgacaagagtccaacagaaaagactgtggaaaaaagttgggcacgtgcgggcatctacgaaaagctacctagcggtgtacatggcggcgctgcgtcacgtttctcgtagcgtgctcgtctcctagggaatctccgcatgtgctgctagtgcgatttgctgttgcgcagctaatccgcagttcagcccgattgtgtcgtcctcgacgcatgtgcatccttgagtggcgtgcgctcaccgctcgtctctgaacgagcgattcgcctgtcgttatttcttcttcatccagagaacgagcatccttgattccctcttctcctctgcgttttgcgttacaaatttgtcaagtaagttgttcttcagatcttctgagcttgtgggaaatgtaggatagcgagtcgcgtggcagtcgctgcaaccctgtgcaagaggaacacgaccgggcggtgagacccaacaggatatcgagtcgaaacagcaagccttgttacgagtcattagacgtcaggaaaagatttgggcgacttttgatttgcgatgttgcaataaaaaatgtagccgaaaatgtgctgttgtgctaccagga

SEQ ID NO: 2360 - DNA, 1868 bp, Toxoplasma gondii
  source 1..1868: mol_type = genomic DNA
gaaaaaggtcgttcaaccagagctgcgtgtgtgtacgcaaaacatgagatgcagacgaactggacaacgcgtgtcagtacacacaactttcccgccgcaggtctgtaaatttcctgtcgtcccactgaggacattcggtactgtccggtttccacttattcggtttttgctacgaactcctagatcggggagctttggtgacagtatccatttatcgtgtgacagctgcactgcgtatgtagttgacacctgtgaacattatcttcctccgtccttagagatacttttgagtatggagagagaaaaaacgatggagagtgtttgcgtaacctgggtggctagagagaactattgtgaaaaaatcgtcatcgaagaacatgagaaggtttgcacatgctcccttttcaatgctggcaactcccgtagcctggaaccccagactggaaacaatggcgtttactcaaagttatccagtttcctgttggtaaccagagagaagcaggtgacatacgtgagaggtctgtttgagttgattgagaaagatggaacagatgaatccaaagaggacgggtggagcatgtgaaaatcggaacagaagcttcgtgctgcccgacaaagggggagaaacgtagcagctacatagagaggcgggagcgtcaagatgccgagaaataaagacgacgcgcatacaatgcccgagatagtgtgaaaacaacaccgttcaagagtgctttgtgctctttgctccgtgctactgggaaaaaaagcccagcgattcaacatcaccaaaccaagcgatgcttggtgtctttcttggtgtgtccgaatcgcgtgttccagatgggggaaagttgcagctcggcaaactttttgcaaagttactgatgagctctgcggcattcgtttcatttgcttctttgtcttcttgagattaagaagcagtgcaccaatgacgacaaacagcatgtgcggtgttgtccgagaccgtacagaagacattgagggaaaagctgtgaaaaacgagttcgagtgtctctaaactgcaggaaatgaattcttccagtgtagacacaaaaagtcggaaaaggagcagtgtggtgtctgcgtaacggatatatttcagcaagcgcttttgaagaaactgcagtatctgcagacgcagcagctgagctctgacaacattgtttgctgatgatgtgttccctagaaaacgctaccatttgaaactgtgtaaaaatatacagcagaactgcagtctccactttccttggtctccctgatggatctgagacacgcgtttcctgggagtgtcgcagctgcatctttgtcgccacacgaggaaagcgcgtcgaaaccagatgcggacatacgattgtgtcttccgcaaaaccagcagctagctatcaaggaaacttgccgtatcgaaagacccgcccccggttgccactccgagttgccagcgttgcagaagccgagcgtcgttccttttctgcacttcgattctggaaaatttccgcctgcgttccctctcagaaaggcttgtgtagtttcgttcggaagcggtttctgcgggcattcggtgcctagaaaaaggcgaaagtaccacgttgtccgcgcaccagatatgtgcgtctatggcgggaaaacggcctggtaagactcttactggccacaggtggaaatttgctgcggcttttgcgaagtctacctagcagaaacgaccgctgtttggtgacgggagcgaagtgcgatttcgatccacgtggtatgtgagttccgaactgccttgcgtttctgtgttcggcctcaagtgcactctgaattgactcgcgctgtgtagcaattttcatttgtagtggcaaacgcca

SEQ ID NO: 2361 - DNA, 4953 bp, Toxoplasma gondii
  source 1..4953: mol_type = genomic DNA
aaggtgtgttttcttgcgagggaagtcagagcagggtgcgtcacctcgtcgagggacgcctctcgctaccagaggtttacgtagagaccgtcgttaaaacgcgctttgaagttgtcacgtgtaaatcaacatgaagtttcttcacttggcgtgggaagtggcagcctgcacacctgggtgtcacagcgagaagcgggcgatcatcatgagccactcccgcggggtacacgtgaagtcttcgtggcgcgtgtcgtttataacaattgcaacgctgtccggaacggacgaagtttaaacgccttcggtttctaattttgaaaggaccatcagaacgcagcggtttgactgcggtgattagcgacagcagcgcagcctcgtcgacgagacgatctgtagtgatctaaggaaacgtgaatcacggcgaaacagttcgatgcgaaaagaccatttgaaacccgttactcggccggtgttttgctccacacacgatgtcagagttgttgtaaagtcgcctggggtagcgtacccacggcatcgcgttacacgaatacttgctctgctaggtttgcaagaagatggaaaatatcggtttccctcgaaaaacgagagcgttcatccgccagtgcggtgccctccactgtgactcgcggaaacctacgatggcgcatcggccgttcaagcagagaatcggattctaatggacggtcttgtcacggatggccacttggttttttaacaaattcatcccgtggtcgtcatgaccacgggatggacacatttcagtggttcccgagtaacaaagaggcttagtttcgtgaggtcggttatgggcagaagtactttatgggagagaagtcttctgggacggtggaggagcgtagttcgagaggcaatttctcgaggctgatgctggcagggatcggattctgtgatgttttcccggcacacctctgtactccaaagaatgacatgtctcttaccgtctagatatacttgacaagaacacacagcacacaccagggagggagcgcggataccgtttcttactgaggtattttgtgttgtcggcggcgttgtggaagcacagtgtcgggagacacgatgaaatggacaaagagacacctcgaatgaagagcatgtgagaactgtgttctccccagagggggcgactccgttagttgtgaagaactcatgtgtgccaggcgttcagggtgagcaatgcaaactccaagaggtgtacattggaatctgcagatgggaatgcacactgcgtcttccgagaatgtgaacaggtgacggacaagggagttccgcatgcgtttatgcttttaaggaacgaactcgaggcgcggagaaacctgcgggtggttgcctcgctcgcatcagagccgctgcattcttcgtggcggctcaacacagaacagagcggtgctttcgacggcgttgcttgactcccgcacgtcccgcatctgcgtacgccgaaaccaaatagcgtagaaagcgttgccttttcaaaaagaagtgtattcgtttttcgggtcgacagtagggagggaaccgtccccctctcagtcccaaggtggttcgtcctctgagttttcttccaagtccaggtgctctatttcttctgcgcgttctgctgcttcggctgcccgctgctcgccttgcgcgagaatggaaacgatgcctctcatgcggcaagtttctcttgcctgtcgcaggcgatccgcttctttctcgtctcgctcttcccgctcgacctcttgcagctgtttgtcctcaggcctgctggactgcagctgctttctgacgagttcctccgcctccgtgcctcgcaagtgtccctcccgaaacagctgcaggcgtctgcgtagcttgcgtttccgctcctgctcggccatttcgtcgactccagtttcgaagaacttcttccgattttccaaaacaggtccacactgttgcggacatccctggtggcagccgctccagacgacgcagcgggcggcttctgcgccacaccaccgacacttcaactcgtccgttaggttcttcccgagacctctgcagtcttctccacagaactctctgcagtcccagtctctcgtgcaaaagtgctcggagaagcgacaaagctcacagtgcggcttcagcgggccaaaaccgtaaatgtccgtcatgcgagcccaccgctctggagttaagaaatgcggaattgcatcaaacggactctctgtgatggggaccgctccggagttcggaacatcgccgcccgactctcgacttgctcccgtaagctttgattctctttctgtaactgttcgagagtcgggagcactgccaggagatcgcccgcgtgctcccgaggagataactcgtccctcgcggggtcttcttccattgtggccgacgccacggttcgtttgtgtcgtacctgcctcagcgaagtcggagaagacatctaggacaggtgggcggaacggacatgtttcgggtccggaaaaagaatgtgcaaaagccgagtgctggtgtgcgagtctgtctccccctttgttgctttcgagttctctaggagttctactatggacttccgtcacgaccgtcgtgttcgggaatgtcgaccctaaggcgtcttcactctgcgcgacacagatgccgacgagcgcggcggcgagaagtgtgcacacgccggtgcgaacaaacatgattttctttgtcctgtgaggagctaccggaacacacaaatgtgcgaatcgagcccgccgcgctgtgaaacgatggactgggttttagacaccttttctaccgcggcgaactgccttcctgcacttaaacctgcagcgacagctcgtcaaaagctccctgggacaaaccgctggtcaagaagaaacttgagcgacttcgcagaggcttttacagatgctaaatcccagccatcggacaacgcgaactgtgactggcggcgctgtgggcgcgtgcgcgaggttctgtactttgaactgttttttaactgccccgccaggctaaccagccgggctgaaactgaatctccacagacgagtttcgtggagatgcaggcagtctgaggaagcccctctgcgaccgaaggaaaagaagactgaagtttggcaagtgcgactgcgtcctcttccggcacctaggcgtcggtctacgaacggagaaactccgctgatggtgtgttctgagcaacgagagggaaggcgcgaaacggctggcaaacgcctcacagtcgtttcagatggactgtgttttagccaagtgcgacgacaagagctcttcgcttgctctcaactcgaatgcggtgtcctcgcgacaactgtccagcgtcttcgacagtgagcgagatccccgttctcacaaacagctcgtggcttttatttttcttccatgcagcgaatcgtgcgaccggcaagacaaaaggctttaaagaaacgcgatcctccagtccgacaacttggctgctttcaacgcccaaccgtttcttttctctgccacgtgagtgtccgaggggcagtgcgactcctcgtcgtcctcctaactttctttttcgccgtttttcgaggtgcgccagctttcctcgtttctgctgccttttcaccgttcctacaaaactgttcttgcctcgccgctccgaacgcgaaaccgtgtgccagctgcagacctggtggacgactgcacgctctaaagcgtgttttttcgcgggcgcgccgacgtatcccgggagaaggcctcgcttcgaggagcagggtaaatctttacaatctagactgttcacttgccttttctggggtcgcactgggagaaacttgtccgctgccgctgcgcagctgcgccagcctgcccctccccctctctgagctcgccgacacacctctcacttcgccctggtactcgcggatcttctacgacaaagccgccttcctgcagaggggaaaaaccacgttatcgcagtcgcggagtgggtcccgccggggcggaaacgcgaaactggcaacgttcctaaatagtcgcggcagttctgacctcaccttcttcgctgctctgctttgctcggcttctcgtccgacccgccagtgttcgtccctcgagttcgctgtccagaagatcagagaggatcagagagcagagtcaaccttcgtttctatatcaggctggctgtcgactgctgtgcggcttgcgcaaattcgcgaggaaaaagtggaaaagacacagcgattttttccggttttcttcgagactctcgcgttttcttctcgaccgactccgcgaaagagtgcggcaaagactgtttcctgctgctgcgcggcgaactgcgctttcgtaagtttgtctgctctgtcacagccgtttctcgcgggcgcgcgtttcgctcctcgccgccctttttgcgaatacgccgctcttttctcaccacgcgtttccgcgacttcgactccgccgtgaagacacccgaaaactcgcttctcttgtggccgcttctcctgtcttctacctggaatctgcgccctgcttccgcaccgcaggactctgtcaagtcttcttcccgtcctctccccgtctgcgacggtttcgacgcgaagccagcactcacggagatccgcaagatagcaaaattgcacggttgtctcttttccgttttcgttttttccttcctcgcaccatgcgcctctcgtcggcgcgaaaccgccgcttcctccctgaataactctgttgctcgtgcctcctcctccctgctctctttcttctgcgtctcctctctttttcccccgttcaaggagcggcaacggcaaaccatctgttcgcatttaaatactcactcgtatcttacgtgcagaacaccaccgatgtgaaacaacctcgttggtgcaggatactgaagtccagctcttcgccgcgtccgaggctcccgccgcgttcctcgagttttccccaaga

SEQ ID NO: 2362 - DNA, 2701 bp, Toxoplasma gondii
  source 1..2701: mol_type = genomic DNA
ccgctctcattagcaagctgctggcggatggtcgcctgctctttttttgcgaaaaggaaataagccgacggtgccgcgcgagacctcttggcagaatatctgagacatcccacatatatatatatatatatatatacgaggggaaacggtatcatctgaagcaaggagggcagtcgttgctgtgacgctggttttgagtgttagcgtatgtttgcagcaaccctgcgtatttcgtgcagacattgctttgagtcatgatgacgaacaaaccgcgaaaacgaatgcagtcctgacaacagaagtgcctctcggcgtctgagcaagaatgtgctacgctgcagaagctctcgctgatcagaggtactctgtaaatttctaccaaaaaaggcgagtgaaaggtatgcgctacgtctgagtggtgagcatcgctgttcgccagacaggcaaagactgacgtttcctcggaagccattgtgactgcgttttgccttgcctcccgtggttgattcggggcactccccgagacgaaatggtcgacgcagctgcaaaaaggcaagcgacttccaggtcatgcttggactgcggggtcgggagcgatggtaatgactcccgaaatcaatggggagttgaaagtgagcatgggaaaagaaacgcgggtcgacgacaactgcctcgtccgcctagtatgccggccatcaggtcccggcagtctagagactggaggccacagaaaaatggaggcattcacctgaactgaccacacagatggaaaacccttatccgtgtattgtccagtgtggatctagaatgacacggtggtggtgcctccacgtggtgttgcctctgttctgacccgttgctggtccgtaccgggtatggagcgacaagaccccctgcacgggcacacaccagcgaagtggacggcggcgcttaactaccaacagaaattggagttttcagcctctgtagaatgagtgcgccggtaccatagcgcctcagtaatgcagaggtacggacagttgttaagattacgaaccggtaccctccagcgcgcatgagaccggggagacacgctgaaatttgggaagcaagtactctccgccccaaaataacagaagtcgaaatgcccaaaatggcattttttgtccaccccggaaaagcagacagatacagatagacgaagatcgtccactaaagtgcactgctcaggattttgaccaagctggagggtagcctactttgaagaaggcggtacaattcgcaaaggcgcaacagcttccgtgtggtctttacatctatggttgtggccggtttcctacaggcaaaaagtaagtagttgtccagttagtgccacaaaaagcctatgttaggacgatgctgtctttcagtgaggtatgtgagcggaacctctgtgcatggagtactctttctctagagacatacgttgtatctgagtaccgtggcagtgcggtgcggcgtgctccagtatggtactccttattcgacgtactgcaacctccgcatcgatacatccacattcctgccaccttcaggcggagtttcaccgaatgacacccgtttgaccttccctatatgaaacccttctttaaaagcatttttggggtctaaatagtcgtccgttgttctttgcgggcatgcccaacaagaaagctgtagattgaggcaagccacgcgttgcttctgcagagctgcgtgcgggaagatcccgtgctggaattaccttacccactcggagtggctgtgacgcttgcggttaagctgatggcaccggtggaagggagtgggggaatgcggtgacgtagaacctcctaacttaatcctctcgccacttcctccctttcaagtttttccttcaagcgaagtgattcccttctaaaactaggtaatacacagcatttctgtccacgcagagtaattcggtttccacgctaggcgtgccgtagacgggaccgcgtgttcgttgagccgcggacaacgagagagcgaccgctgccgtgttgaaaacctccaggtgagagacgagacgaaaagaggttcccccttttttttatgtatcagaagtgtcaaatatacaagtattgcggctcgctaacagcggtgacatcgcggcagataggttacggctgacatgagaaccgatgactgcaagtccgacttgtgagcaacaggaggccggcgcggctcaacccatgcgcgttgacagtcgaatggccctctgtttttcaaggcacacttttaaaggaacgcctaaattctgtgtcgtggtcctcgatcagatcagtacagcagctttccgcttgttgtgtcagctgtgtcttttatctttcagcgccatgcgctcttgtcgtggtgtccagcttctccagttttgcacagccaaaatgtcaagcgcggatttaggcaccagaagcgcacgagttttcgtgggctcatctttgatatgcagtcaagatgtcatcaatttcagcggatagaagggcttgtcactgcgaattggagttctgcagccgtgtttttggaatgcgttgtctcgagttggtttccggtgcccagctaaagccaacccaattaccacttcactaagtagtttaccagcaactgagtctctcccatttggaaaagtgacttgatgtttgttctttctgtggtctttgttctggactgcactcaggtctgaaaa

SEQ ID NO: 2363 - DNA, 4447 bp, Toxoplasma gondii
  source 1..4447: mol_type = genomic DNA
agcgactgcgtgaacttgtaacttcttttctaacggcgacagagaaggtgtggctggcgcctcagacgttgccgcgaacgcagaagtcgccgcggtcgcttctcgtttcacaggtgcagccgctggcgcttccgcctcttcattttcttcgtcgtacgctgaaaaaagagagaagagaggccccgagccgctgtcggcgtcatcgccttcatcctcccccttgctactctccggcgcctcaggcgccgttcgccttcgcttctgtggctgggcagacccgacacccgaggcaccttcggagtcgcttgcttctgcagactcgtcaacgactggctcttccgatttgacgcattttgcacggaggtcagctcctgcaaagcttcccaaagcctcctcggggggttttcctccaccgattttaccttcaccggttggatttccatctgttttgtttccttcagttagacagatactggcttcgctgcggccacgacgcagggtgggtaagctccagccatctgcatgagggctggcggcagtcgcgctttggggcttcggtagcctccgcagaagggcctggctgcgagtgctctgcggcgggagaccgtctgcgtcgggcgacagtttctgttgattttctctggcttcttttcggaggcgatgctgccggagtttttccaggcgaaactcctccacatcttcctcttctgcattcgcgaacactccgcggccgtactggagcagaggaacgttgtcggggccgatgatgacatcgggcgaagccaggaggttgctgcctgcgcctggcgcgctagaaacagtcttcccctttccatttcctgtcgcggtcgagacagacgcaggggaaccccggctcaactcatgttttccgtttttcgggactgggaaggctgctcgtgaggaaacggaagaagtggctgtcgcaaagaggccgtgtgcgctcagcgcggagccacggtcggcaccagccccgatgatggcgggacaacacatctgcaggcgcaggaggtttacggggacgttcttgcgcggcaccgagacctccgcgtggtagctccaacccgaaagtgccgcgttggcggaggcattcttcggccctgacttggacgacgtcgacgtactctcgtcctcatcggcgtaggacgacagaatgtctcccagcatgttggaaagtctcaggaattcagccacagacgaaaacggatcccaggtttgtttgccgaagagcggcgaagagtaagctgctgccaaaagtgtccgttaggaaaggggtttccgcaggcacgctgacaaaaacaccgagtttggcgaggcagctcaacagacgccagacactctctaagtgcgaaacgtctcagtcgtgctcctgtgctccccttaagccacctcaagtttagaatggacgcaaatgcaagggtaactgcaagggcaaatgcggcgcaccaaggaagaaccggtccgtccgtgatgtcagcgccggaaggcgacttcggattcggtcggagatcgtggaggagcggtctttgatgcaaaacgaacaagtcctgcaaaagcgactgctggagagagattcgcgggcgaaaaaagaaaaggaaagagggcgaaaaatgaagagccgcttcgacaaaaagtgagccagaaccaattttcctaaagacttccttggctcgcggacggccacgcgacagttaggacgtcagcgaagctctgtcgtttgctcctcacaacccaccgtatgaagacgttccgcgagataaactaatgcggtgttctgagcaaagactctaaggacatgttgtttttgtgaaaaaatgaccacgagtttgtgtccaatgctgcatgcaaaagtgtcgtacacggcggaagggatcgcgctctcgcatgcaaaatggactctaatcctgttacaacagatcgaatgtcatcctgggagagtggccgcacgcttgaaagtgcgcggcctgtaaccaaggccaaatgaagcatttacaggcctgcaaaagaccagtgggacacttcctagcgccgcgcatcagcagaacattgtgattccccgtggccggcactacgctcttaaattgccaacgctgtttaattggcttaccgcttcaaccttggaagtacacgaacaccctagtttgcgtcgatgaatgtgttccagccaacaccccatatttgaggagagtgatgggtatacccctgcaggttgctgcgcaggaactatgtggaacgtgccattggaacgtcagctgtggtcgttgtacgacaaccagcatggataagttgaccttggaaacacacgtagagaagcgtgcccagtatgtttacgccttgtttattcagactaaacaggtgccaggccagcaaaaatccgatccgtgtattccgtacagactaacattaggaagaagactaccaaggtgaataccatgataattgtacagcttgtatataaatgttggtttttcaaatatacgcccataaatctactgttcgtgtagtattatgactagccatataggtacctaaccatttaaagattttagtacctataggaatagcaatcataattgtcatagctgagaagtatgctcgtgtatcttcgtgtagaccgacagtcatcagttgatgtgcccatactggccttcttcgttaactgcgctgcagtgctgaaacatcgctctactgtgtactctctcaatgctgacgaatgtgacccgaacctgtcgctttcactcatgctgttacgtccacccgcacttagtttccgctggctttggacgcgttacgttgaaaaggagactacaaccctgcatgccgagcttcaaccatttcgagcgttccacttgtttcttgttagggttcctccgttttgggcagatgtggcgtgcagaacgttttgattgttctggagaacccccgttacgctgcggtgtggttcactctggtaagataagcatgcgcagttcacacagggagaaggagttggtcgtttcgtttgtgccgatagctgcaaagattgtgaccccctcacgcatggactttccgcgaaaacgcctgccactacggtctcctagctcctttgtttgaggtttgtctcgcctttcttcccccgttggtgtccataatcactcttcttcccgctgcaaggtcaacaggggtgcttctgctggctcgccaccgtcatattattcgtagacacgtatttatgcataacaacccaggtctcgcgtcgcttttcccgctgagacgttctcggaatattcaactaaacagttctacacgggcagcttccgagccggtgtatccagccgtaacacactctacacagttcatctgcgtaggcagtattcagcggcgaagaagcactcgtgtgtttgaacacgactattcattgctcaccaacgaattgtaggggcacgtgctaacttcagtcgcattttggtgcatgattctttggcaaattgcctttactgctcctccagaagcataaaacacatttcatgtgtcaagcctgcgttctttaagaggatctccgcgaacgccgttgcgttgcaccggaactccgcggccccttcctcacttcatggattaatttcccggaagaaacacatctgggaaaagagatatcagtgtggcacaataaaattgagaatatgtgcgagctgcgacgcgctggccatcatgttgttcttgctagttggatggagcagactgtcaacacacccgcaggcgctgctgaccaaacacacagaagcctcctgcatctgttcgttgtgaagaaattcacgacggtacacaaatgacggcaaactgctgagtgcttcgacagggcgagtggctgcgactgtctaccaaccgtacttttacggcagttctggtgaaccatgcttgagagaggttcatttcaaacatcctaatggcgggttgttgcctgtagtcgaagaggggagcgtggcccttcaggtgacgcatcgcctcacagagatagccggccacgggggctgcaaggtttcggcacgcagtactaaggcggagctctgcttgccagtatgtaccttcaattgtgcgccgtagtacaattacactagaacgctcttgggatccgtaatgcgacgcagcggagaagattccatatgacgagatgtcctgcaaggatcggaaaaccccattcgtcttcgcgtctcccgtttgagacgcaggcgtttctgaagaaggccgacgacagtgggacacctgcacctacgattctcgcctacgagagtgtcgcagccgcgccacaattataatatcaccttatttaatgttagatcatcccgaacgctcacgcagaggcaatactgtgcaaggtacgcgtcgagtaaccagtgaggatcctctgcaaatcttggaacccgcaggcttggtcacttgcgctgagtaacaa

SEQ ID NO: 2364 - DNA, 1484 bp, Toxoplasma gondii
  source 1..1484: mol_type = genomic DNA
gcttccctcgcgccttgcaaacgttccgggatcttctctgcttctcggtctctccccctcaccgtcctccccgcgccaaggcaaagaggtagaagagggagaagagggagaggaagaagaagagggagaagagggagaggaagaagaagagggagaagagggagaggaagaagaagagggagaagaagagggagaagaagagggagagggagacgaagaggaagaagaggaagaagaagagggagaagaaaaagtcgatgcgataggaagagaatcagacgaacccgacggagaactcgaaggcgaaggcggagttgggggaagagagatatcagcagcgcgttgtgtctcctcgtctgctgaagtggatgaagaggcgccgcgaggaaggaggcgcgaagcgtctgcggcgagaagaagcgacacaagaagaacgacaaacaggttgcagtgagaccggcgaacgtggacgggagtgcgagatgcaggagacagacgagggagaggacatacaggggaatcagagtgtctcttcgaggccggagacggagaagaaggaaacgcagaagaaaaaaaggaaggaaaagaggaggcaagaacttcggggcaagagagaggggaagagtcccgtctgtgtgtttgacgtctctccatcgctagagaagcgcgggagctcaaaatgaatttttgtggaggcggagacacgaacgacaccaaagagttaaaagggactgttccgtttcttcggagacgccggaagatgcggcctgccgaggaaccgtgacgggcgcgtccttcgctctcgccccgcgttgtttcttccccttctctccgcttcttcgtgcgaagagaaggcgacaaaagaaggaaaagagaattctcgagagaaagaagactcctttgtctctctctctctcttgtctcgcgcagacactgggagcggccgcgcctgtgaaacgccggtgcttgcgcacagccgggagaggaaagtcgaggaaaacaaagagacaggaaaagacgaaaaaaggcgacgccccaggaggcaaaggggaaaagcgagaccgaggcttcgagccaggacgaaacagacagacgaagacagagtgagaaaacgagacgcgacagggtcgacgcacacataccacgcgcgttcggctgcatgcagcagtttgagcgcatgcgcgtagtgtaaacgctttcttccttttcagaaaaagtcttcccctttccttgagcaacgaagaggcagagcttcttctcatctctctcctaggcactgcagttttccttcttccccaacggctgcatctccaggggacgagagtggagaagaagaaggcgacgctcttgggaggtcgacccggcgagctgcacacaggcaggttctgcgtaggccgaggtctgtgtcgcgatccgcttttttccggtgtctctccaaaaacatatctcctcttcttctttttgaagaggcgctaacgctgtca

SEQ ID NO: 2365 - DNA, 2789 bp, Toxoplasma gondii
  source 1..2789: mol_type = genomic DNA
tcgatgttgatcctctaggtgtacgcgtacgcatgcttgtgtgcatctgtgtaagagtgctgcatgcgttgaattcttgatgactgtgtcttttgtcttcgcacagtcgtgttttggggtcgatggtttctgttgtttactactttttcttccctcgtagggtctcttctcttgtcgctgtgccttctcccgctgggtgcctgccctgtgtggatccgacggtcatatctgtacgcctggctcgttcttttcacctaactgtttgatcagcgaatcgtgtcttggcctcttgccttatttccggtattatccttgttcaaaccttcccacgagtcctgggactatttggtatgtgctctttggtatgtgcccttcctgtcttttctgtttcatttttgctaccaccgttccatttgtgcagatgatacccctgcgtcgctgttccatttcccccctctttcgtcgcatctttttgtccttccacgtcgctctgacaccctgcgcattcttcggctcccggaccgagctgcgataacttctccttggacgggtcacacaagtccctcgtggcctctgaatctgtagcgcaacgccggagaattcgagtaatttttgccatttctttgcggaggcatgcgtggcttgcgtctgttcagtcgacctgccttccgtaaaatgcctgcttgtgaaacggtggaaaatgcaggtgctgaaacgactacttctgtgcctttcggctgccgatttttatccggggtaaatacgcccgccagtaccttttctgttgcagctaaagtgagcgagacgtctaccccgtttcccatccgaaagcagtgaatgcctcagtttgttgcggcgagaccccgacacggcagtgaaacgcgaagtttgcattccttgaatgcgtcctttcttttcacctcaccggccccttcagtatgcgttgacgcaaatggcaagatgggaacttaggatgttgcatgctacaccgtagccgagtatcacctcggatgcacgcattaacttatctatttctctgcttagtcacgaagaccgtattgtacacccaatgacaagctgtaatattaccttgatggtcttcgttagatcagcacatggtgtactcaagcgctcagttgttacctgatgggtatgggattcttgcgttcccaaataacaaggagactgacgaaacgcacgcatagtcacagtctgtacatgaagtttgagactagcattcgtccctgtgtctccccgtagtgaaacaaatttcgaaaaacgttgtttccgcttcacagccagcaagtcccacgtagcgccgaccaccagattcacaactaaactcgcttaaccacggctttcggttcgaagaactcgataacaactgcaactcgtaccttttcccccagtagcctcgaattcagaaaaccgcacacttcagtactgcgatgaacgtggcacccggaggaacctgagtttctcgtccatccgattgatgacgctaaacaagttgacgtgaggtctgtgcaattgccctctcttagagtttaggctgtgtaggaagagagaggcggggagtttcaaggctgtaagcggagagccaaatgtcactgggatacgaagggccaagatacgaggcaaggatatgagaggcagatccgggtgaggtaggaacgagatgatccgagttcccccagcgcgctcgcttcaactctgtgcacgtttaggcgttttccttgttttctttcctcaacggaggcacctcgaccgtatatggtatatttatagacagttgatcggcaacggacttgagggcagcagccagtctctttctttctgtgatgacgtatccgacgcggtcagaaactgaagacatggtttagggtgtctttttctgtcttttgtgttcctgaacggcatggctctcgttaatagcctcgactcctactttttttcaattctgtggctccaagtcttccgagtctcacgcctgacagtccgctggcgaactgatgagagacgggatctgcagggtacgacacacgggcgagacccacgagtgtttcggcaacggcgttttgtggcgacgatgaattagcgtcgccgagttcttgtcgaggcactcacgggcgcgctttcttctctgatgtatcgcaattttgttccaggcccatcgttttctgactgcggaagtgaatattcgtagctagctgcgatttccttttcgagaggcgcagcgtccgccggtatatccacaccctcggcagggtgcttctgtgccagtctcgtctccaatctgtgtgaggaccagctgccactcgactcgcttcaccctggcacctcctctgcatcggcgcgagttgcgcaaatgctagcgtgagtttttacgaagtttcgcgtgtgcttttcttaaacgacgcgcaggaaagtgttgctggcgcaggtgtctccgtgccttttgtcttgcgtccgttgttgtgcgtccgagggttacgtcgacggggacaccagagaccagcgaaatcgtcgtctcccgcttccgacgccctcctgattttggaagcgaactggttagttttcgagaatcttcatcgccgtcttttctcggaaacgcgtcggcgcacaggggctgcatgcgacttccgtggctccgcccgtcctgcgcgtcggttttggtggaagtttatgagtctttgttccatttccacggggaagagggaacagagaactttcgggccatctatttgtctgcgctactgaaccaccagacgcttgtgaggccgaccaga

SEQ ID NO: 2366 - DNA, 2324 bp, Toxoplasma gondii
  source 1..2324: mol_type = genomic DNA
aggttttctgtcaggtccatgcgcgtttcaaaaatcgtagcaccgctgcgaagcgagggaggccgcgttgcacaggggggtaaagagccatgggcttcgcgtctgaaggagtagccgagtatcaacggagaagcactggtgaacgcactcattttcagtgtcggtggaatcacaaaagaactcgcaatgcaagaacgagacagtcgcagagctgcagccgagcgcgcgcgatgacccctggactccgtttgcccctccatcgaaccgaagtcccaaaaaaaactcacagactgaggtgtctacacgaaacagttttgcatgtcattctttctaccacctcataagaggccgaaacgccatttacaatacgacacaaatacgtcaacaagaggtctcgtcagcctctgggtcaccaccgtttatccggctccgacctcgtacatgactgccaaggtggatctacgattctcttcttcgcagaacgccgttgcttccgacgtccgcgcaaccgtcgctctctcgcagcatccccgtttcacacctggctctgaacgcgagcttcgccggttgggaggaagccttcctaagtctcgctgtgggcgttctctggactctgcaggttaggatgagttgcaggaattttcgtgtctcaccatgaagtcgtctacttttaatccgagcgctctgcatgcagccttcaactcgcgcctgtcgaggcggccgtcgccgtcgcggtcgaacagagcaaaggctctctggatgtcgcgtctcctctcgcctgcctctgcgccggacgcactcgcagctctcttgtcttgcatgttgggctggccagaaacagacgcgagacgagaagcagagagagacgaaggaccagcgagagcaacacccggatcctcgccaggcgctcgcactcccggcgcatgcgctcggtgctgctctgagactgcgggtggacccgccatgccaccgccgtcgcacaggaaggcaaaaacggaggggcagacaggagggcaatccagcaacagagaagtgtggacaggaaggaaagaacagaaaaagcgggatttagcgaaagcaagggaaagtgaagagtgtgtgaacggtgggtgcaggcgatctgacagacagacggcagagcgttcgtcagagatttctcggcagcggcatcttgacaacactcagaagaagtgactcgtgaaacgcgaagaatgtgtcttggcgactgaagcaaacgaacacagatctgcctctttttccatttccgaattcccctgtcttctgggcgcatgcacatcccggctgctgacgcaggaacgaaagattcgtcaaaacccaaactgccccttcgcctgcacactttcgctgcgttcagagttaaatctacagactcagaaactggattagaaaactgagaggcaagcgtcttctcggtctttctcaggcgaacacacacacttttcaggtgcatgcagtgcagcatcactttaagacgcgaattcgcgacttttcttcctcggtcgtctcggcattgaggctggcaagaacctggcttgcgcagactgtttctctttctcctctgtagcttctcctgttgttaaaaaggcccagcatgcagccagacagcgtccagaaggaaagccttttcaccaccgcaaaagcgcagggggggggggcctgcgcagagttcttggccagtcaacccgcgcgtgcttttctttgacgacttcttccgtcgaagaacggtcaaagaacgtcattgcatcttttccttcagtttctctcttcctctcattgtctcgcgtcctgtctttgtctttttttgtggccgttttctacttgtccgagtgtcgcacatctccgctattcgcgtccggcagagagtccccatccaccggccgagagcggaagtttctttgccgcctgctcatccaactgtttttctccggatctagttcagtgtaaacggggaagaaggctctcagaaaaggaaggtgctctctttctgatgtcgttccgtgtgcaaatcgaggcatggatgaaaaacaggccaaacaaggctaggtttcaggcaagcgacccgtcttttaaaacgaacgtggaaacctgatcggattggcccattcaccacccggcagtccggtccgtctagggcgctcgaaaggctcgagatcgtcgggcgtcgactcccgcgaagtcgacagccgggaagagaatcgtttcgccgagacatccagagaaatcgcgtgacttttttatgcagctgtcctgacccgcatatgaaatctccgcagaaactcgacatgcgcttgcctctttcacaa

SEQ ID NO: 2367 - DNA, 4696 bp, Toxoplasma gondii
  source 1..4696: mol_type = genomic DNA
aaagagccgcgttccgcagattcagtcagcggtgtttcgctctttggacgcccatggagagagctaacgggacaatggactaaacctgggatagacaaatatattttggatggaagcagactgattcaactcgatgaggaagacgcggcagaagacaagcgaagaagcgcgccaagcagctacaggacactcttctctgcagatacagttcctgtgtttatgcgatctagttaaacaattcaggggcgcgaagcatgtgtacagagacaatgtgggcggaaaacgtggtagtgttttacagggtttgactgtgatcttcatgatgcagaaaatccacaatcctacgggacgcaaagacaagcgcaggcgttattggcctccagattgcgggagtagtgcgcgacgcctagaacacaatcgatgcgaagtaccttagtgacagggaagagtgaactccaacacttttatcttaccttggcaaagttgctgggggtcgggtggagcgacggccatggtgcgcgatgaattcgatggaaccggggatccctcgtggaggagctagatctgtcgggaaagagcaactgcgtttatgaagtggattccaacgcagagtggcgcagctccgtcgccgtttgccgcttattttccctgtttgtgtgcctggtgcctctgaaacgcgagcgacgaaagcgtggtaatggaagcccaccggaatgcgacaatcggaaggtgggaggctctgtcttctcgggagagagctgacaaaggtaggagccgtcggtttcgttagagtgtctacatccaattggaaaccgagacagaactgcggaggagaagattttgagctaggaccttccgagcaaaaccgccgaagtcggacgtgtctgtccacgaagaaaaacaggggtcttaaaagccatgcctgtctgtgcaaagacttaacacgcagacctcgacgtctgcctacgttgtcaaggttgttactttaggacaagcgaaaaacaattcagaagtggacaaggagcttctggagaaaaagtgagtaccggacaactctgcgattttcgcacacggcggaatctcgcgtcctcaagccacacactgcgagcacactgtttcgacagaaacccgtccgtcccgtgtatctactggaaggaaaactccgtgtatgcgtgacagagagagtcgtcaaggcttcgctgtttgtggaagaaacccagacagcagacgccgacaacagcaggcggccgttctccaacacagcaaagggaatcgacaagcaaaaatgcgccaatggaggagacaaaggaacggtgaagagaagctggaaataatttcggcggcttgacggtggcgtttcaagagtgcgaacaagccttcgctactgcccagatgggaaagtaccggggcaggacacgaaacggagagaaaagtcagcctttctgttgcgacaaccccccgcggtacttgtacccgatttccttggtggggttaccgtaagctgcagctacggacgtgcacacttcagaaagctgttgccgagacgatactcgcggtggacggtgcggcagaagcaatgtccttcagaaaatgtagacgtacaagaacaagcaaatatgtccacgttttgtcctgcgcgttccactctaatgcccacaaaaagtgagacacaccccgtgcaacggggaggccgtgttttctggaaagccgactaggagtctcgtatcttggagatgtcttgaaataagtgaacttcccatttcctgattgatacaacgcaaagtggactcaggatatatatccagcggaggacctcattacccgcaagtggccgaaagaaggcgaagtacacatacacggacttcgagcgaatcatctctcgtccatgattggctgcaaattcgacgttgtccggccatttgcacaggccgaagcgtgtgtctgtgtgcacgtgagtgtgcgtacaacctccagctgtcgtcacgtcagtcccgctaagtgcgtgctgcgctcgctgtggacactcacggtgcatggatggggaaacaacgcacaatctcatcgaaatcgatgctaggtactgtccacgacagcatacatgtagaagcagagtggaggaacacaatgttttcttcactgcacgtgttagttcgttgtcgtgtcgcctactcaagcagtcgagcaaaagcgatcgcagaaaagagaggtcacctgtcacagagtacgactttgaaagcgtctttcagaaaacatttcgaggccaacaacagataaagctggcaacgtctcgaactgctgtgacacatgatggatcagtgcagaagggtttctgaagcccataatgttgtaagacgaccccagcatgtgtacaaattgaaagacaggttgtgctggagttgtggatggatacgagctaccgatgccgctcgtctctgacgtaacttctgagggccttactgttgggcagtatccgattcaatgataattgctttttaagaagttttacacggacatgtgaagggtcggaccgacgtttccagatatacgctggattccacaatacataacgaacctcacatgaggctcatgaaaagcacaacagaacttggctcccgtaaacaaagacgtataccagggtccatcgatgccagctcgttgtagggaggaggcaactttccatagaagaatgccgatcgctcggacgcattttcagacaccggaaaatgacgctttgctttgaagaggtatggtaccagctctgaaaagtaagtttcaacagttcggggtgcattgaaatgcaagcgtacacgaacatggcagtctatcttattacacaggctgccgacggagcaaatgcgctccaacaagacaggcagctatttccacaaagactgaggagtcgagctcaaccggcggggtgctcatgagttcagccgttacaggtcttgttgcatttgctatcgagctgttgtagccaataggactagagcaggtaaaccctaaaatcagtctgtgtgacgtgtcacagtgataaaccgggaagctgccgctggacacgacaatgcaaaatgaatttactctaaagcctaccgacttgcctgtacggcaactgatgccctcgacgcctttcttcgtaagcaagtggtaatgattcccgagtagacacagcggcggtcgtcactgggtttgccgtgctctgtttcccttatgcgctcagccacgattcttcaaaacgcctctttgtcagacagagaagccacgatgatgctggtgacagaatgatgtcttctagactaatatgctcctcttgagttggcggccaccagcttgcatttgcccgacatgcagtttatcttcgcagtttttctgtgagttgtcgattcatagatctccgcctcttctccttcgcataaaagggagctactccggcctcgtaatggctccacgaatctctcttttggcaacgcctgaaggtcggcgtctgtccttcgccgtcaaccacggacggtgtgcacagaaggcgaaattccctttgtcgttattccctcatttctgagggattgtagggtgctttcccttgggctcacacgcagcagcaacacctacgccactaccctctagaaaagtcaccacggcctgctaatattaccagcatatcgagttcacccaatatactggtccaggcgtaagcatagcagcagtgacattcataagtccgtcgcagagatacacggggaagcgaacgtcagctgggtcggtcagtccttaatgggattgttcctctctgacctctcctccttctcccgcactgcctgtaattctcgcctcatctcgagcacaacacgagacagtgcctctggatgcacaccttgctcgacaagctccaccaaaatctgtagagtggccctgtccaaaccggtgtccagtagcgttgatatctccatcagaatttccatcgtctcctggccatcgccgtcatcgttcccacctctcgcacgctcgaggaagctggcttccggcgaggaagtcgtcgccattgttgccaatcacagaagtaaattggcaagaatctttgtgaggcggacaccggagcagcggccgatactggcgtgcgtgcggttcacctagagcacacaggtttccggtcaggtcggtggagacgaccgccccggaatgacagatcctgcctaactctcattacaaaggtatcggattatccgtctgagagtcagcttcatcatccgttgcagccgcagtctagtcaatctgccgtttgtagcgctcggacggcgtcagagtgtgcagcgtgtccagagggaaaccgggacacgcctgccaggtggatttccagacaaacgacacctttcgcccgagtggattttgctgcaacgtgcaggaaacaggtaaagcggcagttttttttcactatgaatttagtaagactcagaattccatgatcctttttcagagaaactgcccttcgaccgccggtgtgtctgcatgccgctgcatgcctgtgaatcaggtgtacgcacagctggctgtcgacacgtgactctgtttcgcttcccgttgtcagatccgcgaaacgtagaaaattaaagcaagtcacgtaggtgaaggagacgaccgagaacttgtccatgttgtctgattggtgttcaagcagtttctggagcagtagtagtcaggcaaa

SEQ ID NO: 2368 - DNA, 2966 bp, Toxoplasma gondii
  source 1..2966: mol_type = genomic DNA
aacccagacacagtcagagacaccgagagttggagaaagtcagaaaagccactggccttgggcgcggttcagaggtcgacctccacaagcagcactggaacaaaggaacctcgagacacagacggtgcgactacctacacacactcatcacgaaaagatgtttccggatatgctctcgaaactcacgaaaatacgctcacaggttcatacgtatggtgatacacatatatatatatatatatatatatatatatatatatatatatatatatatatatgcatttacatgcctctatgggggggatgcctgaggtaagcggttgtctctgtaaatacagttacacgagctgactcgttcatctgcggagaaaaaagacgaagggtcgaagcgcgtggtgcagatataacagtgtgcgatgtggagcaagcctcgccttcatttttgtgcatttcttgtgactctcagcttacaaaggaaagcagaaaaaaagccacaacagtcaggggcatcagcgccctcgagagcttcagcgtctgcatggtgtctgaagccttcacctcgaatggccaagcgctgccttcttcggtgttcacgttgacggacaacgcgattggcgaaaatgtcttctttcttcgacgccttgcgtttttctcggagaactcctctgtccacaggctttctgcgatgctgcccacacacaacgtggaggcagtggcacttttatttaagcttatttttagtctttcagtcaccctgcactccccttcgtttgcgcgttttccggcgacagcaacggcgagaacagacaagaagtcactgggggagacagacacacgagaggcgccaccgctgctcgtgtgtctgtacgccgtgtgcaagtgggattccgagaaaagacgcagagaagaaagaagcggagaatgagttgcacccgactgtgtgtctgcgacaaaactgtcaaagatcgggagagacgcggaagttgtgaagttgaggaagcaaaaagctgagagtcactcgactgacgtgaggcgcgcgcggttccgaaagacttcagacacgacagatgcaggtgtgaaagaccctgctgagcgcgattgggaactcaggagagtcaggccacttggctgaatgtttccactcgtctctgaaaaagatcaacgagaaggagaagcagcgaaccaaagaaactctcgaaagcgcctctatcgcattgcagacagtccggacggcttcccagtgcgtcgtcaactccctgatacgtagttgtcaccttcggtcgcttcagctgtccgaagcctgcagaatgttgcaagtttcgtggagagaaaaggcctcaaagacattcaacaaagtggaacacagtatccaccagagcgtctcgcggagctagcgaaggcagattgcagcagcagtgtgcacgctctcaggagggacagtcaattttccccaacttctctgcgtgatccgacgaaaaaaatcgagttctgctttgcctccgtcactgagacacaaggagatgggctactgcaactggagaagatccccagaacctgaagtcgcggtcgccaaggagacagcgaaaagagttgcggtgggtcgcggacgtcgccggcgtgtctgcgactcacagcgggagaaggaagcaaacttcgcgacactttctcggccgaatcggtcgtacacaaacgctagaaagaaggcgactgtgtttcttcaccttttgccgactttacaccccaaaaatcaggaagaaaccggaactcaccgacctgaacaatacccacacacagacagcctgcttcgtgtccagatagagtcacggcaggcacacgagccgcgcgaagacagcgtgaaaactgaagttcctgcactttaatttgacacgggaaagcaaacgcgcttccggtcagtacgggcttgacagaaagcgggaaagcgccgctaaactgcttgaaaaagttcgtttccttgactccaaggcaaagagaggggatcatgtgagcaaagtcgcacagaaggatgcgacctgagaaaaacacggaggatgcaagtggtctctctcacacatctggatctcctctcgttcaaactggcagagtgcttagaaggggagcatcaaacgtcgcaggaaaacaaggagagttcagcttttctccgctccaaggtcatctgtggcctcggccgccgcgtgtatgtacactcgagtttccaagtgggggaacattcgtcgagccaccacggccgattttgggctttcaagctgaagcttttccggctttcctttttccgctgcttcttcttctcagcttcttttaaaagcactcgcgatcgatggtaactcgcttcttccgacatactgggtgttttcatgcgcttccccctctccaatgtacacctacaccggcatgtagagcttgaccgcagcaagcgtctttcctggaaaatgattgaaagggatttttcgagcttttgtctttcagatgcggcttactgtcgcctctgagatcgcaccacagaggcgaacgcttgcagaaggagagcgtagcgttatgcggcaacatcgttggcgtgtgaagcatttccctgatcatcaacgcagcgacgttctcaggaccttttttctgggacgtcctgtcttcccgtagctcgatttgccctcaggttcgccacgccaactgtccctttctgctgcgtttctctcggcttttctctgggtctctcaccctcgggagaagctgctcttcaacgattcctcgtcgtgtgccatttttttccagagagggctcatcacaaacttcagcgttcccgagaaaaaaacggcattgccgtttgtcagaaaaaacgcaacctccttccgcgcaacagatctcgtgaaccgtctgtgtctttcacctgcgactggaaaccgcgtcttcaaaatttccctacacctacatcgaattctcttctcagtacaacaaca

SEQ ID NO: 2369 - DNA, 4561 bp, Toxoplasma gondii
  source 1..4561: mol_type = genomic DNA
aggaagggtctaggaatttcgccttacggtgggtagtagccaaagacaccctgggcttcgaaattcgcattactggctttcagcgtagcctcgacgaggggtcccgccgctatcctgtcaccgcgattctcccccttatctgaagcataaaaaaacaaagacagtgaacataaccgacccttttaccggcaacgtcgtgtgtccaatgtccctcccgttttacatgtacatgcaccctacctgtatcatgatacgcgtgtgcgtacgcggagacttgcgagtatctaaacaatcttttacgctcatacattccttcactgatgaacgcacaagacgacacgtccgggtgtctgacatcactctggagtcgaaacggcgttgtgtggcgaccttaccagaaaaggtgacaaagtaaattgggatatttcgtcttgtaagttcttctccaagcaacttgaagtcaggagtcaaagccccaagcacggaaagatcgtcgcgtcgcgcactgccacctgcacaggaagatgtccgataaaacccgattattcacaacataaactcacatcgaaaacaactacgatggacggcttcatttcttccttcccagagtcgcctgcagttacacatggcggtaaataaaacgcttgtaccttgtggatatatccatgtcaagcatacatgcatgtgttcatatgttcgtgtgtatgtatgcatgtatgtatactgtagaactgtcgggagggtagaccagtaagtgttttcgtaggcgtgctgacccgagtgaaccgaaatggcggttctgtcgtagtcgctggcgactacttgaatgccgcattcttggatggcgtcaacaaacgctttagctgcgtccctgccagtgaggtgctgtgcctgaaagcgctcgacagctgcagccagggtctttaagcaaggatgtctcttggacggtcccatcgtttcctcggtgaacaaggatggacctctcttcttcttccccggcccagcggaggaccgagaaggtcgaccaacttccgctgctgcggcagacgctgctccgggcgtctccgcgacggtgccttgcggtttaggttcagatgagctatccgacggttcccctttctggtgagaaacccccgtgtccctaattgcttctttttgtgacgccggcggcgatccttggggttttcccagctgaattgcgaggcagtgcgttttgagaggcagaaacggacagggggagggggagaagagaagtggcgcggcgatggtgaagaagagccgaaccagcggcatccgagaaacgagggaagcactgcgcgaaaaacgtgtttgaaggggatttgggtgcgtcatttggcccaccctaaaattggaagaactcctttctctacaaaggaaggcgaaggcctcgaggaggactggacaagacacgcaaacagcgtgctcgtttcacctgcgctgaagaggcggaagaaaacagtcgcacaacgagccctacgcgctaacgagaaacaagagtccggcgtgctgccagtgccatccactcaccaagctataagcgactgtgggatttgacagcgacaataaattaaacaaacatttgacataagggagtctttgagaacctggagccggatggagggcctccacaatgcctggcgtttgcgttgcctgctacggggcaacaaactcgtctctgaatgcgtcgctgactgctgaaaaagacacctttcggaacgggcagcaacaaagctagcggtagcgttcgactcaggtggctttcgtcatcgtgtatggacaaaatatttctggtaacagtaagtatcgtgtgcttggggggacccagcgaggatgagctggtcggagacacgtgacggcgacgaccaaggcacagcatggtgaatatgcagatacaccatactggcagtggcttcgatgtactttggtttcgtcacccacgaacatgatggtagacttttctccgtaggtcgagaagtaaaatccagtcgtttcttcgagcaggagcttgcttcgcgagagcaatggcacagcttggtcaactaatggcggccgctttccccaacgcacagatgtacgtgagagacaaacagaatctcattttcctgttcaggtttcaataccatgccagacgtttcagttctaggcaccgccagaagacctctctgggatattcttgcctctgttctagctttcatagcagcgttggcggatgcttgttgccaaggaggaagttgaacgctttcctcggctcgtcgactgtacagaggcggcagcactctgcgagacgctttacaaacactctagtcgtgcttagatgtttctgccagatatattgcccgtcttcttgtttgctgttcctcactcatcagaaggcgacaggtgcatctcccctagtatgatggcgtagcattcaccgctgatatatacgtctgctgtcgatttcgatattcatcttttcccaccgttttcaggggagagagaatcaattccagattacagtatgttatcgtgacagatgcaggcttttagtcataatctggaacacgggcactccggccgtggattcttcaaacccactcaaccgatggtcagcaatgtgcgcctaaaaggttgaaggagacacgagacttgatgggctcttcttcgagacacacctgcacaagcacataagcagcacaagtcacgaacagttcgtctgcaggactgcaacggacaatttcgctcccttttgaagagatcacctgttctggatcgctcgatgtgcttgcgttttatctgcacacttttcaccagaagttgcacacgaaaaatgctgacggaagtgggacggactctgaatatttcttgaactctgttcgctatcgcttcgcagtcagttacgggataggcgccatggggacttttactgataaacacacgtccacgatctacgcttcaagttaaggatacactcaatgctcagctgcgttgtttccaaacatttgcaacggcgtgcgaagaaattgatacagctgaaggcgccaaaaccatcttcctgtttctgggtcatggcctcgaaggccaggaacgcacgcttttcaaagacgggtgaaacccacacccccagcccgaaggagatgctctcaacagaggccgccagcaggggcggttatcccattacgagattgttacttctcatagggaagaacggaaagaaatgcgtggagatacgcttgtctacttgtatgctacatttcctctacgtcctctgtgaaggaactccgacttgcgtatgttcattaactcctacttttccgctgttctgctgtgtatacatgctggttcgtcccgtgcacaaaggttctagcggtgtcgcgggctgataacaattgacactctcccactgcataacgagttcctttgacattcgtgactagtaggcgagaacactcgttcccctgcacacggtcttccttccgaatttccttagctgcgtgattggcactctctctttgtttgacggcccaccggcggtccaccaccctccatggttctacgtggccaaaagccttgtttttgatttctaaaaaggtaaacatcaatgacgcaggaaaaggtttttcagtgtctcgataaaagaaacctggcagccttgtcgaaagcactacgcacgagaagttgtcgccgcggcacggcctgtgtgacggagtcacgttcttttgacttgtttgtcgtctattcggaatcaaatcttcggtcgtcattttttctctgtgttctatttcccactcaactatgcgcgtgctatctgcagcatcgaccaaaaactgtgtccgagtcaactctttcgctctctgttccgttccttccttatctatgtgtttgtggcagccatacacatacatgtagctgcatattttaagcatgtaatcataccgtcgctgtaagtgtatagctcctgttggcgcccgccttgccgtggtcttttaccttacacctttctccgtttttgttatcccagttgtatgtagcattggaagaggagtagcgggtgtagttcatctcgttgtaaccttcctcaatcatggcggaagttcgtcatcgattcgtctgagtttctgaatcctttcacctcggctcctctcccttccgatttttttttcatcttctttcgtcgtcgtctgtccagaagcgaagtaaaatctgtggtggattttcctgcgtttgcgttttcgtcttccctttctcttattcagcccgcaacctctgcaacagcttttccctttatttccctttatcgccaggagggaatacgctcacaggagagagtaaacccttacatcccgcatatctttccccgacagcctgtgtccctctttctccgagttatttttttgccggcgtaacgccaaaatcgaaccttccgtatgtggttctttccttttcctccgcaagccgccgggttgacagcacttctttccacgaaaagattctgcgttgtcccagattctcttttggctcgcttttcctctgattccagtgcttggtggcttggtggcca

SEQ ID NO: 2370 - DNA, 3679 bp, Toxoplasma gondii
  source 1..3679: mol_type = genomic DNA
atagtacactaaagaaaacgaaaagtctcgcaaaccgttccactgcttaccggcactgactcccatgacatcagtatagaagtaggctgcgaaagtcgtcaaagtgaagttcattccaccagcaccaatcataggtgccgcgtaggaaagaaggtaagaccagggaagatgcttcatgcgccgcgccgtcagccccttgcttgaaagcttctcgggtctacctgagggtaaaaaagacgagtagtagccaccagcaccacaccggccatcgccgagaaaatatcggcaccttttgaatcgacgaaaagcgctgtctgaaaccggacatgcactacggcatacacgtcaccctaaaccctttccaccagagaagcggaggttgaggtccacgcctgcataaaaacaccgttcgcggcagcagatgactgtgaaagtcactgcaggcggcatcactcacgtggtggaacaacgcttctaccgaaaacacacaaagcgccgccgacacccagggacgtacgatgacgctaaaacatttccgaggacaggcgaaccgatgcgacatgcatcccgtggatgccgctggggacggcgaactccctccattgtggttgagcttagtttgagttagatctctacagccacacaacttactgtctaatccttgaatattgaactcgtccgttgtttcctctgtggaacgtcgctggtctcggagcgaccgctggcggccctccttttgtaagctcatattcaccatggtggctcagatgagaaagcacgggtggcgaccgccgtatttcttctagaagaaagatccaaaatggaccttgttatacctggcctagtcggggatgcaccgcgctatacggacttagagaggaggtaatacggaaggaaagaacaagaactcggggaactacttcgtccacaggaacgcgaagcgctggagttttagctgtaacacagccagggttggggtcattttacttcccttcgcttgtgagatggcggaaatgttcaaattttcgaccaacgggcttgaaatcgctaaccggggagagaacggacgctcgggtggtccgggtggagattcgtcgcacggtcaggaaggtgaagggagaaaaacatcagagcccaaagcgggaaataactgcagggggatgccacatgcataaccgccgtaaaatgttactcgtcgcagataaaaccatttcggacacctcctgtgatccgtacctctaatcgaagactctctcggcagttaactacctaccagccaccccggactggcagtcgcttccagaccgccacgattcggggaaaaactgcttttattacgttgacttctatatccgtcacaaacgacactgcatacttttaccgattccgtctgctatgtttggcgcttgatccttgaacaagaacggtcccgagagacacgccacctcccatggatgagcatcgcatcaactcccctgtgcagtctcgagctcgccgctcgcttgtcacgctggcctccgttagccactgtaccgagaagtcatgcaaaatcacgcagaggaaatgcagacccagagccgacccgacatctgatgccgtgctgccagcacgagttactgtgtgttttcagctctcagtgtgttccttaccttcccaaataaaaacgtttcggctgtaggcactagctgactgtgggaggagctggaaaggcagacgcaagtgtgtggtcgggtctcgacagctggtgatcgggaaatgtgggtgtgacgaggatggtgattatgctgaacgactgaaatttacggcaggcagaatgatagagtcgttgtgcgttgattagataactggatcgccggagtgagaacttcgtttgtctattgcgtgtggtcaactgtagtttcagtgtgaactgatcgacagaaaccggcacactccccgttagaaacgagcggctggtagagataccagcgacgctggggaacagctggacttcctgtggacgaccaacctgggtgccccgggctgcgaaactttgggttctcaatacatgtgggggtgatgcaaattccaataatggcatttccacgcacctcaagaaacgcgactagcgttctgtagaacagacggtccggaacggcagcccacaggcagctctaaacactctgtacgccggggtagataccaatccacgatatacgacttgtcgatcagctgcatcgtataccgaaattgaacccttcacagtcaagagatctgaattgcgccggctctgctgcttagtcggataaaggctgttgtgcaaaccgaagtcgaggaagtagtttgcctcatgcgtctctgaaaaaacggcccccccaccacattcacaagctcgtttcgaatgccaaactcaagggggcgccacattttggagatatcataatatgtctgatacgacgggggagcattagtagtgtggtgaggtgccgaaccgaatttccgaggtctcgccacacacaccggctcggttttgagcatcatgagtcttctttcgacccacggaatccacgaggtagcaccatatcgcttgatgtagctttgtcatgcgtttttgtcagctcggatgagacgcttccaaaaagcacagaacagacgcatcttcttacgagaccgaggaagtagcatggctcaacagttggtgtcatttctgttacacatttttgagatcttctcagactgcaaagaacaacgtcctagtggaataacgtgtaagcggtcagcgtttgtattggtaacccagagtcctactgtttcactgtttcatgcaaataacacatggcctgactccgtcgatcgcctcatgttcgccctgcaacccgttacaccaagggaagtctgcacagcaagcacgatgcatgttgccgtttttcccgttttcttctcgactacgttcccgttgtgtggcttattactgatgggtgaggacgtttcatggactggcacgcaaagaatactaaatctgtgcatggagaagtacgttgtatcagagtcgccacgctacattatgctggtctcaaaactcatccagattcaccagaggtggtatttggccgccgtgcagtctgcctcggctaccacactgaaagtaacaatttcacatacacagccctcccacctacatccggcaccatttcactgaatgtttgttcccgaggacaggagggagacgcctgacagttgaagagggatgatatttccagaatgaactgagtttaagatcctgtatgtcattttcgtcttgtgcgtcccgtcctggatgatcacatccacatgcggctgcaaccacaaccgaacacacgtttcacaggaaagagtaagctgttggagtaaatcgacggtgaaaaaaaaaccaagcatgtcatgtggtgcgtggatttttctgagtatgccttgaatgttcgctgttttgtcattccttttttgaaaacaaagcgtccaaaagatacggtggcatttgcgtgcccggccgcgcggaacagaagaacgtcactctggtcgcactacaggccctgtttgcgaaagtgtgctcgtctctccccttcgtgatttcctatggcttggtaaaaggtctttttgttctggtagtgattggccgatgtgaaaggctctctctttttcttgagttgacacatctcgacga

SEQ ID NO: 2371 - DNA, 4821 bp, Toxoplasma gondii
  source 1..4821: mol_type = genomic DNA
aaacagagacagccgccactcgtcgctctccggaagagtccactttccgctgaacacggagtccgggagccaagcaaagaagtgcctcttgggaagctgatttggcgcagagacagcagcggagggcagcgagaaactgaccaaaggcgagaggcgctcccatgcctcagctgctgaagatgcgaaacagagcgaggcagaagtcgagtcgtgtgtggaatcatttttccatttgaaaaactccttttcaagacctagcacttcaggctctgggcgaggtcgagaattcaggcgcttgaggaacaagtggaaagacgcatctcgacattcacgcaggagtcacgaaccggacccgccggacacaaaatgaagcgacaactccttcccaaaacatgaagaaagtttttctctcgagaagacgctctcttaaggtctccaccttggagaaacgttcgccgactcagtgcgaagcagaggacccgagactgctctgaaacttctatgaatacatggagttcggttttttgcgcctccttctacaagtaccagcttcattgtgcgagcagacgcgagctcttctaaacgcacaaagcatgaaacgtaccgcgggtgagcacttcgtctgcggggagacaaagaaaatcggtttctccttcttcatctggcgcgtcgctctcgtctagcctgtcctcccttccttccgtccgtcctggctgttctccctgcttcgccgcattgtcgaagtccgacgcaagagacgcgcgagaggaagcaaacgcagatgtgtaagaggaagacaaagatggaaggtgtggaccgcaagaggcctttttggtgtgtttgtcgcgggtcttgcgagcggcgatgacgctgacggctctgcgcgcctgggcttccacgacttccacgacggagagaggcaggaggaggcgggcaagagttgtccagaggaagcgcataaggcgcagaagacgaagcgtctggcgaatgcagaagagggaagtgcggcgagaagggaagaagaaggggcagctccgggtggaagccgagcggtccttctgttggcatacgtctggtttgtcaagtttgttgtgaagactcgcagggaggaaactcgcggctcgtccagggggcaggaaaccgggagatggaggttgccgctctttcgtttcttctcctttgaatccttcgtgctctgcatcgctagcagttgtcgtggcctcccgggccgcgacgcacgaggcgcctggaacgacgtcgctctgatcgacgaatttctggctggcggccacagaaacacggaatcggggcccagtcgacgctccccagaaaggcggactcgaactcccgctctccttctctgagtcgccagcgtcttccggctcttggccgtccacgtggctgtgcgccgccggagcggcgcactgccactcgggcagattccggcggagtgccggcatgggccggactcggaccggcttcacgaccatctccgtgagccttttctttctggttgtctcgccttgggtccccggttcgggtgaggcgccggcgaaatgcggagctgcgccgtctcgaacgtctgctgcgcaactgtcggaccaccggtcgtcgactgctgcccccgattggggtgtatgtacacccgaagcgctggcctccatgttggccatctggccttcgcagctggggaccgctcgtttggcttccgctggaattcgctcttcgacctcttctggagcgaggagacaaaaagggcacactagaggctgggctgcagacgcgcgcgtcgtttcctcgtcttgcccgcgaaatggcttgctgttgtttcgagtggaatcaagaggaacgcgagcaacaatggtggaaagaacaagaaaagcggggagaggagcacggagaaggtagagacgaaatacgagatccggggcagcgcggtgacgacagggtgaacaatggaggatgacgtacttaagatccgttgtgttccttcacatcggaccagcgactttcgtcgcgatattccgcttaaacccttgaacttttttcgacacctaaccccacagatgtgcagctgagtccagcttcaactgttttgaggttcagctgaagtctacctcacacaccacacagctcctcttgtgtgccacggctacacactgcgcttcctggcgcaggctccggccagttcagtcgggcaaaaaatggcgttttttccgtcgcgtgaggcgcttttccatagaaacctccgtgttgtgcctctgggataattcaacacgggaccaagagcgacgcacctgtcgtccgttcagcaagaaaagcttcacggtcgtggcactcgcttactattgagaaacaggggcagggacagtggcactctgatgagggacgagggggcggcggcgcggcgggcccactagacgggaaaaggggagcaacagcacgaaagcgcatggagagggaaataactcaacgagaaaagcgttcgttgcacgataaaaagaagggagatagaacggctttccagaaattcggttccctttcgagtgcgcagaaccgagctttccgcaaccgtgagacacgcactgtgtgggacggactcctcatgaagcttttcttcaacagagactcggcgacaccgcgacacccaaaaacagacggatccaaaaaccatggagatccaaaaacatggcacaagtcgcctgccctctcgaagagttagtcacactcagctggatgaccgcctggaacccgccggacagcggcctgcagtgcagagtcacatgctgtgcgtgaaaggtgaccgagacggacgatggggacggggaagaatagagcccccaacaacaggagaactcagagagaaagtcgtttgtgataacggatgttcagccgtcgttaaagtggctttcggcagggcgaaagcgaagaacgtaggagacgccagagcgaaacaccgcattgattacgcgcaacggccctatgtcgccaccgttgctcctgctcacaccagctaccaaattgcacctgtgcttacgcacatcggtttttttcagacacagttgaatgtgaagattagtgcagtgtgcttggcgggttctttctcatgcgggttcatcaaccgaagcagcaaaaagggagtgcggctgagaaagagttacaccgtgatcatctgtgttggatataggcgccattctgtggacgagaaaagcagtcgatttccacgttgcggacgcaaacggggttcgcggaaccgatgaacgaaatctgtcgaaggttctggtaacaaactatgaatatctgtgctctgagcgaacttttcctccctctgtattcagacgcctgatttatgttaaagtgcagtgtctccagaagttcccacgacatgggaaacctgcataggcccagagaccgtttgcttgacgcggtgcatcccccccgaaactgcctttttctaccacaaaggtccacccagtgacgagtcctatattgtatatgcacaccacattaagacacaagtcacgcgcaagcataatgctcgtagcggggcacaagcaacgagaacggcagaaaaagacacgcgctttgtatggtgccgtcaggggccatgtaggcatcttctgcgaggcagtggtcgacattttcagggcaacatttcctttgttccacgctttccctatcgagttgcccgtattttctgctgttccacgaagcttcctctctcggttgtctgggtggcccgtggcacagagcagaaataagcaaaaagcggcaaaaaatgatccgtgccatcggacagaaggcttcgaaagacacctcgagcagtacgcttgtcagggcacaccaaagtcattcatttggttgcctcagagtaccgcagtcgtcagtcttttttgaggttgtagaacaggatgtctgcagtggctcacggtagactacgaatcttcacaggtgtctgcgcgggagtcttttgtctcctctgtttcgtctaaggaagtgtagaaccagtttgccgattatctgtctcgtttctcgttttcccatgcttcttcctgtgtatcctgttcaaaatagaagtctccatccatttatgttagtgatccaaactggtttacgcccaagcttgatgacgctctggctcgccaggcttgactcaggttggaatcttcggagaatcgctttccgtacctgtggcctcgcacaaacgtaaccagcacattccttttacgcatacctacgaccgtgcacggagtgaaagagaaacccttatttgcattcgcggttagtctcgctcaaagccttgcgcgtcgtccttccattccctactctccatcgaacgcagcaggcatccctgtataaatgattgcatgattttgtcccgtagactatctttgtttttgctctaggggtacctgtggtttcccttccagaggagatcccggtgatacacagaaatacgcaatattccccctggtctgcatattcagattagggcactggttgaacctgacaaataccctgattttttttcatacgctccaaatccccttttttctcacaagtggcgaaacgctgcctcagcttcttgttccatacaccagtatcgtcaatagatacatgcacatagatacgtacgttgccatcgagattgtattttttcacgtgcatcgcttaagcgttttatgcatgcccacggcatgtgcattcgtttataaatatttatacctctgcatggttacgtacgtctcaggatcgccgggttatctagttctctcatggttgctgagcttcttcgagtttaggcttctccatttgacaaga

SEQ ID NO: 2372 - DNA, 2641 bp, Toxoplasma gondii
  source 1..2641: mol_type = genomic DNA
ctggcaagtacttagatgtgaagccggtcgttggccgataactattctatacttaggtttttctgtagtcatcgtagttgtttatttttcgtcatcttccatacgggatgcggacacgtacaggatttggccgtcccggtggtcacgcatgcgaatgtgttccagttttttactagaactgcgggcagacagtctacacaactggagagttgaaagcggaggaagtcgcgtgagaggtttgaggttgccatattgcactgatggatgatttatttttcaattcacatcctgcttttttcacagatatttatcgttccacaggctccttttcaaagctggcacacactaacgtttttcgctggcagcatggaaaacacgcgaaactaggggaacaagaaatccaactgagtgtccagcaactaggcatcattacggcttttagctcagtggatccatgcattgtcaggttactgaactacgagtgcccacaggccttgtgcttaaattgtttatcagctatgcataagggcgcttcactaattctgttggacagcgaacatacttggccacgatttgcagtctgttcggaacccgccctttcagccttcacatcagagaaaatgacattcgtatttcatcaaaaggtggtacatgcaaacatggttgtcatagaattgttgtctatttcttccctgtgttgatgaatattctgtgtttttcccggtaacactctgtattcaaccaagaagaaccggagcgatttagtgtcccatttgatatattctcagacttgcttgcttgcgctataagtcgtggtaccatttctttgcctcacgatgagcggatacctcaccacttgccacactcatgtactagacagacgacgggtcacggctacacccacattgcccgttgctgtttttttttacacctcgctgcttgtaggcaagtctgctcgctgatttagatagcctgccgagtcttgtgtgcacacttctttactgctgtaccgccgtcgcatttccagttagtcggtttcctccattcgtccctcccacaaggagccaggttctcagacctttcgtttttctagcggacactctctctctcttaggactgccgttaacgcacgagtccatcatgaaggacagttccgccaggcaaacgggcaacgacgattttgaacgaaacaaaacccttttcagttatctgtttcatgcacttttatggtggcggggattgactacagctttccctgtttcgtgaacgcgccttggtagtcgtcagtggtctctgcagacactttgtgcgcatgatcgtttttttgaccctgggttttcggttcggcagctgcgcgatttcacactccgacttcgattattgctctcagttccctgcctttctcgtgaaacccgacgtaaatcagcgcaggcatttttctcagctcgcgccagccggatttgcagatgagctggccgtctacgcgacagttttccgtgtagcgtgtttcggttgcttgacctcatccgttttctcctaccacgttcccgcattcgctgcttgtttttctctgcagttgttcgtttacgtggcgaaagaattctgccggactcttgcaagttcttgcattgtaaaaaatggtgccccgccaagccgtcgctcgccgtcgtttttccgcatgcgttgagcgcgtaaatgtcccaagtgtgtacgtttttcaagattttaagagggcagagggagaatttcgtagtagccaactgttcgttaactatccaaatgagtacattttgtgtagtgcgacgtgccctcttttatccctcatttttctccgtcttcgagtgcttttcgctgttcagttagcactcgtgttggcaggtccgagggtccgcagcttgccatctaacctcatcgcgtcgtgactcggctgctgctgtttacgtgttttatttgaggcaagttcttgtacgtctacggccgcaactgctactttactgtacttctcattttcggaagacgatagaggatctttgcctttcccttccggcttgtttatctaaatgtgattccgtcgcagctcagctcggcgcgaggcacttgcgctgcaagaaacgtgcaagaaacggctgtgtatctgtctgagtacagaacgtcgttcgttccagattgtttttgtcgttcccaactttttcttgcgtgtcacccgcctttttctttttttcctgacgactgtcactcgagggttatggtgtccggcaggtgaaccgctgcagacaggcgtatgtaagccaagccagacgtttccatccacgaatcgtttttcttcgttttttcccccgttactttgcgcttactcgaagcgcctagtttccccttcccattcgaccttgccttccgctcgacggctccccgtttttctttcagatgcgacgcctccgcggccgtgtggctggtgatcccggaatcggcctgccgttcttgctgcttcttgaagcacaccccagacgattccggcggcgcctcgaagcagaaacaaatgaacaccatgcgttaatgctacagcgatactcagggtaatcttcggcaaacgtccgactccactttcagcttctccccgctcagcctcagtcggtttttggca

SEQ ID NO: 2373 - DNA, 1670 bp, Toxoplasma gondii
  source 1..1670: mol_type = genomic DNA
gttgcaaactaaaaatctggctcgacagcgtgtacagcgacgaatccgagacgcccccgatcttcactgccttcttgggcaggagggaactctcggtcaaccacccgtaagacatcttgtcgctttctggcctcaccgaaaccgcaaacgggagtatacaaggaaacgcgcacagacacagggtaaaacgcgaaactgttccgagaacgctgaggcagccaggggaaaggagtggcgcggacgatgggtaaaacgggacggcggaaagaaagcgcacaagactcagacaaccacggacacacggtaaatttgtgaaagaaagaataggaacgaaaggaacggattcctctgcagaccgaatgcagagcagatctcgttggttagtgactgcatctgctttttgcccgcaaacaagtctagttcgactgtttcgcgaaaactctgaaggcagaccgtgggctcgcaggcgaagaacggagggtctccctcggaaaacagcgaacaaacagggggtagcatccctttgtcacaaggaaaacaggcctgcatatctttatctgtctttttgcgtgctgctcctcgcaccagctggagccaaactcagccttgcgacaccgctgaagtcaggagaccgggaaagaagaacccgagaaactcaggctcacaagctgaatcgaaaaagaggtgcttcgctcgattggaacccatccaaagatcgactgtcacttgttgtctcgttcgcctcagatgtgccagttcaatcctctgtaagagagacacgggttggtgctgctttctgcaaacacccagtcagggtgaacgggacgaaggaaacgccgtgcatgctacaggccttcgtgacctcattgtttgcgaggcttctgaatctggaaagagactcgaccttcagcctccccttcactcatccaggacacgaagctgaacgtgaaggcggcaacagagtcgcgagcacgcgaggaacaaggaagtcgtatgagcaattgtcccggagaggaccgacggttttcagggctatcaagtgtgctcggctaagatggaattgtgaggcactgagcaaaatccaaagctcaaaaatggaccggggaaaaagaaaaatgaaggtgtaaacagaccactgaacgcggagacttctgtcagcgactcgcgttgacgcgtattatgcatgcagcctcctctctgcgtgtaaaagaattgttcgcctcgatgcctttttctaatgaaggactacatccagtatgttctttttcctacttcacccgtttctctcttctcatttcagagcttttccaacaagtttggggcgccgaagcaggcgtcaggcgaaacccatcgatttatcgacccagcgagccaaaacgcatgcacgcgttgttcgcagaacactcactccgcaaggcggcacatacaacgaggagcacgcgagccttcctcttttgtctttccatctctctcctttcttgcttttgttctggagagagcgttgtctgtgccgtctcatcctgtggtgctcggattgactgtctcccgacatctccgcaggtccgcgagtcgctggaagcatcgagacattgctttccgctgaagacgcaggagcattttgtcgcgcacctcgcctggtccttctcttcttccttcctttatcaccagga

SEQ ID NO: 2374 - DNA, 3111 bp, Toxoplasma gondii
  source 1..3111: mol_type = genomic DNA
atctctgctgttcgtttctgactgcggttcttggcatggagaattgggcgctgcggccgctgagctgtcggcgggattctcatcacgacgcgcttgcgagctctgcggttcttctcgcgctagcgtattcgtggcctctaggtcgtctaagaactcgctgtcaccatggtccctgaggacacgggaccgcctggcggcggagcgacttcgacggtctcggcggcttgccacagaaccgccctgccttccttgtctgcgtggctgtctccgtctgtgcgccagaaaaaagccgtcctccgtgatgtactggcggggcattcgcctgccttcacagtctatgcaggggcgcccggactcccgacagtcgacacagatccagggaaggcttatgtccgcgtgctccggagacaacaggcaacacgcgcggtgatagcgctcaccgcaagactgctcctcacacacgaggaagtcgcgatcgtcttggcgtacggtctggccacatgcagggcacatccagtctcggtgcagggttcccaaaaaatgcgaggcagccatagtgtcgtgctcggtatacgcagccacttgatccagtttccgaactcgcgtgacagcctcccgctctcccgtacgagagtaggaggccaaccaggagaacctgcatttgcactggggacaagaattctccctggtgcaccatttttcgatgcagacatggtgaaacacgtgcgagcagcaggagatcaagccgagagggagaagcgactgcctggaagatgccggtgagtcgcgcgaagaaagggcagaaggtttcatccgagataaacgtcgtctccgaacatacggtggcgaggatgaggaagctgctgggggagaaggatcgacagatacggcaggactctccgaaatgtcgatcacgtgagtagaaggtttcgcagcagtggtgccggggctagtctcgtcctcttccgcgcaattgtcctcttggaattccccgagacagacggcacacgcttggtcgagctgcagccgagaaagttgcaccacctcgggaaaaacttccgtcatcacatagctcttcgtcatgcgtttcttagccgcaggcttgctgctcgaaagagactgccgtggacccgccatctcgagaaaagttcgcagtctggggtttagctcttgtactgagtcaaaagcgtgacgcgccacaactgaaccgcacgactaacatcggccgagagaccgagatacgggttgatataccagttatcagatcagaatgatgaaacaagaaaatgcagcaagcgtgcatgtccagtggtcaaatgcaggtacaaagacgaatcggaaaatcgaacaacgacgctatcttgaactgaagagggacctgccttctgcagccagttgcaccgcgtggcgacttcggctttttccatgatctcgcgagaaagatacggcagccatttccgtaaatgagaaggggacgagcgaagcaggagaaagagcggataaagagaaaccgacgagcacctcgagggcggaaacagttgacctggtagctgacgacccgcagcctgtgacggcgcaaaatcgcgctctcgccacaggtcattcattcatgacgcagctactccccaactagtcgatacgggtgtgtcggttgctgcacaaaacagtggtataaatatatgaagagaccccattagggaccctgtacttcttgttttattttgagaggggaaaggaagctgaaaaattcgtggcgaatatgaaaacacaagcgcggatactctacttggagggattcagcttctctctactacagcttctccccgccatggacgggtcctttcgtctgctcgtgacccccccccccccacctccccgcccatagtaccagatgcaaccctaaaataggtgtactttcagaagcgtgtaagggatccagttgaagtgcccaccattacgaatgcttccatcccaaatgtgtgtctccacacgcagcaaggctggctccatttccttgcatttttgtgcttcggcagcccgatagctctgtatttttcgtgtgtacctgataaggaacccttgtatgcgctgctcgccacgctgctccttcgtggcttggtacctgcctagggagagcaagggacgggctagccggtggctgttccactctgccccatcccgaggtgcttgctaggtagcaatagagaattgctgaggcacagcgtgatttcctgctaatcacgtaaacacgagcaagtttgatgattttcaccctgtgttgctgtttctgttgggagtatagaagctctcgtggtgttacgacagggggatggggagcgtcgcattgcgatggtgtggtgtgaattagccctgatccttgcagtttatttgtaagcacaccagaaaccagaaagtaactacatccgtattgttgccctctctcttagagccctgtgttttaaagtgatggggcgccggaaactcgttgacaatagatcatactgtttatccaaaaatcagcatttgctgcagtgacttggtgagcgcggtaattgcggtcgaggctttccttgtgattgtttgtgcactccttaaaacaggttctgtgactcggttctcaactgcactttttcgtagagttgttatgatatgcttgttcatggatgtcaaatacattcctccccgctgcgaatgcgtagtcaggaaccgacaacaaacgctccgtctggtgtgccacaccagtgtttggcctcattttttcattcttcattaactcgttcgtcaccacatcgtcacttcatagctgttcctagagacaaactaagacattttgtaattgaaggtggtcccctttgtaggatttcaatctcccaccacgtgaccgagtgtttcctacttctgaacagttcctgtgggtccgtcggaaggcgtgtcgccaaacaggggtcttctgttccacgttgtgccctttttcaataatatttttgggagccaccgcttttcccctttgattttcaaagacaaaggaagcctgactcagtgaagactggactattcacccttcacagttcacctgtttggtaatttcctctcgttctgctctccggacca

SEQ ID NO: 2375 - DNA, 1876 bp, Toxoplasma gondii
  source 1..1876: mol_type = genomic DNA
aatgacacattaagagagtattgtacaccctgaaagaggcatgataacactacacacagtgaaaaatggaaaatgcagctggtgtccagaaagctgtcttcgggctctcccggccaagttaccctgccgtaaacgcccggcccgtccttacgggcaaccaggcacgaacaaaaatgctaaagagaagctctgcttcgcattttcagaattgtggacgcaggcaatgcgttctaggacggaagcaggcttaggtggcagcgccgccgtatcggccaggcaacaaacagcgacgtgtttcttggaagcatttgaagtgaaaacgaggaattcgaattcatcggaaatcaggttttgccctcgccccagagagacgacgagaaacaatcaaggtcttgtttgcctgatcaaaagttctagtgatggttgaactgccgaggaggcgagcactgtccaaacacaccagccgcagaaagcgtccgtcctgttaaaaggcacgttgtccctttgctttgtcgctactgaacagagtttttcttgctcttttcatcgtaaatatgtgtttcttctgcttcgtccgtacctctctttggcgccgccgagtttgacgctcctccccagtggcagcagcccgagccgcgggctcgacatgcggagaagtctcgtagcccaggacattttgtcgaaacggtggaaaactagaaagaaaagaaagtgcgagagacacacaaaccgtcacgcagactccgcgaacccacgttcagctggcgcgtgttcgttacttcctggcgactggagagaaagaaaacagtggactaggaacccgacgctgctcacagacacaatggtagtttgcggaattttcggggattccgaaaagcagagtcgaagtgaagattccttctgattggtgtgccggcatttgcttcgctgaccgcaggtcacacaactcgcgacaaaccgcctgtcgtggagactacaggggcgcagagatcgcgggagcgaagaaacagacaatttcactttgggaagacaccagaaaaacagaacagcgcacgagacacgctccggaaaagatacagcgaaacactctgctggtggcgttcggccaacacagaaattcagacgtcgactgtctcatcagagatcgtcactggttgcgagcatacgccgatttctccctcgccaggatttcgaaaatcccctgcgcgctgcatgcgcgctttttgctgaacacgcgactgccgggagagctcaacgaggcagaaagagaccagtacacatgtttcgaggaaaaatgtttcgtcccggggatccaaggaggacccaacgaaggtgtgaaaatgtcggatacctagatatctcccttcccagtcgctccaggtgtcacgcgccggttctccgcgattgccctcgtccctcttctgtcgcgtcgtcaactgcctcttttcgcctctcgtcattcgtctttcctcagtcgacagtcttctgcatccattcggtgtgcaattctcgtgcgcccctgtctggaagcaggcacatacagcctgagatagcctcgactgcacatcctgaatgtgcgtcgtaaggagctcggcctctcctccaggcggggtacctccgactctcgtctttgattctgccccctgtttatgataccactgtttcacagtcgtttcctgcccgcttatatggacacaattggcggtcgagttactagggacgccccgttgacagcaagacaagctgccgggcaacactcccggaaaaccaggctcagagaccggcggatatgactacaagggaactgcagtagaagaacagaaaacgaaaatacgaaaatacctgtagcgtctccgcggcgtctttgtgaaaacaa

SEQ ID NO: 2376 - DNA, 3584 bp, Toxoplasma gondii
  source 1..3584: mol_type = genomic DNA
tcgtacgcgcctcgcgacgtttctcagactcgagaaacgcagagactgtcgccacgagggcggtggctcgagtgctgctctctccgcctccccgtggacttcgagaacgagaaaccggaggaggggggcgcggtggggaagaagtcgcaggcggcatgcctgcctccggctgtttccgtgctccgagtgacgcgggaagagcgaaggtctgagacgctgccgtccctggagaagacgaacaggagggtgtgtgagaagcgtacctcggaggcgcaggagagcagtgagaggacggaggcgaagggatagagatagaggaagcgccgctgcactcgcttacgttaggcagaacagggaaggtattctggccgggccgagggccgcgcggcggccgcccgcgctgcagtccccagtggtagtgatggtgatggtgccgcgcgaggtgaggatgtctcggctgagaaaggtgaattgtgggtggaaaaccggaagaatgtggatggctttgaccgaatccctcccgaggcggaggcggctgcgcagcgtaactttgtggggctggaggacgtggtcctccaaaggcttgtccttgcggtgggtgtgacatagctgcgacgaattaagaagacgcaaaaaacgcaacggcggacagagagtcggggatagagccttccccgtgagtcgaatgtgacacgctgaaacgagagaacagtgaagagagcatggaggcgaaagtaagtacggaaaccggacaagagagagcacgagaggaaccagatgcagcagggtcgccgctgcgctagcagctcgacttgtttctcgaagtcaagaaaggcccgcgacgacgacgaacagagttacgggggtgagggcatagctaaaaaaggagggaaacgtgtgaaaaaaaacgagaaatagacgatgaagaaaggaacggaacttgggccttgactcgggcttgtgtcccgtttgtgcggggccagcgcagtgacgaaacgcgacagcgtataggaggccggggagaccgaggaactcgccgaaccctgcgtctgttcttgcatgtctcaaactcttggggttactttttaaatgcactaggaaaaaatagtttctctgctagagattctctatttttgcaggactggctgcattttgaccgcgatacgccgactcactcgcatgccgtacttgtgctggcaaaatcgccgtgcatgcgttatttcgacaagacgatcgcagaccccgaaaaacgaatacgcgctaaacgctaaccttcttctcagagagaagtgtgcttgtaaggtgattgaactgttctcggtattttgtttacgcacagcgacttagttgtttgtgttgagcctggagtaccgatggtctggatgaaacggttcggatttgccttttcaacaacttggaaagaacaaaggcctagagagggaggaacgcgatggaagaaagagtttcataatggggagaccttagacgcacgaaggaaacatgcgcgggatgtgcttcgtattgataaagggttcaacatgatgacaactggctcaggaatttgccttaatgtcgagggtggtctacacaaggacggtaaccggctagccatggttttccagagaattccctcaacgccgtgagatgaaacaatgagaggcttgctcaaagaaacatgacgcactcatcgcggcatgggagtcggcttttgtctggcatcgctgctgcgaaataccatgggacaatcccaacttaaactcagttggaggaagctcgtgggcagatgcgattctttcgtcactctctttgccttccaacctcgaatcaggaagcacagcaagcagcgagaatgttattggccgatagataaaggtgtagcatgaaacgtctcgagtgcctgagagaaactcgctcggctgatggggaagacacctagcgccgcccttcgggcaacggccagtagaccgcgtctacgtccgacgagaagtcctcaactgacgcaattgctctttcaatgggaatgtcgaacttacaagcgatatgtgatgcacgcaaaatgcgctgaacggtgtccggagtgcaccgtttaggccgttggtgtgtcactctacagactcgcttccgtaattctgcgcaccgtcaaccggctgtcttccacgcatgccctttccacgaattcacgatatcttctacagtctcatcaatacgctgaccctgtcaggaagcgcttgtttccgtaacccaagtgatggacttccacgtgataacaaaggcagctttatccattttctcgtgtatctcgtagctgtcttgcatgcttctacgtagaggtgcttgcagatgagcgtcctcaaggagggtaccaacgcttccggtacttgaaatgcggatccagtcctgggtcatgtacagactgagggattcctgtgtagtctgaatgcgccagacatgaggagaacgttctaagacgcacccttagcctccgaggaggacgtcagcatctctgagtctccagaggactggctgacgggataaacaccgcgacttgccagttgacgggcaaagctctttcctgcagagtcacttctgccgagcgtctgatagaagaagggagaatccgaaaaggctggtgatgcagcttccactgtggtgctgtctggattcacccagtgagcaccgccggcatatatacaggcatctgctgggacggctcagctctttccttgatttacatacaaggaacccaggtcgactctactccggtggaaaatctccggcatgcgctgtgttttttgtggctacggagaaagagggtatggagtagaggcagctgcatgacgtctaggcgccggggctacttctttgaacgtccctgcgtgaacttcaggagcgaggctaagcaaggcagtttgagtttctcattcatcagacatacaccacgagcggcttttgagtcgaattaatttaacccaatttgtatagtgagaatgccccgtcgaaagtgtgagttttgcttctgcgccgtcggtctcccgacgagaggaaactcaactcagactcagtctctacctagctgtagtgggcgctgtattactcctctccacaaagacacatacccttaccccgtcgcgaaacagctttgtttctttgaagtatcttttgtctacaaatagttcagtggggctatcgattccaatccatgtcccgcaggttgtgcaacagtggagcgcagcggctatccattgaactttttctatgcgttgactacaggtttcttcgatgcatttagaaaacgcagtggttcctctgcacctttgagtttacaccacacacacacacacactaacggtagagcaaacagacagccgttacgtgtctctgatgaagcggtgcgtttccgtttgtcagagatggcgtggagtttctcatcgaggatcctcctggtttacacgggagaaaatcaagaaaggcgtctgcgaaggaaatcgagaaagttgagttcctctgctacgcgtttcacctttttctttccttgcagaggcgagttcaccaccgtggacatgggaatggctgtttgcaggcta

SEQ ID NO: 2377 - DNA, 1278 bp, Toxoplasma gondii
  source 1..1278: mol_type = genomic DNA
ctcgtcacagcttcgcgcttccttttcgttataccgagtcacagttccttttcgttataccaagtcacagttccttttcgttatactaagtcacagttccttttcgttgcaggacagcactcttccttctctgtttttcgcggccgcaaagcgacatttctagctgctccgtcgagtctgcgtctgaatcgtttttgagtcgtggagaggcggacagggcaaagctggcccatcgcgtttcttgttccagtcgagttccacgggagttgcttgtggaggaaaaagttttgcgtctctgcgatactctggtcgacatgcatgcgcattaagaagccatccaccagcttttctggataggctggcttctctgcgcttcgaagaagcgagaaaaaaagctactcgatcagagcgtctcaaaagtttctactttctcggctgcagtctccaaagcaattagtcgacacgagacatatacatatatatatattatatttgcactcgatcaccgcgtttcttccatatatgtttcagtgcacctctgcagaaacgtatcttgtacatatatggagtccgtttgtctcggcagtgttggaacgccgcgacgtttcttcacacgagagagaggcctgctgttgctccttacaccttccacggtttttccaccgaggctcgactgtagaagtccgaccgcgttcagatcagaagaatgttttacagaaactgttgagaggagacggaagagaggagagcctctgctgtcactggaggactccgagaggctgcaagacaacgagaacgaaggcgcaacatatcgatgcgcgcatgtgtaggcgctcgctgtatcgtgagttgcatgcagcggggaagaaggagtttttatcgctccggagaaagaatcccatttgggcgcattttgcttcacttgaacagattttctcctcaactttgcgtaagtttctccctcaatttcgtcgccttctcattaccgtcagattcgttctcgcgcctgtctccgttcgcgcgcgactctgctgtgtcctcctctctcgcgtctccgtatttccccgtttcgcatgcgcctcgcgcttcgtcttcgtggagctttttgctttgcctcaagtgagaaagagacagtcgatctcgaggcctcgcgctgtccggacaccgcagtgtccgagttgcttgcagcgctgcatgcagttgctgtctcaaatcgagagagcggaacgaaagagagaactttcccctcaaacaggatgtgagcgccggagacgcaga

SEQ ID NO: 2378 - DNA, 2931 bp, Toxoplasma gondii
  source 1..2931: mol_type = genomic DNA
caagtgtgcatggctctcgggatcgtagctctttcgagcatgtggttgacccttccttacggtcaccctacgctggcccttccaggcctggaagcggctgcggcagtaacttcggaatcgctgcggggttccaccagagttcatcttcaagtgtgggactcgccagaaatccttccagaggctatgatgatgtcaacatggggcacccagtcgcgccacgaggtgtgttgaattcgatgccagttgtccgcacgcctactctgacaagagccgtatcacggcgattgggcgcagaatcaggtttcagcactccaaatggatccaatatataagaaatgatctactgcaacgcgtgaacagtagatgctgaacagaccagacctgtgaggcgatgtgtacgctgaagagcgcgcacgatgggcaggcacagataagcaagaccacagtgaaggaaaacccctttgactagtgtccaactatcctgttcgtgtctcctgtgtgtttgaattgtattgaccggccaccgtattgctccaggtgcaaacagtgttggtgcgccacggatgccaacacgacgacttcgtggcttgttttattttcttgtgaaggaaggatcaaggatcaaacgttttgcttgtgtaatgagaccctgtctgaaagaacttcgacagatagagtgtttcagggtgcggcggtaaatgcattcgcgaagggaacgtttgatcagggaaatgacggtttagttcattttttaatcggtagacgcccaccaccaggcgaacaatttcaacgacacggtaaacgtcgcaagtttttgtgtgttgttcaatgtagccactcttgcatttccagtgtgcgccgcctcttgagcgtaaattccgcacagtgtccctggggattgagtgtttccgcgtgtgtgcagtaccggtattcgaagtttggttcctttaatagtttgcctctcgagtcaactggtgttcccgcgtctgagaagtcccgttatcgaatagtctgttgcttgagtgcttcgcttttcgaaataactgaagatcgttacagcttcatgagaggaaccaacgccttcaggcatcgaagtttttttgtcctatcatgaggtaaaagtggcagaaacgtgcgagtctcgaagacagtaaagctactcctagtattgcaactgcaggaatgcgtatacgctgctttcacgttgtcgggttctctttgaccaaacgattattgcctagcagcttgacggaatcgccatcggcagttctatctcctggttagcagggctggcctcgcgacggatttatctttggcccggtgttgcgatttacattgccagtgactgggtaggtcccaatattctaagcgctccacattgcgtcgtacagacaaaacgacagctttgcagttgaaacacgctcaaaagcagaaactcttcttgttcaccgtagtgggaaagcgtatttaaacgatctcgctgggagagcgaggtcggtagtgccactatttggaagccgagcttggctatcacaggccttgcaaggaactgcaatgcaaaagaacctgtgatattctgtcagcgtccacaccgtagcacaaggtagcgcacgctgagcatgagcagttacagttttaaaaaaatcaggacatatattagttatgctacatttcagtaaaatgattctgtttaataactatagatttctgtgagcactattgctttttcgtttaaaatgttttcttcaaaatctttttcgcggatgcctgcgttccccataagcagtagctgcgactgttactcacgcttagcgaaaactaatcaagcaatactcaaaacggttcaaatgcctcttgaatttgcggtgggattaagatacatttcaggcgaagcagagcagttgggtagctcgtcggcggcagtgaagacagaagttgtagaaccgaacgccatggttatacatggcccacttccagccgaaggtaataatgctatctggttcttcttcccttgtgagcagtccacttggtctcgtcagccttggaagtttaaggcgtgtcagacttctgcacccaatcgcgaactctgtgtaccttccgcttggaaaatggagttgcatacgagcgaagcgaggaacttgctgataaatgaccaccaccaggtctttagggacgagcggtttcgtggggccgcgaggggatcgagtgtgttttgaggagttgactgccaagccctgttaagcaactctgcgtaggcgggaggctttgcaatcgatcttgacgtcccaaccaagaatacatgatcaactcctgtccgtcagtgtagcgctgtcaatcctcatttggtctaaggtgtcagaacttgacatgcgctctcgattgtcagagtgatcagcaacatcataggttgcacgcattcaaacaacagacgttgcatgtgacgatttgatgcttcatatcccatgggtctatgaaaagaggactacgatccatcgtagcgtgttagttgcactgttcatctagtaactaaccgcttcttgcaagtgttcagcgcattcgcagaactagtgtaccctcgtgttacgtatgtagtcgccgcaagaagtcaaaatacattctccaattttcttcgcgcatacgttcaaaaccaacggtgcaacaaaattgtacatttgagtagcctctgggttcttaactcatccgctcgcgctctgcaccaataaatattttcacactacagttccccgtcctctaggtgctttatgtggtatcctgttcgaacgtcgtgaactcttgcaggagagtctcggcgagatcccatcgtgtggtgatacgtttttacccgctactacctccaccggcagctcaactgttcgagcaggagacgagcgggcgctgccgaaacttgattcgttctctttgtgcaagcca

SEQ ID NO: 2379 - DNA, 4184 bp, Toxoplasma gondii
  source 1..4184: mol_type = genomic DNA
ccgtaactgggacctgcctgatccactgtcgtccctgtcggatctttcctcgggagctgtctccacccataaggggtctttctgcattgcctcctccccctctgtgggaccggaacaatgccgtatgaacacgcacgggcacctgcggacacagatccggaagtctccctgttcttcacctccttcaggcgcctgccgtccatgggtgtccctgtgcaagaccttaacagcaaggtcgctgtggtcatccatgaaccaggaactgtcctctttgttcgttcagcagtgcattcagttgtgaacgcgtgtaagaaagtggaaggacagctgctacaggcgtccacggaaggagcggcagccagggccgcgcgtacgccacctaagggcgagcatagaagaaaggagggaccaaaaggcaccaagacaagagcgaaacttagtagaaagaaaagaagtgtcaaaaagctattgaaggggccgcaaaggggaagaatccgagtcgaggactccgtcacctgaagagcaatgcaggcggggagagggacgacgccagtggcagcagggctgcagcgcatctttgggtctgtgtgtgcctcagactcgaaaagatgcgaagaaggttcactgtaagtgaaatgcgtgagtgcagcactctgtgagcgcttgaatatcattgttcgggggagacatcacttcgatcaactgccggcacaatcgagcctgtacgacgtgacaagagaggcgacagagctgttctgacgtatcggcatcggattgtaacgacattgtctccctcaaaatgaaggaaacacctcaaaatttcaggtgcaacgtcaatcgccgtggcaggaaatggggggaagccagccccgtggcaagcgcgagtgggccctcccaagaaatctgctctggggcacactcacactgggttgacattctgtgtcatccaagccaaacaacggggtgccaaaagatcttgagaaaaagtcgtgcgaacttgcatgggctgcgaaagtagctgatggtgcaataaaatatacctcgaatctattcagcctctcaattgccggctgcaccttcgcgcaaaatgtctatggcggaggaagagcatgtcatgtaattctccatattcgaacagccaaccaaaactcgaagactcgattagcagatcccttccgaagaaagactggtcttatcctttgtccggtaaaatcttcagagtgaaatggattgacaagacaatgaccagacgcttgtgtaatgcatgcgtaaagtcgtccggcttgctgaagcaaacgtactcgtaagctcgaccgcctcttctccgagtcggaccaagaaaattagaagcagtttacgacgggcaagccgaatctgtcaaagtaagtccaaatagtctcacaatttcggattgtgtacctctctggcatgcattgtgtagcctttttgcaggtaatctggactcatggtgaccgaatggtacgcaaatggcgcaaacatagacgtgctttggcgtctataaaaatctagcaatgcttgtcaagtctcttgtatctatttagttcactgcgtactcaggatcacaccaaaagagctatctaatggtactagggaggagcaaatcgcgttagcttttggtaaaacactatctttcagctaaacgaggcctgccagaaaggaccttgtccggagggaaagtggagtcgtaaccggagagaaacgtgccacgcctcctcttgcagccgacagaaaccaactgcaatttcgacacatcggacggcaaacagatgcaccaaaacaagaacaaacggtgcgtcagttgaaagaccagaagatcgacaatcctcgacatagaaaaccacagaaaaaaagcgaaacagcgcctgcagagcgtcagtcgaactaaccatgggtgaagaacaggggcgactgacagaaggtacccttaaattccctctacgaaagcagtgcaccagatgccacggaaatcgcttctcgggatcgacagccaaagtatgcgaaagacccaggattcaccattcgtcacgcgcgagagccgtctctaaacaaaacggcttgtctagttgactcgccacgacaaagttacgtaactataaccatcaactgaattcgtcactgtcacatcagcgacaaatctgacttgtgacatgcaattttcagcgctttctcacaccttcgttttcccaattcttggcgtggaagagaggaagaatgtcacgattttgaacagcgtccctttcccataaacgtgaagtcgcgacgctgacaacggattgtgaagacaagactagatgcaatcaactctccacagcaacctgcggcttatgtactcaaattcagaagatagcacagcgaaaattgtcctcactgcaacggcaactcgcgtaagtcacatagatgcgtatgcgcgacggtagtcaatacagttttcgaatcgtttctaaagcatgcgcgctgaccattccttcaacacgtgagctagtaaacattcggctgttgcacagtcatgaggcatacacctgcaaatgcactcactcctggaaaaggaatgcagcacctcaacacaccacaagtgatacaggacactagaggacgctgtagagcctcttgccaggcttgcacggtggcgtgtcggtcaccggaagctccacacacttttcttcgtaagcgccgtcatagcaggtgtaggaaatctagattgtccggaagcctgaaatcgagtgttggcccgctccgacttgtgcgtctcgtatccgaccactgtctgtttctcgttgcacggtgactgctgaacctcctggatgacggctgtgcagattcctgtctcgtagattaaaatatcgatacaccttcacagaggtgtctgttccacgcacagcgcctcgaattgatatgttaagctgctgctgatccccgaagatctcttcaaactattgtcgcgcacacagcttcacaattgtcttaaacactgttgcaacgcagcgtcgtaccagtaccaatgcggtaagggcaacggagttggggggggggggcttatcgtcagcgtggcaagattagtcaacgcactgaagttcgtatggaggctcagggtttccctagcggccgtcgcaaatatgggggcttgtccgagcagttgcgcctcgttggtggtgtggatatctacgactagtcgaatccgtcatgcagatacgtatgctgcacgtgaagagttggtcgtacatcgttgttcatggccgttggcaatggaccgcgaaggaattctactctaatgcggctgtaacggccacacacaggatcgccacccatccccaacatggagacccaccccggcgctgtcgcacgtggtacctgaccattttcctcgtgtagcctcgaaatgacgtaaacttctggggcgcagtgggaggacgcttagctagcaaaacactgaccattttgtacggctgcactgtggcactggccatggggaatgtctacgcgtttcctcccataataacgcttcaacttaaactcgtcgaccccggtgaaaggagtccctccgccgtgtaaacctgtccctgaggggctggaggctgcatttcaccacaacaaacattatatatgcgtgccatgcgtaacgatactattgatgcggtttccctgggtagcgagccatgatccaggggaaaatgaaaccagccgttagctatccactgcttccccccttcaagctctacgcagagagagctctactgttctcccctcagagagaccgactgtcccttccgtgctagtatcgcgccaacgcgggtcgaccgcgccacccgcgctgagatttcattttcgtatcgaccattctgcggggatctacgcaacagaattgtgccactcgcgcttgccgtagctactctatctgttcctttcctctgagccataactgttgtcaagccgagcagatattgacgatttgacccgaaaaacggtagcctcacagtcgaacgcgaacgatgctcctcaatctacccgctcctgtccagcgacccacgctcgtccccgtgcctctgatagaactgagccctcttcagaaaagccgggtatcccagcatcacacgctaacctctccggtttgcggggtttcgattcaggccttatggttcgtgggaaggcggcgtgacacaggcaaa

SEQ ID NO: 2380 - DNA, 4664 bp, Toxoplasma gondii
  source 1..4664: mol_type = genomic DNA
agaaagagaggctctgaaacgacaagaaggccattcttcgactgaggcgtcgcgacaggcgcgcccgcctcttcttcgcactcccgtcacggttcgtcttctccctccttcgtccgagtcgtcttgaccaacacacagctggacagactcaagataaaagcagaaacggggacagaaggagttccagcacatcgataacccatgctcgccccgtacgcttgcccatgccgcccgtcctgaacatctccggtccctcctacacacagagggcgcacagatgtatgttggtgaacccagtccgctggaagttgaagtccgacaagaagtgagtctagtctgtcaaacgtgaacgcgattgtttagaaccacggacaaagaagagaacagtgaggctccgtagtgttacgtatctaattcgcttgtagtagtagtagtggtagcagtggcagacttgcgggtgagtgcattttaccgcagctcggcgcgagaccaaagtggattaagagagtaccgaaataagaaacacacagatatgagactgatttagatatagagggacaagagacaagcggacttttagagacgtccggcaggtgggcgcatgagtcgaaagactctctctgtgtcatttcggtgatttttgaaggcaaccgcttcacgaagagcgcccagcgtaatacaaagagacgaggaacaactctcagctttccaacaaaaaaccagaagaggcacaattgcgtgagggcgtcagtgatgcagcgacagcttagaacggcgcacgacgcgttccccacaggctaccacagcgtggaaagggtgtcggcgacgagccgcgggagacaacagaaaataaaacggaaacggggaaagaatgcaaattcttagctttccgttgagaaaccggaagaggggcgtgggacgaacctcggggtggggggcaggaaagggtcctgacccgcagaagctggctgtggcgcagggcaactgtgaacagttccgatacgggattcgatccgcagcgagctttttaaaggaactatttaggttgcaagcaagtttcacagagaagcagcgaaaaagcgagttctttcgcgcaaaagttgaggaggccggcagagagggggaaggtctgcgacgggatgagtggaagctcacgcgcgtcacgcgctgtgtgacgaagattatgtgccggtctacaaatccgagacgaaagacagaaacaaaggcatgagagaagagaacggccagaagcgaacgccgagcaagaagcgagagaaaggacgctcccggtgacggggataataactcagggtaccgcgccacgcttggtctctcgcatcccgaggggagagaggggcgacgcagagaaaacagagactcaggcagcacacgagaccgaaagaaagagagagagagacagagagacgggagagaaggacaaaggagtcacgaacgcgttttcgccaaaaagaggaaaaaaggctagtgcgggaacaaggaaacgctctccagcgctctccccgtccggccacatgtgtgtttcaaaaaacgacgcttcgtcctcttattgccacgcacgcgtcccacctgctgacctttaaacacacttgcaatttgctcccaccctgctccatataaacgacgagctcaacacacgggtattgcagggcagtctcgccgaagacgctcagagacggcaaaccatctcgaggtgccgagacgtgcgcttgagcacgcaaaaagcagaaatggaagcgaaagctttcgtgggggccgaaactctcaactgcacgcgtgttgatcgcagtgtgagagcccgggaggacgacagacgctgcagactgtctgtgagagacgcctggcctgttttttggaggaagcgacgtggttgtcaacgcttttttccgatccgatggaaaatgggacgaaaacagccaaccgtacggctgtaaactgtgtggaggcctccttccaccgtggccaagaaaaggtgctttttgcccaggtgtgtctgtccgggtaggctgtccacgctctccgtcgttgatcgcttctccgtttctcagactgcttttgccgtaccacaacagtttcgagccagtcatcttccttttcgcctacggatgggaggaacgctgtttttttctagttttcaaagtaagaacgacccctttgcacggtgtgcagaaacggcgggaccagtcggggccagtccagcagcaagcggctgcggttactgccgcatgtgtgttttccaaggaacaagcggtccgaaaaagtagaccgtggagaggtacacgctccaatgggttacgcatacgttgcaaatcctggcagggacaaaggaaagtgtgtttgtggagactgcggggttttctcacaaccgttaagccaggcgccggatgtccttagcgtacatgttcaaagtctgtagcgcgaacacgccattatgcgaaaccgtcatcagttgacacacgcctctctcactatctcaccactgtaaacccaaacggaaaacgtcattttttgcctcatcgttgctggatcctgtggagaagccccactgtagaaggtggtcgatccgtaacttgggagttccgtcgctgaccggaaagtgttactgtgttcacccgtgcttagaggcaacgatgtttctttgtttcgccgtctgcctacctgccgctactgcatttgagaaacgagttgtgtgcgctatgtgaaactgctgagacagcagtcggatatctgtagcggcaacgtgtgaaactccggtacgcgttgtttagagcacacagcgggctaccaggtttaggggcgacactacgaaggcagcgtcggtagattcagttcctccaagttcctgatgcagttcgaggcaaaactctgtatttcgtagaccccgatcacacgtggagtaagcagtccacgacagcagtctctgtgcttcatttgagcttcagggtgaaacatcagaaccataacggttcgtcgaaacacagcctcagctcgaacacgttccgtcatgatgccagtttgcgctgaaggtcgttgctgtcgtgccgagcatagtcgacggacaatgcatcatccggatgccatggagatttacactcgatcggcactgtcgttcgccttttgtatgcgggttcttagagaacagggactatagcgctaagtaactcacaaacaacggctcatgttggttgtgactaactgctcccgatagagatgtgtgtgggctcttagtcggccaggagactcggtgtttccagaggacagagtcatcagctgacacagtggacatcgattgtattgccggtgcgtgtgtagtcaacgtccttctctctctctacgcttcttggggacagcacacaactgaagaccttaaaactatggtaactgcgttgggggagcgtttgaacgattgggagtagttcgacgtttggggtgggtcggcggtgttgttcgttgccgtcgggcagacaatgaaagaacgttaccactgcaaatttcgaagattgaccacatttcaacgcgaagcagatgtgccacgatgaaaacattggcaacttgtacacactgtctgatgtgaaggcatgcactgctgtgtcagcgcaacattttagttcactgtcaccgaagctggaaaagtctatagactgtgttgaccagcatgaagctccacaaaacaacacatttctagataagtaggacgtgaatacacgcggtgattccttgcgtccattcacgtgcactgttgttcaagcaaagaatacggaaacttagtccacatggttgtgttctaccggttgagcaccacacaccacgggcacgatatgcgaaaacaaaacgaatgtgttaagaaaggcactccatcgaattcggtatgccgtcttttgtgccctcgctgagacagctacgctctgctcgtggtccagaaatagtcatttttttgcgtcccgttccactgtgtgttcttactgggtactagtgtgtcgattgtcgtcatcgttttcttcgcctgtctcagtgtcactaaagtgctggccactgccttctgttctctgttcgtttgcagttatttcacccatgtccaacgcaaaccctaggaaaatcgcctcgacggaccatctgctttgcggaccctccaccaattaaatcctcggtgcccttttaccggtgacacgatctcattctgtcgccagcactacgtctgacggatcgtgaactgacaccaggaactgcaaacatttgcacccgcttgtgcgtgtccgacgcgggtgggtggtcctgatccgttgacggacgacagcgctgttccgaggattgtccggatgcggccagcctgtgtcaggacacgtccgcagtactttttagtgtggtttgtcagttcattgactaacttctcggcagccggctccgtctcactcttcctaacgcccacaactagataaacgtgagtgcgggcgtctctcctttctacgtttcttggcgttcacggtcaagcgtatcagagtgactctcgcgtcaccgcggcttcgggctctctgctgttcgactacgggtaagttttcaccactggacagaacaaaaacactcttcccgccttctccaagcgtttcgattaagctttgtttcccttcctctccgcatcttttctggaa

SEQ ID NO: 2381 - DNA, 4791 bp, Toxoplasma gondii
  source 1..4791: mol_type = genomic DNA
gacaaaaaggcgagccatctagacaggtagcgggcggtgtggtgcctctaagttccagtgagaatacagctgctgcctgctcatccgcagggattagaacaaactgttcgctacaaaaactcggatcctcgagggcatcggcgcagaagtcgcgccgcctcgtggagatcaggtgccgtttctgctccttcgtgttcaaacatctcgctgcaggcctccgtgtcgccagattgtttccagattctctctgtgcaatctttttaaaacgctgcgcagcatgtttccttgtcaccgctcctctcgccctcttctctacgtcacatccttcttcgtttcggatcccacggcctttcgtggggtccctggtcgcttggcaaggggctggtgcttatgggaaaatcgtagcacggctgagtagtcgaaactcgggtactcgtttagccagcttatcacgtcccaaaagaacataagattttttgccaggaacacgtagaaaaccagccggttgtggaagaaacgaaaaagcagtgtcccaagagtccgggttccccctgttcgcgccacggtcatctggtcgtagtagtctctgtagacgaagatatacgagtcgaggacttggagaaaaagcgtggcgaaaaggagcgaaattttccaccgcgcctcgaccttcagtgcctttcggcgatctcgcacgcaacgccgttgcagtcgttcctcgaggccccgcgcgctggcaggcacttcggctccgtttgcctgcgccttccgtctcgctgtaaagaccgcacgacggcgcaacgcttctgccgactgcagtgccttctcaccacacggggcttcccgcgtttcgtcgagcgagcgagactgagacctcgcaggaaatggagaaagggacggatgcggcgaaagcgtgcggtccttgctgacgtccgcctgactaagtcgctcgctgagtggcgtcccccagacagaacccggaggctcggctacgacctctgctgtgtttccagaagagatttgtgagtcaaaaatccggtgttgcccggtttgaacagaagaattgcctgcagcagtctcctggtgttcgtcctctgtcgtgcgatggtgcaagccagttcctccacccagtcgttcacgaccctgcgacctagaggactggtcgtcgctcaactcagaaacgccattctcaccggaagaaatcagtgaggaccattgattgccgacttcagcaaaggagacatccaataagacgtcgctcgttccaggctcggagccgccgttcgccgcgagcgtgaacggcaagtgctgaggactccatgccgccaggagcagcgccagcagggggggaagagcaaacacagatccaacaagattcttgcacattgcagcccttcggtaaaacatagtacccgacagaattcgagtagaagtcgctggaggcagcggcggaacaaagtccgccttctcgagctgcataagggagctttagaccggcgggtcccgccggtctacaatgcctctcccaggtgtgtcacacgcgcattctactcgcgtttgagaacgcggaataaatgtcactttcatgaagccatatgttggagaagcctcgtctgtttgttgcagaaaggaatatctgaatttacgtacccaggccgatttttaagtcgctgttgtgcctcttcgcggagagcggaacttacgggggacctccagagtcggtgaaaaaagtggcgcgacaaatgctcggagaaggaagggaaacgcacaggaaacgggtccgtcaaaatggatgcatgtaacataaagtagagactctcggtctccaaaggactcatctgtgtcgtaggggagcctcaagttctttttcgtggacgtatgattctcgcttcggaggatgggaaagacactccgaacccccatacaggagtatgctggcgcggcaagcggatgacgcaaggaactcacagtcgttgagttaaatgtaattcgatgcagcacgggaaaattgctttgccgttgttcacagtctaatcttgtgggcctgtggtgaacctgttattcagactaatgagagcagtggccccgtctgcctgctgctgcgtgaggctacgacacgaattctcccggcttgcgcgccacactgcttacagggtggttgacattccgggagttaacatatttactcgtatagaacatgcgaagacgcttgaaagagataaatgtacgattagtttttatttcgtgttgagttgcgcccatgaaaacggtaggagcacggtcgtcggtgggtttctgatacagctcacgcagcagcttcgcgaaatcctggctgaatgagacttctctgcgatgcgggaaagaaacagttgcgttcgggcagtggggataaaaaaacgtcaagaaaccacaactcttcttaaaccgccataaaatgttattcaaagcaacaccagcagtatctcttcgctcacattgtgctcatatcttttgcgaactgtgcgtctaacttggccacagtctcaggccaagtcctgtggagtgctgtgtgccgaccgtggtctggtggactataaccggcggctaaaaaagatatgactcatggttccgaggaactatcataggaaaatgggaactaactaggtggtgtctctgctcagtttatagaagcttcacggttcagaccgtcaccaccagtgtatgcatccagtgaattcacatgggattttgcttgtcactcccacagacgtcaaacacgcgcacatgcggaacgaaaccgtaatcgcagtacgtcgtcaatcctgtactaatcacacgtctcccgacctaaaacaccctggttgctgcctttggtttgtaagcacaggatctcactctcgtttcggtcctcgcagcacggcaacggcctccatggtaccaaacggcaacggttctatctattatagccctcaggtcaccacacaagacgtcttatggatgtttccggatagtccgtcctaagttgtcaacaatgcccctgtgatagaactgcacgttcaagtttttccggctcttgtcgaaagccgcctgctggatgttcttgtctgtacaacaaaaagcgtggtgctctccaatccccatttggaatgtcttagcagatgtgggtgaggtgcgtatctcaactctattgtttttcgttggtagatatatcagccgtaatttgctggcaaggtgtgccaaacgccaccgtgccaagtcagtgtcgatagtccaccgaagtgcgtccaaacagtcgcagaaaaagtgtgttcacctggttaattgctccccgttcgttgaagtgtttttcaggattgctggtgtatacatacgaagtctctcttacaagatgtgcgtgctggaggagttaacgtgatggatgcatagtcctcccgaattcgaccagcaacctcacaaataggtgggctcagtcacgtcattgtgcgcgtctagcaagagaagagtatgaagcatcaaaaccgaatcctctctcgaaaggaatttcctgagccaacacgagttccgcttcagccttgaagcctcaaggacagaggaaacttgggtgccttggcagcgcaactcgataaccagggcagtgtgttcgcaaggcagtgctgaagctccacaggttttgcgacacacattcctatccctcctatccttgtcatctcttccaacatagggtttatccaagagacagtgggtcggcgcagatatcagctccgtggtttcaacagttcccacggtgccagcagcggaactgatgtagacgcgggaattgtcgaatggtaagacagataggagaggtcatctgcccccttgttaagtcgacagtcagcacaggtttcttatcctttgatatgatcattcacagggaacacggaaaattcatccgggtcaaccaattaccgccggtttcagagaacctgctcaagcagccagtatccaggccaagggctcggggggttcgagcgtggggtggcagttgagagccagacgctaccgccaagctggaggcgcagctgttcgcgtagccgtccgttccgcgtgcattggaattttaaaaggaattcacccattgttttactgtatacgtctcatgcaaacttcgtttttggttgttaaaatccgggccgatctacacttctgcccattcgaggcaccactacgacctgtatgaatcttcccccttgcgactgttcctgtcgcggacggtgcggacttgacagctcctgtgcttgctggcccaactgttgagctggcgcggtgaacagaatcgagacgggagctgtcccatacttgaggaccccccgcgttccccctcaaccgcctcaacaaatctcaggaaggatctgcgtgctaaaagtcttttcttttccagaagttggaccgatcctggccccaaggttgagatttggtttcggacaatcgactatcagagagctgattttctgctcgtggctggttgagcgataccccagtacagccgtcaccccaaatacgcaggacttcgccccgcagccgcgccatcttctttgacgcgcatgcggcgttcttgtcctctactccccaagagttccgtttatgtttaccttcaatctgcgcgaaaggagtcagcccaggacgctgtagaacatcaggaactctgagtggaaagcagcagctagttaaccatcttcctaggccgttcacgtcgattccgcgcccgcgacaaacgggaaatcgctgtggtctttttgagctgcttccgacagtaggttttccgctctacagaaa

SEQ ID NO: 2382 - DNA, 2587 bp, Toxoplasma gondii
  source 1..2587: mol_type = genomic DNA
gaaacaaaagggcgagagaaaactgtgacatgcgtccagcctgtgtgcaggtgttgggtttcacgtgcacagacatttaccctggcagtcaatgcagttatgacggtcgcgtggttccgttttggagccgttgaacgaggtatacttttccacggaggatcgttcagcttctctccgtatacatattgtatacatgtctatatatgaagatacactccctttctatgtatctctctgaacatgcatgcttctgtccatatggaagtgcaacggaagtcggcatccacgacaattgctccgactccagatgtgggcttgaatcgcccggcctatgcgattcaacgaaggctcttcacgacacgagaagtatcacggttcacaaacgagaagctctcgcgtagtaccaacgaagtaaatattcgacaaatccaaggatcctcttgattccacgcacaccaagtcctccagtcaacccgtccctacgttcacctttccttctcttttcctgcgaagggcatgcgacaccagaaaacaacggtagctcgattccctgatacgctttgtaaataggcgattgtggcgctttgagatcatgctatcggcgaaaaggaaagtgcttttcacagggaagggatgcttagtcactcttctactgacaggtggacgcaacggaaaacacctgcaggcaaagaacttgataacaacttgatgatctcttatcattcccggaggtccacagagctagcactgttgtggacaagctttccacatatcaccgcattcactttggtatgacggaagccacagacttttcacgggaccttagaaactcgacgcgagccttctagtggcttttgctggcaccctgaaagccgctgtgccacggggaaggtgagataagacgaatcaaagcattctgtgttcctccttcgccctcagacgcccgacaggaagaacgcttaccttccctcaagtgccaccgaaattggcacgcattcctttacgtgtgtactaagagaaagtgtctcatcggaagaaagaagtctccctctgcagtcagtgaaagcctctttctgtggagagaaaacgtgtgattcttctacgagaaccagatgacacaagatatttctccgggcaccggcgacgcctccaacacgcagccttgtcgaaacggggcaagtgggtacatgtcttttctctgttctctccgccaaggaaaagggtaagcttcacgatgtcttggctacacacagaaccctgttttttcatcggcggcgagcagcgcttctgtgaaaacgaggccccgacttttctcgcaagaaagctgttcgcgaaaatgcgcccgcgactggaaccctagcattccccgcccgagcccacactggaagaggttcccgcgtctacggcaagaaaagccttcaatcggcttttgttagagctcaaaacaccttctttttcttggatatttcccctgtccaaattccccttcgatgcttcttgtcctagacgctcgttccgtcctctgtgtggttctgccggcacgtaggtctctgtctcttccccgcagttctgccgtctctctcaaggcctgtgttgtctgttcgtttgtgtccctttcttctcgagttctccaccagactaagaagggaattcccagcacaacgtggcagaagggcctttttctccgaagagaaaacgcaagcccttacattcgctcatcctagacttgccgttttaggacttgttcgtggataagtaacgtttttcctcattgttttccgcggaatcacttcaggtttccacgtttcctctttttctagctactcaatcgctttaaaaagcagcgggagtgtcctcaaatgcgcctcggtgtcccgggaaccccacaggcccccatcaaacgggtgggtatccacaggttcgttacggtctgtttgattcgtttttctccctccttttttctctccgttttcatccgctctttcgtttcccgttcctgactctccgaggcagcaggcttcttcgttgagtttcctaagccagtgccttgcggggttcgtcggtgcgcagtgtactcctgtgagacttacgtggcactcttgtgccgcattcacgggcatgcctcaacacacggtgtcagtttccttcatgctagagctcgcgggcatagagcgcatgttttcagctttgcaggtgttgtctcatttccacagttcgaagtcgctcttccaaccgcggttcgtgtctttccattccggggacctgaaatacttgcaggcaaatctttgcgaagcgtcttgcaacgcaggtgcatggacgtatgctcgcctttagatgaagtctggtttctccgtgtctctttggcatagaggcttcaggaagcgtattttcttctccgggctgcgcagctctcgactccgtcgctcccttctcccttgttgtcgctccatctgtctccacaaaaggatgaactaaaaccggactgtgaactgctggccgctgacttgcgagctcgcggctcacgcatctgcggcgtgaccgaaccccgcagaagtcgccgaatccttcttttgttcaaacgaggaaa

SEQ ID NO: 2383 - DNA, 2260 bp, Toxoplasma gondii
  source 1..2260: mol_type = genomic DNA
gatagagcaacttgttcttgcacagcgtcgagatcacgtcgcgaatcgagtgccgcttcaaggccgcaatcgactcgacgagaggaaaggggacgaactcgtggttcttgtgacccatctcgaccgccgtcaggatgcgaaactcctccttcgtcatgtaacgcagcacctccggatccagcttcatcttggcagcgagaaggggaaaaagaaaggaactagacgcgcccgcgggcgtggagagacccggatgcgaggcaaaacacgctgcgcaggtctcgcgaaaaacagaccggtaaaggaaggcacaccgagcgcggccgcagggaggcgaatgcggcagaaggaacacaggggaaacgggaactccacaggagagacagagagagctggagaccacgacgccgaggaagggaagtgcgaaagaaagggagacacgtaactcgggagcaagtgaagaaacggaaagaaacagcaggagagagtgagaagaccactacagagggtaaccacactgcctgcccacgatgcagacgaaagcgtttccgcctccgcgacacggacagaggttcgttttatgccgatgaaagggaaacagaacgagtgcaggggaccaaagcaagggagaagaggaagaggaaaacaatttgtgctctcgccaagactctgctgaggtctgagagacttggctgcagaggtagatgtaaggaacagggagtgacctaaaaaagtctcgcgaccaccggagaaggattcgaggatgggtcggcaactctctcaggctgtacagatatcatgagagtcactttggtagcacttgtgcatcgattggaaggaaaaatggcataaactctgcaggagggaaggggtatgggtcggagtaagagaacggacaatgttcccccaacacgaccatcgactcttcacggtaagtggcagccaggaactgaaaaaagacccgggacgagaaagtgcccgagagaaaatacatggaaggtctaatcgctttcatttatcacgctccgacctagcaacgcagactgccgcataccccacagagacgtatttcgcctctcgccgggaaggcgaagtgaacgcagcggaatcggggacgttcttgtcaaatcaggagttctaacaaagctaactacacgaaaacggaagaacgacgatgagagatattgggcaaagagagggtcgcgtccccagctaggccgtaatcgccacggtgtgcgggcgagggtcgcaccgaagggcgttagccagcggaaaactgcgaaattgtgatgaaatgtaccgttagcaaaacgggaggaaacatgtttggcagcttttttttaaaatgagaccaacgtcgcgcatgcaggtccaccgtgtagacgtctcgacgcatgcggaaggcttcgagcatctgacggggtctgtgaacatcgcgagactctggccagatacaagtcggttccctttgttaaacatactcgaggcaaacggacaggatgtctcagtagcgacatcgtactgcgtagcaagtctattccaaggccattcccaacattgtggcaagagtgaaattttggaaacctgacagctttctgcgcaggtctccgtgtcggggtcggaccgcgccgcgcgcactctctcattgcgatgcctgaacctcacgcgttcttgccactgcctggctgcaacaaaagggtaggcttgtctccttcgagctgctagtggccccacccctgcccttgcacgaatgcgtttgagtcgcgacgctgtcgacatgcagtggcggggtgcaaagctgcactgagacacgcgtgacgggcggcagtcgactggaacggacgccaccgtgtctcgactctgcctgcagtccggccatgtctgctttgttcttgcaatctcccagcacaaaggtcgagcgtgccgacagaaagacaaaacggttgttaggcaccgcgaggggagggtgtgcggagggagacatgggatttcgattgcgtcagcatcgacccccacggtgcgaatgcatggattgtttcttgttcgtttcgagggtgcatcggcggaaataattcgactgccgcgacacgcagggtgcgtacaatagcggcgctttgtgtctcgtgtatatggacaccccgcctcttgctgccgcagccatggcaacagtttcgtttcggcggccgtggacgagttcagggaacctgcaccgaagagcttttgcttggtagagcgaccgcatgtccccgtactctgacaaaaa

SEQ ID NO: 2384 - DNA, 2192 bp, Toxoplasma gondii
  source 1..2192: mol_type = genomic DNA
ttgaaatgtgtggttccagaactaaggaagacgacaccgagagagccctacttccttcgccgcccctccggtgctgcggagggcattgtacacgtctatgacaatattaaaaacaagctgagcgacaagctggggcctcacagcgacgcaatcaggaatctatacgaccaacacaacgaggatgaggcattatatgaagactacaaagaagcatagacggcgggctactgatgcaaaacagttctactggtggttcgggacgaaatgcttgcagttctctgataagcggcggtttctgtgatgcagccaaatagtgttccgctcgtacaggcatatgtttccacagccattgttacgtgaatggttcatgatcatgtattttactggctgaacactctatggccaagaacatgtgtgtttttccatacgcctccgactggaaattcagaatgaatttttgctattgctagctcgcctgacactcgggtcatgcgaaacgcagcaggcgcttcgccgttttggtcttcgggcttgcatgccatctgaaaacgaccctcgaccggctaagcggcggattccgactgcaacggatacacaggtagttttcgcatgaacgaagacgtcagtaacagaaatatcagcaataaacggaacatacggaggggcatgcttctcgggagtatacacgctccacatcgctcgtagatttcttacgcagaccataaggctccgtatcactggtgagaaacagaaaactcgtgcggacctagggaaaccctccaatcatgcacagaatgtaacatatacggtcgaacaactagtatgttccagtatacctgcacattataacgcctcgcataatcagtcaactaacgatgtagcaacgtactcgataaatttgcgtcttgcagagagcactttctcacgaactttccccaaaacctgcaaggaccctacggggttagcagtctgatagcgacgtgtggtgacccctaccagggcgtacactgggatttctctccgtggacggatgaaaatatgttgacctccttgggggctccactcaactaacaatcgggcattttccattgccgcgctgggattacattgtgtatctctcttttagggagggcagtaaattactcaagataaaaagaaactgcgggacgtagcgtcgtcaaatatcaaaataatttctcctgtccccacggctgcgatatgaaacgctggccagcagctagggctagcggccatgccgcgtaaagtcaccccagacgacgggggggaggaggggggaggtatgggctttcggtaataagccggtttcgacaaaataggagatacgggactaccaaaaacagcgtcctagtctgtgctttagagaatgtgtagaggaaggcgccactcgcgtccctctcactttgtcttctctctccattccctctttcttcgtgtaggagggtgcatttctgatcccgtgctccccgtgcgaagtggctcctcgacttccggcaaccggttgggattccgtacacattagcgtggttgctcttcagtgaaagtcctcttctgactgcctgctccgtcccccccgtagacgaaagtgtcccagtaaatggtagatgggagagctccctattcacgcctggcggaaaagacgcacaacaaaatctgtttgctgtctcccctcaatctgttcgccaacggtgtcacggccctccaccgttccgccccgagacgtccagttgttcaactggaaaaccgagcgatgcgccactctattatcccgtttataaagcactgtctcttttgcataggggatgtgctgtcagagtcggtaccctgtcctccgcactattgtttcgtcctctgtttgtttctttctataccactcacggcacctgtcctagggcatgcacacggcaacgttcctcaatcattgagggtccgtgtgtacacagtctttttcggggcggctcttccgcagttttgctggagtcccctgcttcacgtctttacctgtgactgaccgcacttcctcgacaacattgttgtgcgccaccgaatttttttcttcagaagataaaggagctgttcgagccaccatctcgtgttctgtccccatcgtcactgatttccttgctgtcttgctacgtgtattcggtgccctgtaatccgtcaggtatcctcaa

SEQ ID NO: 2385 - DNA, 2507 bp, Toxoplasma gondii
  source 1..2507: mol_type = genomic DNA
gatccagcagacgaagatggcgtcggtctcaacaacagaggaccgcgcagtggaccgtcggagaacgacgaagcagaggggagcagaggggagaagaggggagaagaggagagaagaggggagaagaggagagaagaggggagaagaggagagaagaggggagaagaggagagaagagggcgaggcgactttgaagagcctcgagtagcaagaaaaacggccgcgtcgcacgcatcactcgccgctcccgagcgccagagggaggctgctgcgcagcgcaaagagcgaaccattcgcttcaaaagaaaaaacagtctctcgctgtttggaaagacagaactcacaggacgaagtgccaagtcagtgtgtcgttcatatccggctgtaactgcgcatgcggcacgccgccctgcctctgcaaaagcgaaaactcgcgcgcaaggcggccgggaccgaggaaggcgcctcggcctcctcccttgtcgcgggacatcgaacagacgcttggagaaacgcagcaaccgagaggagcggagaagaatgcgcgaacaggtcgacagagagcgaagcgggggaacagagaggagaacgcacgaaggaaagaagaagacgtggagacgaagcgaagcggagacaagggagacaacgagagagcagagcacaggggttgcctctgaaagacttgaagcgactgagaggtagctgggcgagcagccactgtcgacaaggagagcagaggcgacgggagctacgaggaagaacaagacgaagacgcggtcagaagagactggtgtctcgcggcaatgctcgatggaggagaagcagcgtgacggaactgctgtgagttacggaaatcgagttctttccgctgcgtcaagcagtccatcgggatggccttttgaacagcagttgccctttctttccttcgcgcgctcgggacatgcagaaggttcgacagtgagtggggggcgggagagaggatccgcagagtgacacccgaagaagtcacgcgagacgccgcaggtccggaagtcgccgagacgagtgcgaaaccagcgggccgtgcagctcgcgcgacggaagcgacggagggaagggggaaaagaggagcagaaaaggaggagtggaacgggaggcgtcttcgccgctactgtgttctctgcggggcctcgcgctgtggtgttccgctcgaaaggacaacagagagtgaacatcccgcgagagagggctggagagagtgtgcggcacagacagtgtctgtttttcgcggaaagccgacagaagagacgcgaggatggtcttcgactgcgtccgtaaaaagagagcggaggaggagcccgttctggtgagctcagctggggctcttttccctctcgctgcccgctgtgtctccctaacacgactactacgactacgctgttccttcgcttttctcccgcaagacacgaccagtcgcgagagccgcaagaccgcgcgcgcgagagaggaaaccgcggcgagggaggcaccgcagaagcgaaggagttctctctgggaccccagagaaacgacatccaaggcaagagctttgtctgggggaccggcggaaaacgacacaaacgacgcatgctggcgcgcgcgagcgtcgagccgtctcgggggtgtacgtacagccgagggcgggcgtcaagatcgcggcttttccacgagtctgcggaaaccgcgcggaagacggaaaaatgtgcagtccagaccgcgattcgcgtgcgacagagggcggaaaaagtgacgaagaaacgagtaagcgtcgtttcgcaacagtacggcgaccgcgcggccccttccagtctgagacgacccacacacgcctcgtcgccgctgcccgcgttctcaagcgagctgcgagccggctccccagtcttggccttttcaggctacctctccgctctgttcccggtggcgattgttgcaaccgatctgctcaattcggagtctcctttcaggatctgcgtcctcgttctccagaactcagccaaaagccggaagagtcccccccctccttcacccgccgcccgggtatcaaacgcccgagctcccagtcgaactcgccgcgacgcctgagtccgcgaccagaggtgtgctgcagcgagcgacgccctcagtctcagtccaattcgcgtttctcctgaatttgttttcgttttcgcgtcttcgtgtgtgtctttcgttcctgagaaatgcgtccggcttcccgcattcgcagtgagaggcggtgcgccgctctacgtcgaatgtaggaacgacgcggagcacagagacgagaaaactcaccgtcgtgccagatctctgcgcccggggaggtggaggcggacggagttgctagaaaggaatacggttctcgtcggtgtcagttggccggagaggagctgcgccgtcgcttcctcgcttcgtccccgcgcctcctgcctctctgccccgacttttttctaagacgcttggccgacggccgccgcgcttttcaggagcca

SEQ ID NO: 2386 - DNA, 2993 bp, Toxoplasma gondii
  source 1..2993: mol_type = genomic DNA
tgaagaagatcaaagagccgttgtcttttgggtgccgtgctttgcgccggttcttagaggcacttttgccactcgcatccacgcctcttgtcgcaacctcggtggatatgcttcgatctttgctgtcccgaatgcaaacacagttccgctatttgaaggccgcagcggccggcaagcgggcaagaggccggaaacaacctaggattttctttggattttgtgttttccgagtactaacctatcaccccagtgccgtggtgcgatggcagggaccaccgttgttcgtcatggagaaatgtgacgtcaccacatttcaaatgtaaaagcacagagcgcagtgttccaccgtcagaaaaacacggaatacgtccgggttcgccccgccggtgggtgggtccatcatttctttctgcgttcgtgccttacgtcggcacgtgtgtgtgccagccacttttggtcaagtggcagccaagagctgtttcctgcagcggtagaagacaagaaaatgcagtcgtttattcgacgaatcagcctgtgacattgtatctgttttcgaacgactccccagagtgggtacggattacctacggtagtgtggccgcaagtcctatgtccgtattaagaggagtaacacaaccagaacaagaagtattaatatcccggtggatattgtgggtgcgacggctcacggacatccgccaatgtgtgtgctctgtgccacctgtatcaccacaaccgttgtcggccaggtggcaaacagatcccaatttaatgctggggtgcgaaaaacttagcaggtgctgtgttttccgctagcttaggctccccagcaaaattagagcattactagtaaaagcatctagtcagttcagaagacgcaacagagcattgcccagtgagagtcgacacggtttttagtggactctcgtatcagataacggcgcgagaaaactttttttccccctggtttgtgtgtccgcggcagagaagtgtactgggcgcctgtctacagaaagagaaaggttcgctgtcggaccctgagaagaatggagcagattgcttccgttcatcttcaagtcgactcaaatgagtgtagtccgagcctgctacggattttgaaggagctcattcagttaatagagatggcttctgtgtactgagaccacccgtgatgagcgcagtgtagcagcgagcactgttattggcaggaaaagacgaatctaacagaaatgacagaaataatttgaggtagttgacattcgcggcacatcggaacaccagtgttgccattttctggcgtgcttatgcgggctgaccttgtcgaggagacctttggtgttgctgcgttaactacactggcggaccgaggccagtgaactagcataatcaacacatgggcatgaaatactataaaacagagtcatacatacctagaagcatagacgcgtacggccgctacatcgaatgctgaagttgtgaacgtgtgagggagaaatataagggcgccagctagtgctgcagagtatttcggcaaaacgatgtttgttctgttctaatggtaagccgccggaccttcaggtaccatctttgaggagatacgcatgatatagggatgactgcagttctttcattccacaaggagcaagggagatctcccgctgtccgcgtccttcgaagatgaaaataaccaaaacggattctcgaggctgaaccaccgtgtcggtaaacagagtcgtgttgcgatggtttctggcgagctctacagcagcccaccgtctgctgcatagtaacgccaatcctatatattgcagcgtcaacgaggatgtcctccaggcgaatagctcctctaaagacgtttgtgccaaactatcaagcggggaaaacagtggattcgtgtagattcctttgtgccttgacccaagcacggaacacaggaaagtgagaatctgaaaaatctgtaccgctggaagctgtataggtgaacttgtgaaattacgagaagggaaaaaacgcacctgtggcgtgcgaagaggaaatgaccgacttctgagcgtttgtggtctagtggtagaatacctcgttgccatcgaggtgacccgggttcgattcccggcaaacgcacgttctcacatgcttcttatttcacccgtgatagttcgaacctttgttgaaagaacaacggcaccggcaccagaacatgcttcaagcaaaagttttcggctgggaaacaagaaacatgcggtccccaaaagcggaaattcgaacagtgcgagcgtttgtggtctagtggtagaatacctcgttgccatcgaggtgacccgggttcgattcccggcaaacgcacttttcttatccagcgcttcgaaatcacacaggatacttgtacccgttgttgaaagcacaacagcaccgtcgccagaatatgattcaagcatgttttcgacagagaaacaagcaaagtgtggtcccgaaaaacgggattgtcaacgctgtcaagcgtttgtggtctagtggtagaatacctcgttgccatcgaggtgacccgggttcgattcccggcaaacgcacttttcttccttatcagcccttaagaatcacccaggatactccgaatcattgttgaaagagaaacggtagctcttgtttgcgtgaacccgtgaatttccgaccactggtggaagagagacgaccccttatcctggaaaggtcatttagggagttttcctcaagggaaacacgcagcctgttgtcccttagagtggcatcgaattctgcaaggtagcgtttgtggtatagaggaatacctcgtttccaacgaggtgatcggagttcggctcccagcatgctccctttcgtgccgtttgtatcaacaggtcaacgacaaacattctccggaatatcctcgtatctgcagcctcaagaaatcagggtcctttacaaaaataggaaaagaaggatgtgggctcacaaaaacgaatgttgttgccatcaag

SEQ ID NO: 2387 - DNA, 882 bp, Toxoplasma gondii
  source 1..882: mol_type = genomic DNA
gcaagagagccgcactgtgcactccaagaaaagactaaaagaagaaagagagctagtgtcaaccagagaggcggcgacgagagcccttgaggcagaaacctcgactgaaaaataaaaaggaatgttttacaaatacgtatatatatatatatatatatatatataggtggatagagagaaaaagaagagaaggaaatgatgtttctctgaggcagagagattcgtacctccttctcggctcgctgttcgtcatcttcgcctcccgattcagtttctgtcttcgtcttcctcaaagacgagaaagcatgagaaggaaaacgaggagagaaaaaggacgcaaaaagagagagcgaagacgaagggggagaagacgaaggaggcgaagaagaggacagagaaaaggaaggaagagaagaggaaggacgaggaggagaagcaagaatagaagaagaaggaagagaaccgcgcgaaggagagaaaaaagaagagaaagagggaagaggacttgcggcagagacaggcggcgacaaaggaaagagagaggaagagggtggaacgaaacgtttgtgtgcgtctctcgtcagagaggagagacggcgggcagaggctgccatggcaaggaaagaaacagaggcaccaagagagctgaaaaaataatgaaaacggagagacagcggagaacgggagagcaggagagagaaaaacttgaagaatgagcgcgagatgaaccgaagagagaggcagagacaccgaagaaggaatgacaggagaaaagggggagaagaaagaaagggagaaagagaaggaatgaagagtctgtgttgtgtcaaacgcaaaaagaggatcgaggcagacgaggcgagttgaatcgctgcggttgca

SEQ ID NO: 2388 - DNA, 1352 bp, Toxoplasma gondii
  source 1..1352: mol_type = genomic DNA
tgatagtgtagataggtggatccctgtcggcctttaccagtctacagtgctgcatctacgtttagccatgcatacatatactgtatgtattgcgtcctatgcagatgagtgaagcgaagtggcctgctggctacgtatatccggggagcacttgaaaccgggcaaggggaaaagggggggcgggcgggaggaaggtgggggttgagtttgagcctgcttctctgtcagttacagtttctgtttttgtcttctgtacgctgcgtcgaacctctttgtgctctcacaagggtgtatggaacagtacttctacacgacgtggactcatttccgctgatctcgcgttcatgcagttagctcctcattttttcaagcaaacaacttgccgatgagatgggcaaggaagcccattcagcaaaacttctgtatttgtacgtgaaaaaaagagatggtgcttcattcatttttgcacctcagttgcggcagtgcctcaggctgtggaagaagtcatgtaagccaccgcgccaggggtgcagatggtaaccgtttttggcccgccgccaacaggctgtcttctaaggctttcttaaattacggaacaccagaaatgagacggttgcaggtgacaccttcatttcttttcaaagaatgcggaaacggagggagtcagttcaataggttcaatcactttttgtgcaaaacggccatgttggcagatgacaaaaaatgatattggccgacgacgaagttagaaaccaacaagtgcattagtaagacgaattggggagacagcgcgcattccatccactccgcactgccgcggcatcgcccgcagttaatgaaaaaggtgtgaaagcaagctttgctcaagtatggtcttcgagcacgcatacattgttccttttccgttgcttccctcttttcatttggtgtgatattttagacgtttgagacgccaacacacgggacacgtggtacggtttcgcgcacaaaatgtgtgtacgaattctgttgatcgcgctcattcgttagaaacattgactggttcagtgataccagtattgccacatgagtataatggtgtctgcagggatatggaagcgatttaagatacagtagaaaaagtggagaaagtgcaaggaagggggtcttgcgaccatctgcacggcgaagcagcaaggccagtttgccacgtcactatgagtaaccagtacccattatgacttactgactctcagggcggcccgattagtccttggaatagtttcaggattgaaatgcagtcttaagctcacagtgtactaaagcattacgtgcgcgatacaccgacggaaatcttttagttctcggccttc

SEQ ID NO: 2389 - DNA, 1786 bp, Toxoplasma gondii
  source 1..1786: mol_type = genomic DNA
gttgtgtgaaggttgcttgttgggtttcaggcggtgaatggatatcaactatgatgtcgagtcgtgggggtggattggacctactttggtctatgcttttgtagtggtgtttgtcgctctccaggcgtatgcatggttcggttttttggtttttccacgagttaccaaatgaccgcatgcgtccgcgtgtgtgccctgctttctatttgcttcctgatccactttgggagttgcagagacaacggcaaagatcctctcttgtgtgtataccgcgatgcaggacgcgccaggttttctgtgccactgttttgtcgttaactgttttggtcacctattcactttagcgcgaggatgagaatgtcagtggctcaatcagcttgttttcattatatcacattgatgttgttttcgttttcacccaagagaaatgcgtctgaatgccgtgtattactctctgccgcagcgcagaggccggcattagatgcagattttgcttttgctgataggttgagtgggtttttttttggagctgctatggctggtgtgcttcgagtgtcccgacgtatgatttcgctggtgtgcttttagatttttttttgcgatagttatgtttctttacaacatctccggcgattcaaccagcactggggggaatcgggggggcgtttgattgtcaatttagacagtctttacctgcgcacttgaccctcgtttgaggcgcatcttcgtggggcgtaccccatgtggctacgggagaatttgtagtgctggatggttttttttttcatatgtaggggtattttatctcgatgaacccaaccacatatgtgtccttcgatggcatatcaactagcacttcgttccggtactggagggattccttctagtcatgctacacgagaaaaaccagctaaaagcaatcgtgaacaccagtggagcggtgacgctctgtactctatttcgaccgagggtagcaccaccactcagcagcgcctcggacgacgaaaggaatgttttgaaaagttgaaacagtaatgatgacgttcataccagactacacggttgacaagtgtcacatttcgactcacggtgtagtagacgtttgcaaaacaggacgcacaagcctccctataagctgaattagggtcgaatgcgatggggttacacgtgccaacatcgttcccctggttcacccagtacaaagagacgaaatgcactctcggtgaactgctggttagttttggaacttacgaaccatgaaatgtcctaacgccagcactttctcttaccttgtttccagctgagctaggtagcacgcaaggtgcctcgggcaccaccattggtacgcgtggaggtcacttggtgacgcagaaaacgagttgccgttgtctcgcgtgcgtctaccggtaaatcagaccaagtcccacaccggtgttgcgtcgtcgtttttatcctagggaaggaaaacattcgtcacgcactaatccctcaaacgaaggtctttctgtgcgagcaggcatgttgccgctgcagaaaattggttgcaattgaattcttcagctgcactgcggcagcgtggtgcttcgtcgctttttttgggctacttgcgcaccaaccctggtcacacggactccgaccgatcatagtggtgcgcgacctgcgcgaggggtgccagaaggcatttcgtctcgatacgatcgggaaatgtggtgcactacacatacggcctttggaagagtccaacgggtattgaagccgccattgacacgcctgtgtccatgacaca

SEQ ID NO: 2390 - DNA, 2373 bp, Toxoplasma gondii
  source 1..2373: mol_type = genomic DNA
cgaaatcgagcagcgacctacagaaacctttcgttgcgtgcgactcgtcgccagagagtgccgtcgagacggagagcaggtgcgttctttgtgcgttttttctaccagactctggtgaagacgacagaagcacagttttttgtccgaaaaggaaaacctttgccaaggcgcgtggatgctggattctcgaaacagacgctcgactccccgccataacacctggagctctcagcatggcggccgtgaaaagggcaaacgaaagcgattccccgattgcacaggcctgagacggaaaccagttgattcgcgccagacaagcttttcctgctcttccaagactctttcttttccgtttgtcttcgtcgtcctttctgcggacgcaaacctggaggagagacgttttagaaggaagtctctgaccggtgttgtctctgaatcttcgtggagttccccggggccagttgcactgcgtccacgtcagagagcgagctaataacgacgcgtttgcgagaacctccgagagacttctgagtccttctttttacacataatacacgcgttcaaacacgaagaaggaaacgcattcaactgcaatgctctcaaagtgtcgcgtgcgtcatatgagacgttttctccggggtatcaggcgcaacagagtcctttcgtttttcttaagacgcttgtcgcactctctgcctcgcgacccgttgcagccatctaactgggaagtgtgccgtggtctccgtgacttttctgtcttggaaaaaaaacaagttcagatctccactgttccggtgcagtactgcgactacgaatcacatccacgacggagagcttgtccctgcgccttctgttcgtccaccgccagacagcagatggaggaaaagcgtctttcaaggctgcggcagccagggtgtctggactgtcacgaggatctgcgactttccagaaactgggcggctctcaagaagctccggcattttctacacacatgtcttgcctgtggacgcctgcagctgtgcagctgagcagttctggaacccagaggctcgacagagctgctgcaggctttcgctcggacaagagcttgccgctgcagttcgcagagacgcagcgacagggaagagttccactgggtgtagaagagcttcgtgatgaactctgacaccagggcagatgcgagacatcgtttttccgagagaagccgttctcgcgagtgtgatggtagtccatgcactgcatgcattttgcctgcactgcacagagccaaacacaaactcgtgagcggtgtgaaacagctcgtcgaaagccgagctttgagggcaggacgtgtatatggcggtcagtccaaacccgcaagttactgcgtctgctcgagcgtggagtgacgcgagtgtttatggcgtcgagaacgtgattaatggggagtcgcttttatttttaagtggagctttgcttcggttcctgcgaatgccagagaaatacttcaggtttgaaccttttccaaacgttttctgcgctttcccgcgagcaacccatgccgcgcgcatgtgcgagaatgggatggactcaaactgttgcatgcaacgaagtcccgcgacagatgtctctcaagagcgacgcgttttctctccgcaggcgaccttgtttttcttctcttcgatctacaaacgcggaatccttttcttccttcgtctttcctcgatttctcatcgctcctgtagtcgaccactgccgctgacttgcgctgggtgtgggcctcgcgactcgcgcgactttttgcggccgagacttcttttcctccttcgtttttattttctcgcgccttggcttcaagaaatctaaccgcttcgcctctcctttcgaacggttctttcctctggcagccaaggcgctcgcttttgtcttctctgcctcctctgtcttctctgctttctctgtgcatgcatagacctcatcgctgggtgtctctcacgcttgcgaaggagagctgtgttgcctcgttcttcctcccgcttctccctctcttctccccaacctgcgccagtcggttgtttgaacttcttgctctttctccgcgtcctctgtgcatcgcgctgcgccgtccgaggtctcgtcggagagaaccgccgagacctcagacgaggctacgaagtcgtcgtcttcagtctgcggagggagttccttcttcttcttcgctctcgcgtcggtctgcgtccaattcttcgtccatgctgccgccgcctctccctcaacagtcgaacctcgaccgcgaaagccgagcctctctcaccagctgacaagcacagcgactcgtttcctgcgcggtcaaatccggagagaaaaccggagagaaaatcgccgcgacaccca

SEQ ID NO: 2391 - DNA, 2351 bp, Toxoplasma gondii
  source 1..2351: mol_type = genomic DNA
ggtacctcaggattatggcctaatactagcgattgctcgccaagaacaatagctacagaatgccgctgtctcaaagctgtgttaaacattctgctggtcctttagtttgtatgactacacaggcgcagtggctgatgtaccctattaatgccgttattacatgccagtcctaagaaaaactttaagcccttgatccatgtttactatgtaattctgcttcaggaagagccagtttgggttccagtgttgctcggatgtcttgggccttagagctactgatttccaggcgattttactcctcatgaggtatatataattcgccagtggtagcgaactcgcgtccagcaacttgtgttaaatgatggttcgaatgaccttcacagaagtttatgctggccgtcgtcctcaacacgtctattcctctccatttaacatgtgctgagctactgtatcgaaacagaactattcgtgcctagagcagctcgcttcgacttaccttcaatgttttaaggcctaatattcaataaagaaactctccgtggtaaaccaccagtcgccaacgaaggcctaggagtcggagacatcgactgtaatccttcattcgaccctgtcgttagtttgcggatcaggaccttcttttcaatgtacttagttcacatttgcttccgccagtggccttcctggcaacacgaccgggcgtccgaatgtggtgtgttcattgtcgctagtgtgtgaaagaccgaccatagatcttgcttgccctcgaagccctcagcggcttttggcagagatcttactgtgtgcaacgtggtccggatttggctatgggcaataactttcgatatctatccggataaattttacctgcgatggttcatgcgcataaatcgtatcaccgtggtcctgcattgttctacgcctttgaattgcacttttttcctttgaaggggacagggcgatcaatgcctaggactgaaatattgtggaaagtagtgacatatagaacaggtttcaatacggggatggaattagccagacaggaggggcgtccccacaaggcgttagaaaaacgcggcaggccaggcgggggcttcaccagggtgacaagtgttttcatgagccggcaaattaggcaacctctcttcaaaaaagtcccaaccatgtagtgtggcgtcaatgcagttgaacctgcgggtgcatgtgttaccttcgtccagccgctcctttgtaggcggacacggtacgatgacccactcttgaacacagagacgcacaggtctttgaaacacagtcccaacctacggcgcactgtgaaaccttttctgccgcctgattttgaacgactttgcttcctggtgtacagcgcttctaaagcatgccattctacgtcgtctcatgctgttcttcggtgcttgagatcgtcagtgtatcatgcagaaccgatgtcttagtaaacatacatctcgaacacttgcacgtcatttcatttttcacaaactgtgtctcatgcgtgatgggcaaatgctgcttgaaatcacatccgagtacagtcccttctgccagtaaagtgcacatttgcgcctatgtggtatgcctcctctattgcaatcagtgcactgtctgcaaccatacagcaaacaaaaagaatatgccatcaggcaacgcgtcatgctactgaacccgaggagtcgacaaatgttgtatcggcgtgtactctgaagacgggttgagcattttcgtatacaaccacgtgcagtgtattaccgttcctagtaggcgtcgagtgattgacgaaaatgaccacgaggtaaaacattggcgtcgcagcggtggcagggtgtaacgctgtaccatacaccattgtcagtagttgcataaattgttggcatagaaaaaacgacgtacctgaccttgcagaaaacctagtctctgtaggcggttggaactgcgcgtacgatagggtcaaagctgccgagatcgctgcatgccgtatgccgcatgccgatgtctcgatactaactacacctgggctacacacatgagggataagagttaccgcttagatgacacacgaatgaaagggactacattttttaacggttgacgttttggaaaagcaaatttgttattgtttgtaaatgggtcgtgtccgatggtttattgggcggcagatgtgtgtctactacggcgtgactgtacgatgtctctcttcacgtcaaccccgttccatgcggtcgtcatgtagtggtgcaagagatgaagcctctctgaaaaacactgtaggtggtcatattgatgtcatgcacaaaaagtttcagagcttctggaatggcggcgtgtgtctggcaata

SEQ ID NO: 2392 - DNA, 2492 bp, Toxoplasma gondii
  source 1..2492: mol_type = genomic DNA
tcagtgtggaggaagccatgacgacagcaccgtatcttctgttctaccaggttgcctcacctgctgtctgttgatcttggccatgtgtcacacgcctgtcttttctgaagagcgttagcaaatggcttattgtctgacgattacctgccatagtactaatttggaaacgggctctcgccatttttataacgggatggctgtgaacctccgtgagaccgataaacgaacacagaatatgtttctgcgttgtttccccagcccgttggtttgacggatctcggtccccggcccgctgtgtttttcaacgaaaactcagaaaggagcccaccaattgcgtgatactctattgtcgttgagcaaacgaagatcccgagttgaaattgcctcacagcagcaacacaaccttgccccaagtatcgcatgagtgtttccgacattcggttacgttgacagactattttctgacgaaacaatcgctggcctccagatggttcggatcaattgaacagccgttttcaataggtaatgttctcttcggtttggtaacgtgagaagctgtccgcaaaaatgaggcgtccagataagcactcgtctacactggcatactcaattcttgtgccacaggtagtagagagttacaagagttatcgcttttggcgaggtgcaggcgtatgaaggatgaccatcaacggactcaaactcccatgagttgcacgctgatctttttctcaagacaaactagacggctcccttcacggaatctgataggctgccttccctgtcatgactttgccgaggttactggacacgcgttgtatctgcagtgctttctgtgagtatgtggtgggtagatagggagtcgcacagttcgtgcctacaaagaggtgatttggtgcagtttcttgcttggattgcaagtgaagaatgactcctgttccgtgactggcggatgttcctgtacgagaccgtctaaagaactgcgtgctggaacggcgaaccctctacagtggaggccaggttatctcagtacactgcggcacgcgtgatgagtgcccgatgcaggccgtgcgaattgccaagagcacccttcgaaggttatgatgttctgctgcaggtgtcgtccgtcatgtagacaggttgaattgccgggggctcactgaatacaacgctatgctaccgattgaaacagtacgagctgcaaacaaatgactcaacctcaagcagaccacgttcttctaaggatcagttgaaagcacagccgttccaggaggatacgtttcccgacgaccacacttgtagagaagaccctgttttcgtgaaaccgaactgccacgagtctgttggagcagcggcgacaggagatcatcttctggcgttcgattgccctgattatggtcgatacggaagaaggtaatagaatacaggattcctgtgtcccacctggtagctgcgacaaaaccgtatccggtcctgtgcccgctcctgtcccttccgccgcccctccataataagacgacgagagactagccgccgtgtacacctacgagatgggaatttacaaccccctcgaatcatcaccgcgagaaaaccccacagttgcttcttggcagattctgccagttgatctctttttgattttccctgtaggggctacacaagttcccaccttttgcacttgcaacccgtgtgctcgtcgcgagaggagactgaccctcctcgcatgcacgcatgccacatggaggctcacggaatagtagagcagtcagtcggctgtgcagctgtccccctcagtcggcaactccatgcgacttaacccgcttacgaatcagcaaactgtcgccaagaaatcctcgtttttggcgttcatgctgaagcacttttcccgacttttgcctgcgggttcaagggccgcctcccagattcttcgctccaacaggagttgacagggtgctgtgcattgcaagtacacttgggccaccttaccacattgttcgctgctgagagtgtgatctctgtttccttttcttgtgtcgcctctgctgtctccactcgtcaacgaaaaatttctttccacactcggaaccatttgtcgcgtgattgtccgagattccagactctgccatcccctaccccccatcagtttttggctgtcgattctttccgcccctggtaagactctatcgtccctggtagtcgtgctgttccgctgagcgccacttgaggtaggaaaatcactgtctcgccatccgcagctgcgtgctccgccatctacgcggtaactggagtgataattgtgtacagtccgacgccattttgcactaccggcagcccttctatgtttccacctgttcgcccccctgctggatgcaggcgacactcctgacacagttcaggaccagttgaaatcgtacgacgaggttcgacagataggaccaagttttatttgtttctgggcatcagacccacaagaaccttccagttgccgtccacaa

SEQ ID NO: 2393 - DNA, 2250 bp, Toxoplasma gondii
  source 1..2250: mol_type = genomic DNA
gcagcggcaacttgtggcggaacacacctcccactggttttattcgacaccttttcctttttttagcatgcgatgacaccgggtattagtgtttgcgaccatagtagtgtattcttgaaatacgagtacgcgtgaggttcccggctgtggtgtctgtaaggatggcccgggtgtttcgtttccgcagtagcagtatctctggacactgaatccacgagtgtgaatactagattcgtgtttgtattttcacaactcccaatggtcgagggcatgcgtgcatggccaaatccaccagagatgttccgggttgccggatgcaaatggaagttcgcatgacgacgcagctgaaagggcagggggttgaacaggtcaaagttacacatcgatgtgcccacggtagttttagataaattgagcgctcgcgcaggtgttccgccgccgcaccgatgcagccggaactccaagggaggttctacatttcagtagacgcagaaaaaaaaagtgaagtttctgccgcggctccattagttacagattgttcagtggtcgtggcttcataagtgaatcctatgaggccataagaaagcgcggttcattgtggacgcaccatttctgggcagctgcaaagtgcacctcatagtcagggacgcttctgcgcagcaggtgtgacattcgagctgtacgattgacaaatggctttcgtgaaaacgaacatgccaccactaccactcttgtagtatccgctgcagcaggccatcgattgcttctcgtctgacatgtctagcttcaatgctacaaagagcaccgctgtgtcaaagagtcgcgctaccttcactagaagacatcctgctccccttgagttccctaccagtagacctttgtttatctcactgcggccatcttaccattaatgtagctacatgtggcaaataaacttctgctgagactccggcggcgccacttctcgtcgttctcgccaagctcttgatggtcacctcgacacaaccgacagcttcgcgcaataaatggccttttatgtccagatcgttgtcttcaacagatacttcgcattcgtggatcgacacgcgaatacatcccattgttgtacgtgttttgatgacagcaatcttatgtggagttactgccgcgctgatgtctgagtgaacttgccatatgcaataatgttcgaaggggaagaaataccacgtggcagcgaaacgacactgagacaagatgatacgtgcacagcattcatttttgcttaccctgagggataacgaacgaattccatgtttgtagaagaagttatcatcgtgtgccgttcgttctgttcactctccagaagcggctgtgtgcatgcagtgtcccctgcagacgcggtcgtgctacaactgttaagtttgcgtgtggagcgtctcgttcgacgtgtgtctcttctttgtgcgactggttttcgcagcagcgttttgtctgaaaactttggcaaagtcaacgaatcgaaatctctccagagcgctctcaacgagcaggttccggggactttggaacgcgcgtgtctctccgcactctgtaaaaaagccgtgagccggtgagtttagctggtatctctgtcgagcaggctatttcctcctctttcgtgtggtttcatagggactatgcaggtgaatcccttttccaggagaattttgggtctggaaaaatgccaccttacggggatcccgagaacgaccccgtggtgaggcgttttccccggtcctctccttaccagtcagcgggcctgtcccctgtctcctctgctttacgtcgctgtctctcaagttgccgcgatccttgccatgggaaattacgcggtcgtttcaccagtttttccaatgcctttcacgatgacaggctgaatttgagaggatctgtctcgtgctttctaccctcatcgccacccaaaaacacccaccggcaccggcgaagtatttttcacggctggcgagacgctcgatctcgtcagagtaatgaagtagcctatccccatcagtcgtttgtgtctcgtgaaaggacgagctctgtgtcgcgtttctatacgttgtttttctgccagctactcgttgcggcgtttgcatgttgctgcctgtgcacgagcctttccgtcgaatgctataacctgtcaccgcctgagcctccgaaggatccctctccggtaaaccaacgggaaaacttctcttattcttctagtcaaaatcactcgtctgagaaaaa

SEQ ID NO: 2394 - DNA, 1451 bp, Toxoplasma gondii
  source 1..1451: mol_type = genomic DNA
tggtgaaactctggtcggccacccattaacttgaaccttcttgggtgcccgccaagcgtcctcatctccttttttgaaagctgttttttaacctggcggcccgtgccgccactggtacttgaggcggaagcaagcgcctttcctttttcagacgcccggaccacgttgctccggatctcgctcaaggcggcctgtgagttcggtgaaagacttgcctcggacgaagaacgcttggcgtctttcacatctggtgtgcttgctgcagtaccagcactaccagtggagaaaaacagacgctggcgaggacgggctgagacgtaactagagcggggaaacgctgaactgaacggcagctgatgggtcgttcccgctgtagcgctctgtattttcaggccgctgtcggctaggcgttgcttcgattccttccatgaaatatttccatcggcgaagttattcgaaacgctcacacttcgctctctcggactgtcagaatgtcccggcaccggcatcttccgctgactgttgctgtccacccggtacgggacccgtctttgagacaccccatccctggtatggattctcggagtcttcacgacacgtccgagatttacagcaagctgagtctcgggtcgtgtctgtgaatatgacgcaaaaagcacaaaacgtctgacagatgcgtgacggaccgcaccaacacttcgctggagacaacagtggcttgccgctgccttcatccaaggcaagcagcgttccacgccacactgcagaaccccccagtgcaccgccatccccgtatgagccacgtaatagggttcaaggtgtcattggtccacaacgcgggacggtttacggaaagaaggacttttagttaaactggaaaagcatcctcgttggcccgttgcccccctacccagtaaacacgaagcatgcgcgtgaagacgtacaacctcgcgacatgaacgctaaacttctcatcagccggcactcgatacgtcccaatgacctcagaaagagatgttatccacaaaggagctcctcatattctaaatggactgtgtaattcgtgaattttacagttggtacctgtgcccgcagtgttgcatgcgcgaggatcaacgcgaagtcgccgcagcgcgggtcggaaccacgagacatgcgaaaagagatacgcccttggcctcccctgtagcctccacggttcttaccataacccaacagtacagagatgattttggtaattccgtgactgaagagcataaaagactacctacgtcaattcaagaaagggagacacacatcctctgaggtcccgtgtcagtcgctgtaacgggtggtcgcacagcgcgtgggtgtaggacgcagctatatgaatagtgctgaaggacgatcacccatacgggtgcagcttttgcacatactttcaattgtcaaatcgacagcgtcgttgttaa

SEQ ID NO: 2395 - DNA, 3178 bp, Toxoplasma gondii
  source 1..3178: mol_type = genomic DNA
cgcaggtctctccatgttgggcagctgttcgacggacagacgagaagagcgaggcgtcgctcgcgtcgcgcatgcgcagggtgcgagggtgtcgtctccggaagagtgagcagactccaggaaacgaaggaaaggtgcagaggcaccacagacgctcgcagcgaagcctgcgtcgagtttcctgcctgcgcttcccggccgctgctctgctccgagcgccgccgccggctcttccccgcgttctccacacacccgcgaggcagaaggaaaagacggaaggcgcagcggcgacccagatgcaaactcccttctccccgcctcctccgttccgtcctgcttctcccgcagctccacacagtggcaactcgcctccgactcaggcgccccgacacccgcggccgccggtgcagcgccgcagccgagcgcgttggatgggtgggcgcgcgcaaagaagctccgtttcttcagaagcgaagaaagcaactcagtggcgggacctggagtctctggttggccgcgttcctcgtcgcggcggcttcccgcctccctcgcgcgagactccggcgtctcttcggcgtcgtgcgcgtcgcgcagagacgctggcgcatggccggcggaggccttcaccgcggctgctccgcttccgcgccgcgcggccagaggtgcctgcagcaggtgaggaaagacaggcggagaagggtgaacagcggagagagttggaggagagcagcgcgagcaggcagaaggctctgcatggcactgatcgaccgcagaaaaatctcctgcagcgacgcggtgctcagccgtcacagacagagtcggggagtgcatgactgcagcagagcggcgagtgcagtcgccagcaggtctcgcctcgtcgcttgcctccaccggacggacaggggaactgggaggcgcgagcgccagtgcgaaggaccgccccgctctgttcgcagagacggacgcgatgcccaggcgctgcgggagaaagaggatctggactgtgggtgctgctgcgagaagtcgaggagccgcgccagagaaaaagcagctgaactcgacagaggggagcgcgcgacgctcgggggtgttgtcggcggaactcgcgagtcgcctgcgatgccggacttcgtctcggagaggacaggcggctttgccttgccttccttccagaagaaggcgagggcagtctgccgcagaaaagctggaaagcgagacagtcaaccgcacctggagcactccggaagccgaccgcccttcgttgccgacaagaacaattgcggctctggtgtctgacaccgggctccgaactcgccacctggaaaaggaccgagtccgcttgcgcctgtgttggcgtcgtgcactcgagataaaaagaaaagatgcgcgcaaggaaaaaatctagagcgcctcaacaggaaaaacggagaaaaaagacggcacgcacatttacgcgcgcgcgcgaaggagggggggtggcaaacgatgcgacagcgtgtaggaaggaagtgcctggaagaggaaaaaactcgcggaaaacgcaaacaaagaaagagtggaagaagacgaactcagtgtgcgtcctcttcacggcggcggagaaaaaaaaggatcctcttcgccggaaaacgcccttcttctctgccatcgcgcacacccgagcgttctgcaagcgacacagcattggggggagggggggggcaggagctcacacaacaccgccggcgccctgggaggaagacattccgaagtctttgtcatgaaagcgtttggcgacctggcgataaacgaaagccttttcctttttagcagaaagtcacaaagctgctgcaagcagtgtcgaagcttctgtgaggagcgtacgcctcagcggaagaaaatgcgccttccggacttccgcctcattcaccaagttgacgacgaccgtacctcttcttcttcttcttcaagagatgtcacggtctcacgcctgggtcactctgttcctccgaaattccgatgcccttcgctgtttgaggagcccccaaatacgacagagtgtgagtgcaaactaaagattcgatttctcgccgagagacgccgcccgccaactgtcttcccttccctgtccacgcagtcaaaacaggaaaaatagacataacaacacacatacaaatatatatatatatatgtttatataaatgtatgtatatatatgcatatacatatatttacatatacgcacatacgtagatgtgtatctatgtagatgtagtcctgtgtattcgtatttttatctgtactcgtgtatacagaaatatatatatatatatattatatgtatatatataaagtatagaaagaaggcgttgacagtcgaagagaatcgcggttttttgcttgatgtgaatcgcgagatgcttgtcgagtgccatgcagcagatttcttcgtcagcttaaaaaaacttctcacacggccaccagacttcccgcgggtgacagagactcgcggtgacccccctcggaggaaaggctttttttcagcggacagatgctcggctccgttcctggtttgagatgtttctcacggttcacggaagagacatgaacgcgacgtctttttgagagtcaactccacgtcaatcttcctcagaaaggacattgtttttcaggagaactcaactcttcggccttgtttttgcctcgcgctgacgtctgcgctgagaagaaaaagatgcgtcgtctttgccccgtgactttcggagattcttcggaaccagcactgtgtcgtaataagcgtttccttccgattcgcctcaatttttcttcttccactttcctgcttttctgcgcgtttttctccgaccaaagttccgttcaaaaaggggcgctgcctcggcgcaaagccgcgcccgcgttcggcaggaacgtgtgcatcgaggcaccgctgcacagttcctcgtttctttctttttcggatctctccttgtcactttcacctgcctcctgcgtctcccagccgcctcctcttcccagtttcttctcttcggcgtcatttcttctcttctgtttgtcttcctctccttgtctctccttctcccagccctctaggcaaaatttttgagcgcgtcgaagacttgcgtttctccttctttgcaaggatctcttctctctccttcaaccagctctctggacgaga

SEQ ID NO: 2396 - DNA, 1337 bp, Toxoplasma gondii
  source 1..1337: mol_type = genomic DNA
ctacaacaatgtcaaagactcatcccagagaagatagctacgtgtggtggtctccagttgggttggttagtgtagataaaacgttgttttgtcgtcggtagctttgctgaactcgtctcggaatccggcgaaaacaacggatcgaatgaggatgaggtttgtccaaatccatgcagtgagtgcaagataagttggtgtggatgtttccttcgctcaggcgtgtggcgcggggtgtgcagtggtccacggaatcgagcttttcgtgtggcaggcgttgattcagtctcgctattgggtgacatcgcaaggacctgttgatgtgaacgccaacgagcgggaggtgccaagcaattaccctaatcaagcagaaacaatcatacactgcacgatggggaagacgtgtgagtaccagaaattcttaatcgcgaggtggttagacacacctgaaggacgctcatatcgtcctatcgatctgaggcctgccgaacttcgggaggtcctcaaacgtgtcgagacattctacaggaatgtgattgatgtcgaccggcttgtcaccctccgaggggagaatttctttgtttgacactagggtaaccgcgctatctaacggttttgtgcgtttttggaattcgagcaatgtcatacggcccaaagacgcgtcttaccttcgtttacaggctcatatcaaaaagcttaacgatatgggtgtcaggaaaactggtcgcgaaaggagcgccagaccccctcccaaagcacatctaggaacatatcttccacgtagacgtgcagccgccaccattcttttccggttattcttcgttttcggggttacggcaacacggacagtgttcctcagtggaaagagaaaacactcagatagcatgttggaactcgtgttcacttgtccacgataatactcacgcctcaacgatcggtcgcgtttacatggtaaccgtggctgtctcagcggcagaccaagtcacgcccaaagtcaccacgagggagtagctcacacagttaacaatttgacacggcgcgtgcgtcaatttggctttttgcgttcaacatttatctgaacactctgaccatacgtctcttccttcttgggtggactgattcacgatatactggcacggctgtaaaggcgccaccacgggcacttaatcgtttttgacgcatatttttcagtgaatgaccttggccgtcccacgcgacgttcacttgcgaagggaaaacgtgggagaatcagctgctgacaacaaaaatctcctcacggaagcggacgccagatctcgagacagaaaataccccaatcgtcatcgacgggtatctatcga

SEQ ID NO: 2397 - DNA, 2483 bp, Toxoplasma gondii
  source 1..2483: mol_type = genomic DNA
atatttatctgtcggcgcgcatggaatatgaagtatacggatcggattcttggtggcctggcacctgcttagtaactggatgaacgctttgtacgttcatcttgttcaataataaaagagtgatgagccaacgtggaggtatttccatgtcaaagtttacgtgtatcttgcacagatctgttttttaggagtcctctcaacctcgcatgcgcgggcgtctcgatagcgccctgcgaatcgagtagcgaattctgtatgctcacgcgttacgcacgtttggtacgactggcactgccgtctcgcgaacgaaatgaaaggggcatcggggtgggtacattcgtccgttgttttccgcctctatttaacctgttttctcaagagatgcgtgttctgttcgctttataacgttgtcgagatgcggttgacaccgtcgtctcaactgttcgccgctcggcctccgaagcagggggcgcaggaaccagcaagaaaatgaaaacccccgcgctttctggcgcacaaagagtgcgcttggaaaccgtaccaattttgtgcctgggtgtgtgtaaagcgtagtaacacacacactccaaaaaaccgtcgtgtccccacgaaacctagcggagcaggtggctatttcagggatggtttttcctcatcgtcacgtgttggtggtttcccaactctgcatgttcacccaaacgcatagagccctctgtcctcctccaggttaggagaccacacagttcctttaaaaatacgaatgtacgaaagaactcaatagaaagagcggtactcctattgccaagaacacattggaagaatctcctgagagcttcaaagagccttgacgttgaaatctgcaatacctagcctggtacatccaataaggggaggcttctgctggccatgaagctacccgagtgagctgagccagctccctagtcgttttcgtgcagaatttgacgagaacttgaaaagtgtagctctcgcgctgtcactggcacacttcattgtcgagaccagagttaccgcccaggaaagggacaataaaactaactctgcgccgttgcctacagaagccaaacacgtaccgaacaacacaaaattgcgcacgggttgaccaagagaaggttaaacgctgcgaaggacacaaaaactcacttcgggtgacttcctgatctcaaaagttcggtgcaacgcgtgtctgctgtattaaaaatccccctgccgtctctctctacgtcaaaattgccaggtgatctcaaccatgtttttcccaaaggatctttagttgtggttcgtagcacaaacacttcttgcttccccagaaaaaaggcaagtgtgtcctcattcgtcttcactgttctgtcttctgaaattcaggattttccgcgctttgtcgccgtcccgattctgctatgcccagcgcggcttgcctatccatcgacggcccccatctacgaaaagctgaaggcatgcttggacgaagcagctggcacccttgcgaggaatgcccatgtgggttgcagcaagtttttgttcacgtcttgaattcaagggaggtaaccaattgtttcatagtaaatcaacaggtctgatcggtcactaaaaagaaacgcactggcacaagcgactcgcgtggtcggctaagacgaaacgacccgccgcagtcctgtctttcggggtggatttttctcgacggcaaaaggagttaaactttgggggtttgcccgctggttgtctctctttggattcctcgttcgagaaacccgctttctgtcgcagtgggttgcgagatcgtgtgtttttcgtgtgaaaaggagtagggatttcgttgacacgagggggtatgcatcgactgcctctggatcgacatcgcccgctgtctcgtcctaattccgcacttcacgcacctggcttttcgactttggaaagaagaaatcccgagtaaatgtgcgtcttttatcagagacgcaaatacccacatctgcacattcgcatcgcagacgggctctttgcaagctcagtttcctccctcttgttgattggaatcctgtgctccgcacgacacgctcagcagctatcggttccagtcgtcggtttgcttattggctttaagcggtcgtaactgactggacaacaagtgaagacgatctgccttatatccagatcgcagaatcaagggtcgcgctggagttcgaccatgtacgcgccgtgtcccgggaaggtcaccagtcggtaaaccccgcggacagaattttccgttgaaccagattctggaaaggacaggatctccagaggcgcatcgtcagtactcttgagaatttgcccgtagagcaaagcagctggagcacgttcggttttgtgttgtcctcgtggctaagcttgacaacccaaggggaaggcctgtcctgggcctttttaaaagccttgttttcccgtgttgtcccgcgctgattcactcagtattttgttttcaacca

SEQ ID NO: 2398 - DNA, 2580 bp, Toxoplasma gondii
  source 1..2580: mol_type = genomic DNA
catttgaacgtgaacaaagtacatcggtttggtgtgtaagagcggcgacgccccttacagcgcatgccggtctgtttcgcatgtcacgtgtcccctggtgctttttttttcatcgcaagtggtaacttactgcggcgtgtgtcagacggttgaatgatcaaggatcgattgttgtggtgtgtaggcgctccgcttgacaaaggtattaggtttggagtgtcatgcatcatcgaactggaaacaagagcttgtttgcgttttactgttctgttaagacgtgttgctcgccactctctagtgcgcacgtacccgcttgtctgtctgtaaaaaagtgaatcacgtctcgagcggacgacgccggacgtcccatttggcttgctgaccagcgaaagctgggttggaagaggagtcaccaaatacacgctgcgcatgtcggtagacagtcgtctgtaccagcagtcaacggagcacagtagataacggcttgagtagacgaaccccacccccctcaacgctgactcgggtagagtcttcccttagataagcaaagtgaggagctcttcgttgcggggtttcttctctgttctgcgcgtacgtgttcgagcacttgactatgcagtcgccacacggttactgacaggttttgaccgctgttacctgctacacccgtccctgtgaaattctatggtaagatcggttggatttcaaatcgatgtcgagggtagagacctcgttcgtattgttccgccagggcgagcggtgatgtctttggacaggagaaaatacatcacctaacagtgacgctcagtcggcgacaaagccatcgtgacccagcgtttaccgccgctggcaaggtgcatccagtcgtatgcggaagaaacaaacagcggcaagagagcgaaatttctgcagcgcgcaaggacgaaacgcgcgacctgtattgtacaccgttctccgactgcagtgtcaatcgtgaaactgtgccaagaaacactatcaagaatcgtatctggtcttcctcgtccacttttatacgaagaaagtaagacctcagttggtacgcatacggacatatttaaaattgtgacgagacaacagtggctgatcgtcgattgttgatacgaaagagtgtttctcgctctcgttttccactgagcgttagtgacttccagcgggagctccacgaggttcgcttcggtctgcggtccatagttagaaatgtattcataggtgggttatctacactacatgcaaagctagagaataggcatttttgagaaatcgggcgcggtaggggctcctttgtccgtagccacgaaagccaaaggtctgagtgaccgtgttcgcagactaccgggtgtaacgcatgcatatgcagcacgctaaatcaagttgttgaaggcagtggtgtgtcccgaagagctattcattcggaatgtaacagattccgcgagcaacgcgatgttagaaaatcacagccacttcccccttaagagtcatttccctcctccgcgcatttgccattccagctggaatctttgtgcaaaggctgggctgccaaactagcctttcagtcacttgctgggactgcagtgaagttagtgtagatggaggaaagcgcgagacgcctgtcgctgtggaaacagcgtcgagtggcagacagcggagacgacagactagctgaactgccccccagcagcggcgttctccgagaagcaaatctgggtttcggggtctgcagtggcatatgctcagttgtatatgcacaatagtgcctgcctcagttgagaatcaaagctttgtggaaatgtgctttgtccgatctgcccgaaaagcatggtgcaaatcttcgagcattatagtacccaatgagcgagctcgactccgctcgcgggtgtggcagccatgcattccgcacgtgcacccctgcgagaaaccgagtcgattatcggtagaaagaggctaacacaattttcaccggcgtttagtttcagaagagttgtattctgctgtggaaagagcagcggagcgcagcagagtgacttctgccctccttacgtgatcatgaatcttgacctccagcgagtgttcgcgggcgctacgactttcgtgtctcgtctgccacccatccttgtatttgtatcagctccgaatgcgaggtaatttgaagactccagaaaaccaggtcactctatgtgcacctcaaaagggggtccgagtaacgtgcaactcgaaactagaaaacgatatagtgctgtctggcgggtgacttcgtaccagccgcggttgtcgaacgcttcgcgcatggttccattccggtctatggcagtgtctgcatttctctatacaccgttttccttttcacacattgccttccgcaggttgcgacgcgtcgcacctatccgctacctccatagagagttctacacgtactctggcgtgttgtccaccgggtaagatctcagtgagccacttttcttcgttccctgtacctccctgttaccgattctattgccgggagtacaccagcagaggtttcggccgggcaactcggactggcgtgcttgctcaccgaccaca

SEQ ID NO: 2399 - DNA, 1655 bp, Toxoplasma gondii
  source 1..1655: mol_type = genomic DNA
gaaatttctcaagagcatccacgggaagcggagacacgagcgagggacctgcatgcgcaggcggtgggcacctggtctgactccagcctgaggacgcgagaagcttggaagggccttcgtcgcccttctcaggcggaggctctgttctctccttcgcctccgcacccttcctctccgtttcaagggagactctctgggattctggaggagaggcagaaccggcgcggcttcgcggagagtccggcaaaggcgagagagaaggcagcgggccgggaagctcctgaccttcgaagagccgagagaggctcgccttcagacgcgtcaccagagtgtctgcctcgagcgccgcgtccagcaacgaaagtcgatccttcacttttcgtttgagaaaggaagagatcgacgccattttcccaagtcagggacgaatcgttcattgtcctgcaaattcagagacgctcagacactcggcgagaagaagcgcatggatacccggaaggaagtacagacgggaagcaagagagaagaaggaagacggcggccgctcgaatgtctcgtgctgctgtgtggagtgaaaccgacaccacaggaggaggatggggacgacagcgaggcgaagaacggctcgacgagtacagaaaagcatcaaaggaagcaggcagccagagaggagccaagaacaaaagtttcagagcggcggaacggaacggagacacgacggaagagagtggcgtcacgagcgaggagcgagaaagaaacgcgagacagaacctaggcaaatgacaggagagatcagcacaagaagacgaaaggaaaaacatcgaaaagtgtaggaaaagcggaggacgtgcgagtctggagggatagaagccgggaagacgcgaaacagacaagtcagccacagcggaccaggacatgtgcaccgaaagtgcgaggaagtggagaaaagctgcaagcacaataatggtagacagactgctttgaagaggaaatgcggcaaaagattcctgctaaaaaacaacaacgacggcgttggacctcgtcctttcccatgtgtgatgtgaccgtgattgtcgccgtgtatgtacaccttggagggcatgcggttgcggagattttcatcgacatgcgaaaaaactgttcagctgaacgacttgtgcggaaactggtaaactgcgccgttcgaaaggcggcttccttttcctctactttccgaagaacgggtaacagccatctgatttcttcattccttcccgccgatttttttcgtctctcccttgagagttgttcgagctctttcggccgcgatccggccgtctgtttttgaggagacagaacgcacccccccctcccgcccccgctggatatcgcgttcctggtctccctttcgacaaaacaacaccaccgcgaagacttgcactggcagttgttcttccctttttgtccactgatgggtctcgggtgtacgtacggctgcatcttctgcctcgtgaagtcggtgtgccccaccctgaggcgaaaactcacccggggcagctggggagtccgagcgcattcattgtaccgttgagcaaggccatttctccagacgtgtgtcgcctgcggctttctccatgcgtcagtctctgtttcgtttcttaggaactgggtcgaca

SEQ ID NO: 2400 - DNA, 2236 bp, Toxoplasma gondii
  source 1..2236: mol_type = genomic DNA
ctttttacgacgcgttgtccgcatttcatctcgttcgcgtcgccggatttggacgtcgtctacgccgtcgtcggagaggtcgatcgactgcgtttgccccattgtgattgcaggaagttcaggaagggtggagagcgaaaacgcaggcgacagagagagaaaagagcggctggcgcagaaatgcaaattccaaagagacaccgttcgcagtcctcgaggttcgcgaggggaaaatcgcaagactgcggaagcggcaggtatcgcaggcgacgccgtgagttcccctaccgtggctcgctcggaaggctggtgcctcggcaaggacgccagcctcgcagcccaagagttcaggattttctgtcagaaaggcgcaaactgggagatccggaggcgcagttcagtggactggaccgacgcaggaaggcgaaggaaagcagagagccagaaccagttgaaaaaggggagagagaatgcaaggacaaggatagagtggggacgaagagaaacggccagaaggctcgagtgagagatgaacaagggaacaaaaggaaagctgaaacgaggacaaaggtgagacaaaacaagacgagcagaacacatccagaaggcgaacgaaggaactgcgtaaggaagatgagccgaaactcctcggttttcctatcgcccccaatttccctggactttttgcttggcaaaaactcgctgaggttctccgaagatcccctaaaaatgtcaaaagacttcgacagtcgcgccgccgctgacaccgcaaaacaaccgtcctcggtggctctccaggagaagtcagaaaagcggtcgaggcgagcgcctgcagatcctcaaacgggcaaagaactctcaaagcaaatacgcacaatgcagactcccatacgtacatacacatgtatataaatacatatatcaaattgtctatttatctgcatatttatatatatatatatatgtaaatatataaaaatacgaatatataaatatatagatgtatatatgtgtatatatgtatgcatgcatatgttttatacggaatgcctcgtttgacaagatgctggcgcggccttggattttgacggagacgccggctgcgaaacgctccacggatgagcgagtgcggatgcgccgcctctgttttcagttttctcggcatcagaaggtgaactgaaggacaggattgtcaaaacaagagtgcattcccctgaaactcagattccgcaactggcgaggaacagagtcactcttctgcagcgcgagcctgctaggaagatgaccaagaggaggaggcgcttcgggcactgcagagattcatgaaagagggaaacgacaaaggaactctgtcatctttctcacggaactcctcttgccttttggggaaaaacgaggaccgggagtctaaggcgaacagctgtcgcagtccagcatcgacgaagaagacggctctcgcatcgttcctttacctcgagagacgccgccaggatgacgaagaaaagaagtcacgaggaaacacggaaaagaattgttaattttgtctagaaaaatttgaggaaatgttcgctgaagcaacttctgcaacaaggtcttcttccaagcagacgcgctgacatgcgacgcggcagatcaggaagcggggagagagtcaagttgtttccttccttgtaaagacctccttttgacagttgcctcttccctcagaggcaaaggcggggatgttcttccatttggagaatcccagtgacttccgcacttctcttcgcgcctcgcttcttgtctctggctgggcagctctacagtgtgtgtgtgccggtcgatgacaaagcgccctcgctttgcgctggtatctgtcggcttcagggtgagttgtttcgaaatgaagtctaaaaaatgcaccagtgaaggacttccacttaaaaaaagtgagaaatcctctcgagttcgactcttcttctgatggccaactctctattctctcgcggtccgcgccccaggcagctgcgcacactcaactgctttttctctatttcctttcgcgctgttctttgtctattcttctcctagttacctctcgtcttccctttcactgtctccctgcttctctcttccctcttctcttcttcatggtccctcgcaaaaggactggcgccgtctctcatctctttttctggactgtgtctccacctgtccactatctcctgactttccagcgtttttctctctgtcaaca

SEQ ID NO: 2401 - DNA, 2009 bp, Toxoplasma gondii
  source 1..2009: mol_type = genomic DNA
tgctctcgctggcctcgattcttccttctatttgcttcaggagagaagctaggagagagacgcagtctgtcgtggcaatcttagtctggcctgacttacggaaggcgtgtcgcgcaccaggcggcttaatgcgaaagttgcccatcttatcgacagaaaaaagacatgtcgtcgaacatttcctcgttcacagagtggagacttctttgttctttcgtcgaagcgaagaaggagccttctacgcaaaattgtggaacaggcgtcggcgcgtctgcctgggaggcccttttgcctctcggcctgatctgctcgaagatcagcgccaaaagaagtgcttgccttgaacagaacggatcacagaatgaggaaactcacaggtctgtgtcttatggagttaagctggtcaactcagtcgcagctgcttcatcgggaccgaaacacctagtgaccccaagtaaacggagaagaccgagccgatgaccccatacgtttgcttctgctggtaggctgaaggggcaagattcggcgaagaggcagaaagacaaagagaggcgagtaaaagagtgtgcaggagacgggacggtcttcagagttcaaaaaccggccgaaacatgtgcagagggaaactggtaaggaaagaccgtccgtttgtcaaacacgcgcagactgctctgttacgctgcgaaccggaagcagcgtagaagaacaaaatgctggcacggaaaggagaaatggagagaaacgagacttgaaaagtgaacgatccactcgaaaaggaaaaaacccgtttgcatgcagaaagctggcggctttttctggcgccgtgcatgccttcgctgcttgcatgtgtgcaacagggtctccgagccgaaagtcggcttttcaaaggacaaacgcggctgcgcagagacacgctagagaaaagagatgctgtgcggggtctggtaagttgcgccgtaaagctgtgttcagaggctgctggggcggctgctcaggcaaagatgatttccggcggggtctctacctcctttcacccttgcagaggcgagttgtgcgcggtgtacgtacacctcacagaccgtgatccccagttgcttttgttggttttctttcggccttgttcaaggtaagcgccttttgtgtggtcttgtatcacatttgcgctcgtcacgtttcgtttctcccgtatccccactcagaaagtgtcgggcaaattcgctgcatacgagtgcggggctcgtagcgcattttttctccccacgttcttgcaattttaggcgtgctgaggaacacggtttgcccatcgtcccggttttttctttgcttgtcgcatcaagaggtttgcgaggtttcgctggtgtgcgggcgatctttttctggaacgagattacttgctttcggggtcgaagccagagagtggtgctggggcatgctatttcaaagacaccaccggcatctgcgttctcgatcacggctggcggatgcgtctgttcttatgcctggggttcaacattgagatttggagggggcttccgttgttttgactggagacttcaacccagaaatacctgtatcggtccgtaccgctatgctgttcgcgagggcagccagagcccggaccgctgtcgcctgacatcttattacgggggtttactccaaattttcttccgtcgttcctccttcttccctttcattccaattgcacttcgactccgtcgtcggcctgcgcggcgtgcactgtgcatgcgtgtggtaccataaattatgctgtcgagtcctcccggtgactgtaccccccgcagtgtttgttctgtccgttctgacgagctcgtcggtatcagtttttcgtgattttcacctaggtgtatatgtaggtgttctgattctagccttaccacacaggacggtatttctgctgcgtttcccacctgcgtatgcctaacaggctccaacatctacttcccggatcggcgggctcgtcttcgtttttcttccaccgtttttcaaga

SEQ ID NO: 2402 - DNA, 2427 bp, Toxoplasma gondii
  source 1..2427: mol_type = genomic DNA
aaggaagtctcgagttgtcaagtcgcagccgcagaaacaaccgagaagtccgcagaaagatcggggcgcctccaccgggcaacaggtgcagcatgaggcgcagcggcctcgactttctccgggcggtgccatgggtcacaacgtgatgcacgcgatagcgggagtcgaagtcaccgtcagaaaagtcggatcaacgcgccacagggttcatcagcgaaacgtccgccacgcagcaccccgaagagacaggtgaggtgatggagccgcgaggatccgagaatcacgggagagagtaggctggaattgtcctagaccttggcgggaaagggaagcggacccacctcagagcggagtacaaaactagaaaactccacacggatttgaaggacagtcgatttcttctcgcagaccttttcgtcaccccgtcgagtggagtgagcgactggtgaaaatgcagggctacacagatttcccgatacgacaaccacgaaatggaagaaatcgttggcagcacgcgggtgatgaaaaggagacgagtgataacagaccaagtggtgcacggggaaactgcggaccgacctgaaaccagcaattcagtggtcttttcagactcgatcgcggctgacaggaagatggacctggcaattcatgcacatcgagtcctgccgttttcccacaacgggaacaatccgtacttcacgaaaaaagcttctttttcagaagaacccgccctgcggcgtttccgggggaatccgtgcggcgtatagacacccgaacgacaaccccctggggtcgacggaactgcaagcaccgaccaacgaacgcaagtgtgatccagaagagccgtgaaaaaacagaacggaacagaagagcacgagagcggaatggattcagtctgccttcaggaacgaaattattcttctgtcgcggggggacgcgcggtaaaaaagtagcgccgatacacgcgagcatacgcaagtagtgttgtttggaagcgctgcagttgtgccaaagggtgcgaaatcagcaaacgaaggagactattcagcagaggtccgacggaagaagaccaagcgttcgactcgaattatgggttctttccagcaatcaagcaaagcgctttccaggtgcctggcgggctgagagccgacgacggccaggaagcaacgtgtgcttaggaaagacaaatttgtgcgtacccgactggcgacgcctccccaggaaccgccctctgttgtgtgtgaagatgagcgcgttgaaagcggaaagcagaaaagtacgcggggagacaattgccgataccaacgagacggaaacactggcaaggtggccaactcctcgacacacgcaaggcgtccgcagctgttggattccgagcttttgatctgtgtagatctgccggatttgccgcaacgcggatgagcatgttcgagttaggagtgtccttttattagcaacttctcacggatttttccggacttttctcacacgattgcaacccgtcaactccggccaccttttcgcaggccagtggtcaggaggctgaaacctgcgacggtggcccggcttatttgctggtgccatccgctctcactcgctactcgtgaaaatggttctgggggcacgggcaagccgacgtagacaaaacaaagacactgttaagtgttgttgttggcaagccccaaaaggactttccgccccctccatatccttgatccagcaaccttcacattacaaccacagagcacgggtgattctctgaaaccaagtaaccggattccccttgaaaaaaaagcagaaaaatggacgcacaccagatgctgtgtctggcgacacagaccgtattttgcgctgggcgacttgcttctaggaccataggaaaccccggttgctaccgccgcccattctcagcaaagtcaagcactctgcaccgtttcttgcaggggatgggttttccaagcagtctgtattcgtgtctttgaccttcaggcagatatttcgacttctcataacaaatgtaggggaccacaaccgcagccggcacaccgcggtcagcacagccagcccgtcatcgcacagtcagagggggccgttgcggcaagccagaaacgcttgtctacaaagataacaggcctgaacgcgatttccgcagttttatttccgaaatgccagtgcagagcgatccgtggactgggtcgcgacccttccctgtttcgcttcttgaagccgtcgggcgtcactgcaggtgagccactgcgcgcgtgaccccccttggcggcgcggctctattctgcactgagctcggacgtttctctactgggacagactgcttcttcttgagatacatctttgttttttcgtcacccttttctgccgactcaggggctacgcagtcgggagattggaagcgagtaaaacgaccgttca

SEQ ID NO: 2403 - DNA, 5034 bp, Toxoplasma gondii
  source 1..5034: mol_type = genomic DNA
gaaattactagacttgaatgacgtattgagacagtcgtcatttactgctgaggttctctgactgtgacgagttagcgaggctttctgtgaatttgttttgagttttaattccaaaaactgggagacgaacagggtacgcgccggcccccaggcggccctgtccgtttcgccagtttgtggaggagcacaaagagtttgcgcttttccaaaatgttgcctcgaaagcattctcgaggaaaaatctgtttttggagagatctccactttaatcgagtgccacggtgccgccgcattcgttcacttgtttgttgcttttcgatgaatgcacaagacgttttcaaagatacttttatctagtagtcgttccttgtttcagcaaagtcaaaccttcatcgcctttcctttaaaagaagtcacattttctgggttcgctggagagatgttttcgttcactgtgtagaggaatctcggaatttcctctattcgttgctttcccgagggtgtgtgtcattttctttcttccaagtgctggaaaacaaaatgtcgcccacacatgcgacttgttcaaggaatttgttttcgaagaagaggcttcagaagtcccccggaagcgcacaaattcacacctagcagaagcggttgaactctataaaaggaacaggcacattcagcgccaacttcttcactcgagcagacagtggcgtccggatgcaaagcctcacgctcacgttcgttgtgcctgacacagattcgtcttcgtcttaggcgaggaaggtctgtcaggcggatttgaatttctcgttggcaacagggtggagctcgcacgcgctccttatacaatagattttcaccgacagaagatcttctctgtcttcacgcttcctctttcgtttcttcaaatgcagcggagacaccgactggctgtcacgtgacttccgacgcgtagaaacaagttcaacaaattcaaggatcctcactttggcaagccccttcgttgtgttcgcttgtacacaaaagaacgcggatcgatcttttgttgacctggcacctgtattggaactgcgtgaaagctttttatgtccggtgcgtgtgatgctcacgcagaaaggaggcacaaaaacgaagctcttgcgtgctacactttttgccgactcgtgttccttctgaaacgtattgaatcctgtttcttggaggtttccttttgcacccccagcggcggaaaggaccctcactctgcagcaagggcacataacaccagcacggaggaagtgtgcaaagcgagtttacagaaaatcttgtggagcgtttttttgtagagattctaaatcatcccctatcgacaacagcaagcaatggccaccttgtcccgataaacgccaacgcaaaaaccgatttcagaagcttgaaatggacttcgtttccgtttttctaaaaaggcacatcgcatgagacccttctgacacaaagttgactggtagtgcatgcataggttcgaagataaacgtaacactaccgagaaattgaacggacaaactccatacacagtacaaagacatttacagttcttccacgcaaaagatctccgggaacgtacgcaaaacgcaatcgggaacagcgtctatgctgcagcctcgagggtgctgaaggtggtttgtgagtgccctttagtctctttgaagttcgtttcttagtcgacagtcgacaaaagaacggaggaaactcgtggacctttggaggtgaggtgaaggaaagagtgcgcgacaagaaacaaagatgtggttgagtggacaggaaagctttggattttttcgaagctgtagaggctttctggaagagtcgagagtgtctattgcaccttgagacgaaacaactcttccaccgcatctgttgcagtcagatgtttcttggccaatgctttttacagaagaaagcaaggccataagacgggcaggagcccatgttgcgtaagcaagtagcaggtccgaagcctgaatggcgacactcggtcaagtccggggtgggggctatctttgcacaacgcttatgttctttgcgtcacatgtatgaggtattgcgattaggcgtatgaacagcaagagaaaactgctcctcagatggtaaatgagctcgtaacgtctcccttactgcctacctggttctacgatttcactatttactagccctctctgcgaacgaataaaggatcaaaagcgggatatttcttgccgccgagtcttttcaagaatgaatttgacatccacacaaaaacgtaaactatcggttgcggtgagcttcacctatcgcttcacctatcgcttgcgccttaccatcgctggtaacgaacaggagtctacgtgaaggaaattttccagctcactgtggcatatcagaagacacaaccaaaaccggcatttgccgcctgcgccatttcatcgcctcctttgccggggacagcctggcagagatagttccgtttgtggggcagacgaaagcgcaccgagacgcggtaaactctcctcagtgacggagaacactttgtgctcaccatccgtggaaaatcctaccacttcacactttcgtaaaagacgcagaaagtgtgcttctttcctctgcccggacagcactcagttcttctcccagaaaacgagtgaactgttgcccgcaagagacgaacgacctcgttctggtccgttgcgcgctgctgcgtctgttgatagttccggatgcgtgccgtcgacttgtgagacagctgtgaggaaagccgtgacaccgaaagatcttggggacactgaaaagaaggaatagagagttgaccagtccccggcctactttgttccacgagtgcgagtcaagctatctactttctggaaagcagcactccacacagacatacagatgaaattatataagcatatgaacttgtacacatgtacaaacatacacgtgttcctacatatatacagtattacatttacatgtattcggatatacatgtatcttatgtatctatatactgatgtatacatatacatatatatatatatatgcatctgtatatcacaccgttgaacaagacggtgtactgcgttgactgcacgttgcctttttcccctttttcccgtgcaaatgtcggatggattcgtcgttgccatgcgtcacgaaggaagcctttttctagctcttcgatcatgtttaacctggaaggaactgaaggattcccctctctgtagatcttcttttgatgcatgcagagagccagctgtgaatacgattttggtgtatatggtcacagtcgcgctatggtgcacagacagcaccactcatttcagcacagcccttttccggtcactgtgtttcactaaaagcgaaatgtgaagtttcatctgttaccctgactttgttcgactgtgtcgtgcatgcgtttgaggtgtttgtctcccgcccagaactctgcagatttgtgtttcgttggctttttccatagacacagaatcgctgcacgaggatccggtaccgcgcttgccgcgcctcgaggcgaaagcgacttcttcttttactttggttgggtctccttttcgtcagcaactctgctgctcccaccgacacgatttatacatcagaagaaatggaggtagaatggcagttcaagccgatatgatagccgcaacgagcatcagttgttgacgtgtgaagatgacaggcagatgcacttttggaacctccgattccgaatttatttacttcctgcgccggcttgcgaaaggcatgtacgtgcaggttgagatgcgtagaacgactataaaatgctacatgtaggcagcaggaggtaacgggatacaacggggtgcgttcgtttgctgtgagaatcgctccagtgtacacagaagaaaagttagtttatagtccgtacccacttgtttgaaattgtctgcatttggctcaggtcgcctggccaggcgcttctctagccgtctcagtgcttccgggtgaggtcacctcgactttttttgaaagtgcggggaggaaagcgttgtaaacagaggcgaaacgttgccttccgtattctcactcgttccagccacatgtgtgtccgtttttcgctcgaaaattcccctttctgccgaaaaagatggagtgaggcgcgacaccagtcgagcgaaggacgacggtggcgggggggagagggtgcacggcgcgcgttcgccacaggcgcatggagttttccgtttcatcctttcgtttttccgcgttcaggatttcttcgccgataccgtccaaactctctttcttatgcttggacgggttgcccgttttcctttgattcgttttcacgcgcgcttttgccggcttgccttccttttcttctttgtttcagagtctcggaggttccactcgcgctgtgcggaattctcctgggacttggcttctgttcgcttgttgaaatttgcatttcttctatctggatttgtcgctattccgcaaactgccgagtagccattcggcggtgtgtacatacacctgactccgtggcggttcgctccagtctcgcccgcttaccagccagttttccggtgcagaaaggcgcccgctcccaagcgttggccctcgctgtttcgttgctttccccattcaacctcatcgctctcttttttctgctttagcgtcaagcgagtaagggagaacgcttctacgccggaccggtcaccgcttctggaggcccggcctctcgcgtttccccgttttttgccgcgcatgttcacgatggtgctcccgagacacatacgtctgaatgggagtttgcgtggacagacgaaatcctcgaattcaacggtgcgctcctgaatggaacggtacgcgcttcgctcgcctttcgacgctaccccccatccgaagagaatacgcgcagaactgatgacgtaagtccggacaagacgcagcttgtgggtgagtcgcgttttggctctcgcaaccctgcaggtcgttgaccatcgcgtcgtctgttttccgctgtgcatattcgccgtcaccgcacca

SEQ ID NO: 2404 - DNA, 2053 bp, Toxoplasma gondii
  source 1..2053: mol_type = genomic DNA
agttctggtgtttccaagtccgcgttgcttggctgcgcgatccgaagaagccccgggagtatttcgtctctttcgggggagagccgctttcggcttgtctctcttgcggccacagtcgagctcgacgcggagcggcagcctcggatttgcgaagcgaagatggagcggggggaaacggaggaaaagaaaagatcgaaggaagcgaagatgcgcgcgaggggggcagcaccgcacccttggactggtgaaagagagagtcgtcatacagagagacggcagaagccgcagtcgggtgcagcgacgctgggtgatccagcgccgagagagaaacgatgcgacagtttcttccttctgcgtttgaggagagaaaaatagagaaacctagaaagacgagtaacagacgagggccggtcatcaggcctgagacccgggacgaccgagttgctttcctgggtggaggggaaggcggacggcgaagaagagaagagcgagaagagcagacgagaaaaggacgagagagactagaacaagagagcagaaaacaagcgagtggaggaaaagccggggcaagatccatcaaggagacgaagaacgcagtggcagcagcacggagaagagagagagcggagaaacagcgaaagaaaagaagagaaaaacaacagatcgcacaagtgcggccttcgggtggacgaccgaaatggcacagcaggacagactgcagaagccgaggatgaaagactttctccatttttcgacgcgaagaaaagagaagaagccacaggagagagaaaacaaagtgaaaagacaaattcgaagaaacccctcgactcggcagcagcgcgggtgccggcaccagcctgcccccactcacggggtgtacgtacacccggtgcatgctggccatagtgaccggtcgaagcctcttagcttcctcatgctccacaaagacttctcgatgaggagcaacaattttctgcagttcttgccagcattattgcgtcatgaagcattgatctacaacgggtctcggattctccctctgtaggtccacactgtcggctgcgcgagttcggcatccctttgtcacgagatgggggaggtgaaaaattgacaggaagaggaggacgaaaaggacatgaaacgaaggggatttgcagacagaagcgaactcggatgaactcgcgtcgtccgccttttcgcgcctcccggcgcagcggccgcacacgacgggtctgtcttgtcacctcgatcttcgatacgcggagtgaagctcgtcgcggcggacaggtttgaggtttttgccccctctagaggtaccggaaaaaggaataaaggttgaggcagcgaaccacgcgtcaagagcactgaaactgcggtgtaatcttcaactgtgcgccaagagtactgtgcagcgagagcatgcagcgaaaacaacagaaacttgtgtgctggactggggacaaggaagaatcgcctgtcgcctgtttacgacgattttctcgcaaggattcaaaggaattctcacgttgattcgatttgaacttctccgttgtccacaacaagttctcagaagctgcctgccccctgggtctctggagacacacaactccacgtgcatgcaagcgtttttcagcgctctcatctgcagtgtggcctgctgtgccgcacatctttttctctctttctgtaattgctgtttctcctcgatctcgtggagatccagagggagaagaggtgacgaaggaactcgatgaacctcaacagccatcatctgtatctcctctcgactggtttctccttccactttttccgggtcccaaaagcgatgccagaaacggagatcgctggtcgacagaaagggggatgagaaggagcaggtacacttcacgtttcgagctgttgttggggagacgcactcgagaaaatcaggtgaatccaacagagacggagggcgcgtagcggcaggagcagccggcacagtctttgcaaagtcgtgggcggggcaccttggccagcactggaaatgggtcgaaactgcaaagagaagtcaaaa

SEQ ID NO: 2405 - DNA, 2409 bp, Toxoplasma gondii
  source 1..2409: mol_type = genomic DNA
agtcagatcaagactgtgacaccctacccttggtggactcgatggagccacgaaaaaaggaggcatatatatatatatatatatatatggcgagacgtgcactgtcacggccagatggagagtagatctgctttgaagactgagggaaggcaagagaaggatgaaatttaaaggagaaaacgagacaaggcgctacacaaaatctcgtgacgcgagcgcacctgggtacgcttacacatactcaatgacctcagaggaggaaacatcccggttcaacggtgccgcgtcagaagaaaaggtgcgaaaacgcattttaaaaaacagctcttcatgtgcacactagcactgtagaacgaacaaacaacttttacgtatcaggcatacgtatgaatagtcaggttctgacataaatacagtgttatgtgtatatacattgtattatatttgtatatcatatatgtatatctataaatgtatatatatatatatatatatataggggatggcccacgggttgcttacggattcatcaacaaatgccaatgtacactgaggcagctttcgctggacaaccttgatatctgagtgtttcattaatggctgaaacagttgttacatgtgtttgtgtacaaataagtagatgcggaaagaagacatgcggcgcaaggtccgcggttaggacacgaccctgctagctggagactcgctgcgctgtgctccaaacgggctaggggaacaggcgttgcaaatcgcgctttgtggcgctgaaacactataaaggaatatttcctccttctcaggaccggcagttcgaacccttgataagaaggagaatggtcatccatgcttcctgccccggttccaaatgtgaagcacgccagaagatacgaagcactcgcagcaagacaccaactttccaatgggaagagccgaaggaagctgcatcacaggcttgctgtccagtgcaaatttgagcctgtagttcctctgtagagttcatctgtctctaataaatcctctctgtaattgaacccggaaatgggatccggagaaaagtgacccagacgcatgcgcgggacaagcgagacggcacactggttctttggatggatctacatgagcgtaaaagccgcgaaaaagaaggcgaaattcggttacgacgaaggcactgagctctctggaaagaaaataaggtcaagcatgtgaaaaactcgtttcagcggagacttggcaggtgatgctcccgaaaacgcagagtgagctcagacggaggggggtagccacatatatcgaggagtcgggctgagacttaacaactacaatgacaggagctctcttcttcctggagccttttggagttttagaagaaacgttcttgagaactagcaaaatggcaacatgtcctcgctgctggcactaacttctcaaggtcgtgaaacaacgcgtccgaagagctacagggtggaggggggcgcttcccaacacacgttctgtttgcgacgctacggataagctttgcttcgttgcctcgtctcgccacgccgtgatgacaaaaaggattcctcaacctgccgtacgaaggatgactggatgccttcgggtacagttcttctcagtagtttagttgttgtgtttcatttgttgtcgtcaagagcggcagatgtaccacgcaaggtctccttggcgggcgctctgcagtccgtctccaatggactgagacattccctctttcagcgttctggcagtaacttgtgcgatgaaataattctcctcgtgtgggactggacgactcttgcggaatcgacatctcagggctcagccgtggatttgtgtcattccggctgagatggaatttttggaccaggctactttggccaccctggccacgtttcttctttccaatgagctgcccaagctccggcttctctctaaagcactcaatggtcgtcttttccccgttgactcgtttcggcggcttatacgagagccgcgatcgctggtctttccagccgaatggggacaagagaaactggaaagcgtgaagaatcgcagcaagcgtgagcagcttttcgaggaaggaagccaaagagcgcaaggcagtgctgtgccagaggcatcggaggtccacagcgtgactgcgtccccgcgggtttccctgggcataccggtttcatcagttgccccttccagacgagatttcaactaccttcgggttctggtgaacttaccccccccaccgccgcatttgctgcacctgactcttcacatcccgaagaatttacgcacagtaacgcgttcgtggctgcgaacctaccatcagcttctgtgtgtggcggctcctcacctggaaactctgcagctcgtcgagtttttctcagctcgtctggggaaggacctcatggtacgcga

SEQ ID NO: 2406 - DNA, 1750 bp, Toxoplasma gondii
  source 1..1750: mol_type = genomic DNA
aaaacagaggaatggaagattggatggcggcttaaacgtccgaacagcagagaccagagagggcaccagcctcagttgatcgaccagccagttggggtccgcgggtcaccactttcagcgaattgacagagcagggagtcgcgacgaaaaactgcgtaggaaaagtgagaacgacagaccagtataaaccgtcgcaaaaacaggtgaacttctgaaaagatggactttggtgaggagcctgggagaaacagaccacggagacaacggggcgagtcggctcttccgatttcgtggcttcgggtatctccgcagataccgtggctggaacagatttctttcacggaactcgagagttgaaaagcgcggaaaagcgagagaaaatgcgggggcgaccgccaagacagacttcgctcgagcggcaaccaacgcgagagagttcgtgtgttttcacccgggacaggaccccggacaggaaagtgacgagacagagacgctgttcagtgcgtccatacactcagggacaagagacgaaaaacgcttttggggaaagcgacagaagccaaagagagaaagaagaggtacgtggacgaaggcttctgcggttgcaggtgcgggaagttggaggagaaaacaggcggcagagactgcgtgtcaacgccacacacaacgcttgcggcatcacctgtcgaaaggcggatagagatggacggagacgaaggaaaaccggacagaaaagaagcgagagagcagcggccggcgaggcaaacgacgaggagaaatgggaggaaatcgccggagagggccgaggagaaagaggagtgttgactcgggtgtccagacgtctttcgaaacggggaagctccacagtaaggagaagctgagtgaaaagaagaaaggggaaaacgtaagacgacgtggcggaagaaacaaaggatgcaggcagtagccgcagtctgttctggagaccgcgagagttgatacacggaggcaaaggagaagggaaaaggccggaaaaaacgaaaggaaagcagaaaaatgaggtcaagggtggaaggcagaaaagaaacaagagggcgaagaccgcgttttccggagaagtggaaaggaaggaacagacgggagacggacccgaaagccgcacatgcatgcatcgcgggcacaatttgtacgctttcgcgaagaggccttcaaatcctcgcagtgcgcgtcgtagtctctcggcctcattttttgtgggggcagagaaaggatccctgtgagcaacgaagctgcacatatgcaggcctatatatagtcccgagagtggctgccgacagccgcctcgcgcctgtctgtctcgccatgcctccgaatatacggcggtctctccgcgttaaaaacgcacagtgtggaggccggttttcggggtggcggcggagcagggggaggcgaagaagtcgaaatttcgcctcgttcgtagtgttggatcgcggctcaggttctggaggaaggaagcggggagattctgttcgttttccttcgcagaaaactcgcacagcgttctggatcgcccggcagacgacgccgcaggcactgtgctgttcctcgtgtcctcgcgctcctcaaaggcgtggcagaattcgagtgccaggcgctttctgtcgcgactgcggagactgcctgctcactctcgagagcaaatatcgttttgcgcacatcgagctggtttctgtcttgtgctccgttcctgtacaccccgcgctctggttca

SEQ ID NO: 2407 - DNA, 1445 bp, Toxoplasma gondii
  source 1..1445: mol_type = genomic DNA
aaataacaggtgtacttataatcaggtgtgaaacttccctcgctcgttggtctccaccactcagtaatggtacgactgccagcgagctgacgatctcagcccaatgttccaacttcttgaggtttctctgcattgataaacataacttattctatctcgacacaacgtttgtcgagagattgcagacgacactgttctctactatgtggctaagcgtcagtccaacagtcctcaacggataattaagccttctccagaaggcgcgattttgtcgacagtacaccaacttcaacttcttcctgtcgctaccgtggcgccgcatcagcagcgacgttcagtttgcagttcttcatgtgacattggaaatacacgaacacgcagtactcagatgtacggtaacatctgcacaaaaccaagcgatgttcacagctcctctcgtcctaagcatccggacactagttatcagatggaaatgagaaagaaaggtccatatgaacgcatggaggatggagaaaatatacttcacatgaagtccttgtccgccttcttttccactatgaagagaaaaccagtgatggagacgacaggggacgttatgcatctgacgtaaactgtacacaggcggcaagaccagacgaactagtatgccccttggcaaggaaggcgaaggttgccaactggggctcagcacttctagctgaggcagaactaaaacaacgaaattccaagacatgcgagcgggtgccagtggcgtctatcaagccagggcacgagcctttcggagaactgcacatgcactttgtttgttccgagaaaaagaatacgcacaacatgaacgcacagccggaaggacatgcagggctcacctgcttgcttgtcctcctgtttcattattctcgaacagacaagagtgaccagcttctcgacacgtgctgttctgtgccgtctagcgatagaagtatcttgtcttgcttatgatctttcgatgctgcatgcatgcgaaatgaatgcatgcggaaaaacatgttcgctcccgcttgagttcggtgcgcctcaggcccacagaaacacattgccgtaaatgttttttccatggacatgcatttgaacagaagcaattagatatactccgagtgtgcctgttatctgcgcatcgtttgctggtgtgccggaattaaacagtcttgtcctgctgcagttgtgaaaaagccgctgtctcatcgagtccgactgagcacacatggcgagcgtgtcgttgcagcacgactgttcgttgccattttcttgaaaacttcctaattgaacttgtctttccctcgtttccgagaggcattgctctttgaactagacgtcttgccgaaggaaaaggatgcgtgtggcaactcgaggcaggcaggaacatttacggtgtgcggatacttgaaagtcggcacaccttcgctcga

SEQ ID NO: 2408 - DNA, 1963 bp, Toxoplasma gondii
  source 1..1963: mol_type = genomic DNA
atgcagccttgtgttcagttttcagcagtcgacagaagggtagaagggggatggaccatatattttcgggcttccgtctgcaccgtccgcattccgcacctgagccagagacaagcgtcagcagctcctctcgtttccggtagccgcatcttgtttctaagcatgttcactacaaccgacactcccacgaaacccagacttctttgtcttgtcggtgctttttatgcccacatttatggaaccaagaaatatgacacttttcttcgtctttcgctcgctacctgacacgacgtgattcaaatcgagaacaacggccgacgaatagaatccttgacaaataccgacggaccctttgcacgagagtgacagattacacttcctttcaatctacatccggcaccagtagccccacgttctcctatttctttctggtctgtagtttcagattatgtagaggaacatctttggtggtcgcctgctgtctcaaagtactatcttaatggaaaagcttggcacggttccagcattcaacagaactcttcgacagcgttttttcagattggccatgtgcgtaggtgacagaatgtggttttacggattgcagtgtcaagtggaagaaagattactggcataggggagtcctacggtactcctgtgtataggcttaagcccttgccttatgacaaacacaacggcacgagttgagcttaggggtgcagcataggtgtctgcttcctgtagcgcctcagggggcactagtctgagttgtgcccaagttttcgtcaatggtggggatgtggtagcgcacagtaacaatgtttcaaagacgtcgaagacatgaaataaaaagtgagctggaaggccagttcaagacttggaaacgacagaagccgtgccgcacaagcggcatcgaattatgtacgtgtatgtgtctatataaaacactggagtcgcactcgccgtagatgaaaccttctgacagcctctctctctcgcgccgactcggtgcttacgaatatgtgtgccagcatgcgtagatatacctatactttacagaattgtacacaagatctcgtcgaccgtgtataggttttccattgcttctctacgactgtctcagtagtgcatgctacttgggtgctgagcatattagttacggacaagagctaagaaggaacgacggccgcaaagtatgcagtcccgaagcggagcgagcgccagacggtccatggtgtgtcggcgcatgcgccccgcatgcaagaaaagaccaaatcgaaggcatagtccgccgatgtggtaggaaaacgaatggaaaatggagcggcctgtctgggacattgcttttatgactccagtgtgttcgttggtgacgaaagaatgatcttaaaagcggaacaatgaggctgactgtttgagtcgcagtcactccatcacgcgccatcgaccgcaagccgcgcgccaattccatagcagcagatgcacggtcacttggcgttttctcttttctaccctggaagcttcagccccgatattcctttctttttccaccattcatctcctgttttgcggaggccttccttcgccaaatatcggcgttccctctgtcggaaaccagcggaggcgtgcatgcagccgatctctgcaactgcgaggtgcatgcgctgtgtctccgaattcgcaatctttctgctggatcctcacgatttccaaagaccaggccgcaactcgtctccagtgggtttgtcgagctgggtagcacacgttcctcgctcctttgatttctcctctggctgctgccccagacgagtccctctcgcgtctcgtgctcctttttttcctgttcccgagggcctccggtcctggccttcgcgtccgtccttccgggtctcggcgtcctcttctcgttttccttgggtgtcgacctcctgagttttcgttcgcttttttcgctcgcagtgcgaga

SEQ ID NO: 2409 - DNA, 1684 bp, Toxoplasma gondii
  source 1..1684: mol_type = genomic DNA
acgacgtttgaagtgtcggaccaactttcacgcacgacgataacaccgcataatatgttaggaaataccattcaggtacgatatgaagcggtgttacgaacctgtctctacccctaatggtttgttggaacaaccgtggcttctggaaggaattggaagaattcatttcgttctgcagccacgtactctacagacacaatctgtttctcgaacctctgcggctgtgcatgactcctccactcgtagtctagaggcataaatcagacctctgagtcgtttggcctgacaaggaaactgcattcttgttacagaagactaaaagtggtccccatgccgtgtcagaccagcatccgttctgtgtaggagatattgtgacactcgtggattgtttagcactccatgggcatccattcttgtgctgtcggtgcgtagtggcaccagtctactaaaagctcttgggtgcgtttaggagacgagcgcagctgcgtttcttgtaaacccagagcacatctgtaaacgcacacttgacggcttttagggtgatttgtccgaaaggtgtcaaccacgggagcgtactcgacaaagtaagaacgcaaacggactgttacaaccgtttcagggtaagtgccagagacaaaggatgacgagctcagcggtggcgaagtgtgtacacgagtttgctgccaatcatcaagtgcaagtgaacattcttactactgtcttgaacggcaatcaataagaactagcttccggacagtattttcccaggaaacgaatcagcgttccagctcgctaaaaggaaaaatgccagatacacgtaagctctctgcctgaacgacccgctgtactgaccatgccctaccgtggtttgcttttccggaatgagcatgctttctggcaactcgcggaaagcgaccaggacgaaacctgcttcgagggacgaaggtcacgggctgtttgccccacagtgacagtgatggcctgcggagacacgagtcccaggtcctcccttgtccagaacaacctttggaaaatttgtaaaactcaaatgttccctaaattgacgtgcagagagtgatggaagcctaaagcccgcggatttcttctccaagacccgcctctggacaagcagtgtcgttcaagcttctcgaaaaagaggtgcatgcgcaacattcctgcgagtcgctaaagcggtgttcctggccaccgtcatatggttttcaaatcggctgggaactttgactgccgcagcgctttgtctgtgatgtgcaagtgtgtccgggtgtctgtacaccccagttctgaacgaagtcgatgagtcgctacgggcctgtgctgtcatttttcgaaaactacccggaatctgagacagtcgcgaccctctgcaagccccttcaggcccgaagtccaggacgcaagactcgaatcttccagactctttcgctccctccgttttcccggacgtatctttctgtcgggcagataacttggtttccgactttgttgcgactccggcactgtgccaacgcggacaactgtctccacacgcacgtgcacatctgacgtttgtcctcgagtgcggcaggccttcccgtactctgcaagtgaactctgcccgcgactttcccgggaattctgcaaggtcgttccgattttccttcgttcccgccggcagttcgcacca

SEQ ID NO: 2410 - DNA, 1916 bp, Toxoplasma gondii
  source 1..1916: mol_type = genomic DNA
gagaatgcgcaagccaaaagatacagttgtcagtcattctcattcaacgtctctctaattctccgttccactgaaccagtgcacgcctcccatcgtgtctatgtctttttgttcatcccgtgggtttctggtccctcaaaaaaagaaccaagtcagctgcgccggtaaaagtgactaaccggaagctgctgaagaagcagcaagacagctgcgttctcctatcgactcgcatgttggtggcatatgcaattcaccactactgagtttcttctgcggtatgtttttggagagtggaacgtactgatcagtattgatgtggacgtaacataatgcgatctgtaggcttggaattccttctttcattcactgtaggaggtagaaaaggcgtagttgcgggtaatgcaattatggatgttgcactatatgatacagactatctttctgcacacttcatctttgcattgtctcttggagcaaccttggcgtaaacggttcagttcgctctcgacacacagacgagttagctgtgtaggcacacgagccaagtgtgtacggcgaattccctcagaactccgagatgttttctcgtggctttttgaaaacccccgcacttgttctctggcgacgagatagtgcctgcgcagccgctgctcttttcaccgaacaccgggacggaatctagagtttagatttccacctccaagtttcattttatcagtctcgtgctctgcaccacagcacggaagcctccagcttcttgtcttgtgtgtgcgtcgtctgtacacaggcatcaacatgtttttcgtctccgtggaggagaagacccatttctcgccgcaaagaatcacggatcgtatgaattccttcatcatttagttctacgccaacttcttcgctctctgctgcctcaaaaaactccctacatccactgtttttctttttactcaacagtaaactctttcgcgtgccaaccgaccactacatccacatccagagctgtgcctgtatagggaaaatgcgttgcacatggatgtagacgtatttctgcccatgttagcccatttacactttttaaaaggtgcatgcgggacttcgttcccactacaaagatgcatgtgcaggtacgttgtctgccacagttgcatgcaacagaaccgttgactgtgtgcatgcattcgaatcgcaaacggtccgcagcacagtgacggtgtctccggatggatttctcgaaatcgaaaggatgccccgaagttttttctgttccgaacgtcacacttgtcgagggaaagggaagaccttcgctgacttcgagtttgctgcctggtcttcgtgagggacttctcgacgtcctttctgccgttctggattgcgccggtgccgggcatgacttcgaccgttttccctagcaaatttaccacgtctcgctgtcttcaaatatcattggtgagtccatgtcgctctagttttcgtgtctactgttactcgagagatcagcgaaaaccgagtctcctcctctcgcatgtcctaggcgcgagggtccgctctaccttctgacttgccggagacttaggaaaaggccttctcacttctttctggcgtttctgtctctgccactaccttttttgaaatcccttcaacgccccgtttgctgcctcatttcttccctagtttctaccgttctgcgaaaaccaacttctctcctgtctccctaacgtccccagcgcgtctccaaagtctcccttggtgcaccatcggacctacctctgctcctacacggagaacatgcatgtagcctgttgacaagcacccatctatgtggatttctcgctctctcctgagtcgatttttcgtgcgcgaacctcgtctccgttccgtttttcgcttcgcagacccccgctgttcgttcttcgccgtca

SEQ ID NO: 2411 - DNA, 4286 bp, Toxoplasma gondii
  source 1..4286: mol_type = genomic DNA
aaacaggatggtgcacgatggtgaatggctcggaatcaacgtcttgaaagattgacccggcgacgcgatgtcgtctttagaaaaaaacttcgagaaacgtacgaaagagcacacaaagcgtcgcccacaacaccgctctgaagaactccacagaggcgatccgagggaaacgaaaaaggatctactttcttgcaaaaatagacaccttgcaatctttactcttttgtgtctcccatgtgacattcacgcacacaggaacgccatgcgtatgcagatgctcacagaaaaccactcacaaaaggtacacatacatggaagtatacatacatatttacatatatatatatatatatatgtataaactgacaacagatgtgtgcgcatgtccgtagctttgtatgtaatatgtatgaacgagagatcgacgtttcttgtagataatttagaaaggaaagtccacctgcaggtccagcggattcaaagggaagtgcacgtagcatggcgggggttgcaccttgggagcacggaacactggttgtcgcgttttcccttcagacgcaacagatctctccccatagggccgcacccggaggtttttggatagaagaaggtcggtaaaagcgcgcgaaagtcttctgtgactgcgaggaaaaagcaattttgttcccgcggtgcctcggagaaggcaccgccgagcgtcgcacgcgtcgttgggctggaccggaaagaaactcggacaagtgaggagacaggcgagaaaaattggagtttctgcaccggcctacgtaagacctttcatttccatgggagaaaactctcaaaatccgaagaaccggcagatttctctgggaagctgcagacttgtttgcgcgtgtcttgtagtggcatgccgcgttgaaagcgagaccgggaaaccgttttgaagaagcggcggcttcactgtcgactcatccctttgttggcatcgccagagagtcgagagtttcggcggcaaagagacagagaaaaaagtggagaaagagcgcgaacgggcaactgaacacaagcacacacttggcgggcgtcctcgtccccgggcgggcaggagggagctttcagaatttgaggcttccaggtagcagtggatttcgtttcaccagtcctttctcctggactctcctctgcacttttccaagttttctctttcttcggctgcaagcgtgtggcttcctcctcgaaacccaaggcgagtatttctctgtagcgggcagatatcaacgtcgactttcgctgtcgtgtgtctgcatgcaaggcacatatgggagcctcggagtgaggcagcaggagtttctggccgcggaatttccccccgcttctctccagagaggacaaggcttcacagtttacacagtccgtcgcggtagatcgaaagatgacgagccttgaggcgacgttgggggctgcagaagactgaacagagaaaaaagttctgacgccaacgttctgcagcttggctagcggagttgcctttctcggagactcgataaatgcctttcgagttccgtctctgtccgccggaactcctcagttgtgtgtgtgtgggtgtccccgctacacaaagagctgaaagcgcggttctacactgcgactcggtttcttgcagccggttctctccagtgactcaaacggcacctggaagagcgagccggaagtcctttgcccgagacattatccacgcatgtccagtgtgcagtgtggtctcgtttcgcagcgactgcgcgctcgtttcttgttcccgcgaacctgcagaagaagccgtaggactaccgcttctctcgagtaaacggtctttgcgaggtcggacagaacgcatgaactctgcggtgcgtgagattccgccagaatcacggcgttcgcaggttgccgcgggtctcgcaaaaaaactttttgcagaaagcggacatctctcggtgcatgcttctcccgctagagaatcaagggcaaacgcaggaacacccatgcggcaggccgcgcctctcttccgccgtgtgggggctggggagttttagaagactcctctcggctttctcctgtctgctctttccaagtgctccgcgtaaaaacggagatgttttcacagaaacttccaccagatgctcccgtgaaccgcttggtcacacgagcagcaaggagcagactgtccggaacgccagcctgccctcggcggcctgcgccttccctgcaccatggcagtcttccttggcgtttggaagagatgattctatcatgccttcgtccagaaaacatgaaacatggaaaagcgcagaaagcgtctctctctcatgagttatagccggcacacactggcagttggcaagctgcgaatcctaatagacgctccgcagacaaaagactgtatacgcatgcatatacatacaaatatatatatatatatatgaaaacatatgcataggcataggtatatatattcgtatatagagatggaggtatatagatatatctgaagcgaggtgaatatctgaaagcagatgtatatacatatgtatatatatatatataaatatatatgaaaacaggtgtatatttatattaaaatagatgtgattttcttccgactggtggaggcaggcagtggatatcaggaaggtgaaggaaatgtgtgacctctggaatagacagaaatagacctacgcaggagaatacgccttgttttcgctagggacgaaatggttcactcacgaagcctttccgagaggaaaaatgcatttgctccccaaacgcagcgctcgagtgagtaggaaccaacaccgtcttccactccagcgcgattctgaagtggaaatacaccctcgggatctggagaactctctcttgtgcgcccggcagaagcctgtgacaagcagacaaatgcaaatgaactgaagtagcctgttagtcgccaggcatttgctgcagaacgttttcccccccctccacttgtccctacatatgcataccttatatccatatatacgtctttattatatatatatatatttatctatattatagtataatatatatatatatatatatatgtatttgcagacatcttcggctggcgctacgtccgtcgaggaagagaaagtctacagcttctcggtgcactcgagagaagatttttttcggagtgtatatctgcgaacgctctgttattggattctccccgacgtgagagcgacgaggccatcatgtcttttgctctggcaaagtcacaagaatccggttctcacgacgcgttccctggctagttgtctctcgcgatttccccgcgactttcgacggtttggagacttaggaaagtggaggagacgacgatgtttctcggcgcttgattgactgctttttttgcttgtttccgtcacctgtgtgacgactttatggtgtcgagaaggttttcaagttttctttggaggctcggaaaacgacgcgtcatgccccgcccctccgacggtgtgcgtagggttacaccgcaagactgagagagaagaggagcttggtactttttttctccactgtctgcgtctctcctcgcctccgtgaacgcgtttttccgcggtttcctgcatttctttcgcgtcgttcaagcggactcggagacattttccttcaaaggatgacgggagcacccgtccgtcctcgtcttcttttccctcgctcttctcgcgcaagtcgattgtccagctctcgctgtgtgtctgccgagaccttcgtttcgttgagggcagcgtctgccgtttcctctcgcgatccacgcctcgctgtatccgcctttgctctctcgcaaaaatgtgagatttccccgagacgcgatacactcagcgcctccggagaccaagcgcatcgatgatcacgcttattctctcccgccaccactaacgcgtttccttcttcggtctgtgttttccgatacttgcttcgacgggattcgaacagctcttcttcgcgcttcctttctcttgcttcgccgccctcaaaaatctgcgtataaagagaacctcagaggagcaaccgctagcaagcagcctgcatccgcagagagaggaaaaagacgaggacccgccggggcaactcggatctcctttccggggaaacatgacgcagaagaacgtcgaaaggatcgtccattccagctgcgcttgcgacagaggagacgaacgatagtcgcgtctcccgccacggtgttctcgtctctcctctttgcttttctctcgttgacttccttcgtttctcctctccccgcaaaa

SEQ ID NO: 2412 - DNA, 2510 bp, Toxoplasma gondii
  source 1..2510: mol_type = genomic DNA
tgtaccgtcatcccactgacagttgacgacgtgttctgtctcttttccacttcagaaaagtagtcggatcttcagtttgggctctacagaagccaacaggatagctgcaatgtggcctgagactgtgaggcctatcgacttcgcgcatgacggagtatactgcatgctgacgtaaaatttgtggatacacactcccgcactcccagctccgtagattcgaacgaagccgcgcgctacacatggcacaatttcttgaagcaacacagagctactaggatatatctaggtccgagagttccatcaaaccaaagccgcctgtaggaagaatacaattcagtgtggttaacatttagaatcctgttcaactggtgctacgagcagttgagtggcgtcgccaggcactggaaacgcacaagctcttgttcactcgttggtcttcggctattctcgacaaacgacattcgtgtttttttccgtccaccctctcgctgaggtgtggatacaacaaatacggcctagagacctttttacaacggagagacgtacttgcaggtacctcactcgcacatctatatgataccttttcctggctgtatgctgtcttttcctatgaaaggataaaccgcatagggttagtcggggcctaagataagaaatttattgtttcttgggcatggacagcgagataattcgggtacacacttgctctgaaaggcacacagtggcgcctcggaataccttttccccgtaggcttctgtgtgtgttggacagagctgtcagcaaccccggggtacgcgcgtacccgaaactaagcgtgtgcgtgtacgggcgagagtcgattgtcagccattcatcccaggcaccaacagcgttcatccaggtcctcagttggtgtgaggccaacaggaatccaatccgtgtactctgtagaaaccaacacctggaatgaaactatcaaagttaaagactttgatgcgatgagtatgattcagacaaaagcctgctgtgtggctgtctgatgtcacaaccaacagaacgcgaatccggattctggaacaggagccacgaaaggttgtcaatgccttttgcctctgcctctaaatttcaaggggaggtagcggatacggggttttaggtggcatctgttgggaagccgtgaggatctccgtcattcctcttgcttgtctgtgacgagtcttgcctagactcgcactaacgccgtcgatgatcgccgcgagcaaccacgcaacaagtgaacaatgcgtgcgactaatcacagtctgagaaccgagatgcggattcttgtctgaattccacttttcctctcacacagatcctgcccccacatcttcaaggtgtagagccaaaataccgagagcgacggggcgttaaccctcacccccccgccgtcatgcactgaacggcgttcgcacgagcaacagatgcgacctttcgctgcctctgtcatccgcgtagatgcggtgtcacgctttttctgttttccattgtgtttcggaatcgtcgacgtccatcctttcggcaactaagtccttcccttgctatttgctcgttagccgctcaactctcctctatttaagagggagcgttcatgcgggaagcgttcgacatgcgttgacctttgggtccaaggttcccgcgagttttctgtctcgtcgcgtctcccgatacagaacatcatcgtctgagcacatcgaacagagtattgctgctaaacgcggccttttggtaacactgaaggactttccaccggcaagtctcgtggttttctaggatgaacccctgaacagttcctgttgcctcgcatgcagctcgctcgaaaagggaactcaacagctggcgcaagaaagtgagaagggtagcgatatggaccctttcgttttctgattgtggacggagaaaatcacgaaggacgtggaaggaatgataggatttcagcccgatttcgtgttactttcaaccagcgtttcatgaaactccattttttcgggtcgcaccgctgccaaagacgagcactcacgacgctggcgtgtggttgtaggggaacactgctgagtttcgcgctgcagagcgctcacacgttttctcgagttcgtttttcagtctcaatcctttagaggttgtgccgtgcgccattccaggagagaggctgcactcgagcgccgagtgacagctcccaaagtatgccgggatacttcggaacttgggcgggttcagaagcaaagaaaaagcaacgtgatgaccagactgataggaggagttgcgcagtagcaatgtctcgcgtttacgtgtatgttcaagggttatgtgcgtcgataccacatcaatgagaggcgctccagttgggtgggtgtgggaaagtcgttcacctcccgcgccagctcctggatctggtggctcgcgagcttgaggtgcaagtactcctcgagcagccgtgccagagtgtggcttctctagatcagataggctctcagagatccatcttcgacga

SEQ ID NO: 2413 - DNA, 4017 bp, Toxoplasma gondii
  source 1..4017: mol_type = genomic DNA
ttgtgccctacagacacaggcaaagaacacacatttgttttgttcgtttacctccacctctgagtagcttcgtcgttcgacccccagtacacaacattcctgaagaggtcttggacgctcgtggggacatagcggagtagatccgaaggcgtactaagttccgacatgttgaggacagggtttagaatttctgacagaaacaaggcagccaacacaccaacggaaaccacacacagtaaacgcagagatctacttcttcgtgcgacgtgtgctacagagacagtgaacaccatggatctctgtatttccagcccagtacatggttgggcagtcatttggtgtcatgtccagcctgcactcaagacggtaccaagaaagagaagtgcgctcgtcaccaatttttgtcgaaacagggtggaagtggtatacgccgtacagttgtaaatgcatatatatatatatatatatgtatatatatggaaaaagcacaagccggaaaaagtgcattacaaatcggagaatgctgctgctacctggtttttgtgcgtacacacatggcacatggtgaccgccatcgtatgacagccacgatgcaaagttggcacgtcagacgcccttgcgctctccaccaacgtaatcgtatgagaggcgagaacggaacccgcagtaattcctccacggccatatgatttccctctgcggttaccagtgtcaaggaggcaaggggaacttaagaaaaatgacattccggattggtctcacaggatacctcttgtcgctgttacagtgggtatcagatgcgccgggggaaagacttgtcaacgtggacgaggatatatccgtagcatgtgacagactcacaagagacctaatacagagaagatacaccattaaacggcggccgagacaaaggcttttcttcatacaggaaaaattgctcctcacctctccagacaacacgccgcttttgcttaaaatcgagcctgtgtgttcagcagcggtgcgcaaatctttcacccgcagaacagccaagtcgaaaaccccattaacttcgtctacagcttctggcaaaaaagctgctagcttttgggagctgacgcaaacagcgcgaaagatgaaccggctgtgtcccgtcacagcttcatctagccgtcaactgaggaaaaccacagaattaccaaatcgctaagaacgcgcaaggccgcggtagagtgctacagacgcacgcagacagacacacaaaagacactgtatgtaaagccagcaaagtgcgaaaagacgaaacagtttccgcgttttggccacacaaacgcatctagctacccgaaccagcgaagttccgacccggtccccgctcatatctctccccgcttgctctagcgttttgactcccatttctcactgtttccctctctgcagcgcagttagttatctcgcgatgaatagaaattgcatccatcagaatccagttgtatcacgcctgtttttgatagtgtttacgcgatgtgccagtgtgattctgtcacagagattgagaggaacccacgtgctttgtttgcatctgtttaaccgccaagcaacagggggtcaggcctttgacgttccagctgagaactcggtttgggggcgtacagttgaagccaacacgtccgtaagcatgcaacttaagaagcttctggccggatcgggacggaaaatcggcaccaaaactgaaaaaaaaggctgaaaaaacccgaacgtcgaaagcctcgctgagagaccgctaaggggacgtagcagttggtagacgacttcaacgtcaccgcagtctcacacgcgatgtcaactcacgcgcatgtcagaagacgccctttacatgccatgcgttgtgctgggcagcacacaagtacgtacttaatgcatgtccgcttaagaagacaagatcggaccacaaatttcccgagtacgccaaaagccgctatggatagatatctagactggtctccctttctccgctgtaccacaccaaacacgtctgccgtgctcgacagaaaatactcatcgtaaatacagagggttggaatgcagttggttccacaacgctctcccaccctactccagtgctgcggcttcgagccgaagaagggcttttcatctgctagaaatcattgcagtgtcgaagtgcagtatggaccgccaccgtgtctgtagctctgaaatgaaaggtgcagggacagggattcatgctggaggttataccggtgcttcctgacggagcacatagacagttgatgcttcactggtaagtcgacactgcgtaacaatagtggaaatgtctgaattaacgagtgtctgataagccaaagtctaccactgcagtggcagtgcgccacgtgagacttgacaacagacgggcagatcggatagtgtcacttctgtgcgggaagacgatgtaatccttcgacgtcattggccagcagccagaaagcagctctgggtgccatgttgcagcaattttgggactactgcctttcctggttgactgtgttactgccttgaactctaatctgcccagatgcaattgcgttgcgccatgctgccgtctgattgagtgtctcatctgtgtccgttcggaaaagtgtaacggtttcctgcagggaagaaaactgctccttaaggaacaagtctgctccttaaggaacaagtctggtgcgacgttagtcgcgcaagcacacatttaggtccttgatgggggtgaatttggcttccgttttctaccaattagatgccgcggtatcaaaaggctcttcaaatccactagcaatcactgatgcatgtcggcacacaactggtttcaccagtatgtcctgtatccctatgcctgcagtcatcgtggcattctgctgattccttcactggcctagctccacggtgtctggtcgtaaaccaagcgtgcgcgtccttcgttgagccatgtatgtgtctgtgagtgtttggtgcacaatccgtgttctaagttgctgagatcgtttatgatctgtaacaaacttcttgccccgattctgtcatagcattcatacacccccctctatgcacggtgacggcagagtagctagctgagaccggagaaaaagcgtgtttctttgcatgggctgcggtccgtcaagacgagactgagagtcttgatgaaggatcgatgcatcactggcaattgtgcgaaaacatgtctttactgaagtacatttttgtttaggtagcagtttaccttttttccttaagggtctttgtggtcttgctcgacctttttatcgtcaatccgggcgcggccaccgcaagtgctcggattctcgtcgcttcctcgcagagtaagaaggtttcacggaaatctggtaaccattccggtctaaaaaaggcgcatcatgccctgttttttcgtgcttccgaattctcttccccgttaaacttgccaccacgtgacgaagtgtcttatcggggtgcatccaaaagaccaaatcgacggcttgttttcggtttgcccggaagaagtgtaacgaagcaagaagctgcttccatcgtctccatacgaaacactcagcctctttgcctccgaacgaatgcttttttgcactaccgtctgtctttgtccttcccctgcgtcttcgcttcttcaccagtcagcaccgttttttcgacagaagcaacggcagcgaactcgttcctacgcatgaggattgtgcgtcaactgcgtaacttatcgtcaacaacagaactctgttactcgaaagcactgtattcagaatcagacagcttccaagtcctaaccccaaccaagcagctttattcttttgcatcttcttcgttctctgctatagttactggggtcgtgtccattagcgaaagcgcatgtgtgctaagagttcttgagcaaacatcatgccggtttctccagtccttactctctctctctttgcattctgttgcatcttttgttttagttgaaaggtgataaagttcgttgagacgttctgggtgtcaaga

SEQ ID NO: 2414 - DNA, 3119 bp, Toxoplasma gondii
  source 1..3119: mol_type = genomic DNA
ggaacatttgagaagtgaaaggacggcatttgccattgaggagttgtttctcgagggaggagcctcggaggctcccagcttgccgggaagacaatttgtggaaacattcatatcgagaggaaggtctcgacctggcatttttcgagccgtttcagacctcacgctcgagaaacaaagagacaagaaaagttgacagacacgcagaaaccaagtagcgcgctccacgggagaagttgcgcctcgcagtagacgacgcacagatccttctccttgagtttgttggagcactggagagaagaattggagcgagaaggacatcacaaaaacgcgtttccaacctggagagggtgccgagtcgtgcagccgacgacttgcttgcgcgtccagttgttttgcgaggcatctcgcgcgtttcagcaatctcgaaatgacacacttcagagcggtggtcaacacagcgttttgaatctgaacccaaaccgtcgatcggctttccccgttctccaactgccaccgtttatctgtctcgtctgtctcggcctgctcctcggctttgtgcgcctacgcagcgtcgaggtcaagagttcactgtttgtggtgactgagtcgtcacacatgttgttctgtccgtttgtcccttgttggcagtggcgttttccgttcgttttttcccgctcctgttcagagcgcgttgacgcaggtgccgaaacggcgtttggagaatccacgaagagtcttctcgcagacctggccgtcggaatctctgaaagtcgcagcgcctgcgtcgtcgcgctgccgacggacgcttcggcgtctgtgcgtccgcgtctcggtgcccccctacggaaaatattttttttcagttacttacttccgcgggacaaaccgggttctgagcaacgaagtggtgtgaccaaccgtcaagtctaaagccggttgaaaaagccggtgactctgattgatggagtgcgacaagactctgagacattttccgcttgaaccgttacgctcgtgtgcatcccatcgtccgaatcgattgtcttctgtattcataggggccatactcaagtcgacagagatattgcgtacgaccgcgctggttccagtttgtgtcgcactgcacaagtttcgtttcgcacaaaggacccaacctttccaccccctgagcttgatttctcgtcgttttctgttcggtctggagcagccccccgaacccgcagcgtctgtagtgtcccgttccttttcttctgccgttctctgtcctttcaagtggttctttctccgctgccttcacatattccagtttgtgcacggtctcgcaaaggctgtcatgagctccgaagctcgggtacagccccaagacgcgttccactcacatcagcatgaagcgtaacatatctacatatctacaggcagaagggaggtcgtcttgtgttccgacacccggtgacacagagagtctgcgaatgccggaggctaattaccgttcaagcgctcagagacacacatacgatgcgggaaccatgaaatcgcagtttcttgcgatagaacggggctgtcgagaaaacaggtgcagtcgtttcgtatacgtggtttcaatcgtatatgcgctcgaaacagactgttctccggtaacgcctttgaaacaaatagtcttcacactctgctctcttgaaacagtgcgagcgtcgtgtaaacggattcgcaagcgtctcctcgacgaggtgtgcatctcggctgtgtccgttctttctccgttctgattcctgctgtgcattcgcgttcccctcccgtccgttgtctctccgtcttcggatttctgctcgctgcgtcactcattttttttctcctcggtctcttcatgtctcagcactcactgacgacacatggcacgctcctccagactcgccgcaagtcctttaacgaagttcggacttctgtttacacaggagatacggtgtcggaccgagactacgaattcagaagagaggcttcgtggtactgacacccaaactaacatgtgtagtgcgcttcgagaaagccttttctcttttgaaggtgttccatattttccctacggtcttccacattctctgccaactcgcgtcttcttcatcgcgtagttcaccctcattcgcatcttcgagttctttcttctttcgctcaacccaggaaaacgcagcgttacttcctctgttcccgctctcgcttccgccctcgcgaaaaaacagagaacgaaacagtccttcccttcctgaaaaatgcagaagagagcaggagaagagatcgccgtggttttgcgtcctcagaggatactcctctaaaaaaagacagtgtgtctttgtctcagatccagtttcctcgtcccgatattttgtcttcactgcatgcgttcccgttcggcgccgatataaactacacacttgtgcgcgtaaccgggagagagactggcagaacgaccgcatcgcttctcctggcctcttcactgcacaattcagctctcttcgtccttctctctgtgtgagtcttctttctagctctttctccattccattccgtcttcgcctcttctgtcgcggcatttttctccgcgggcgtcgctctcgcccagacgagtgccggcgcatgcagcgcgcaaagacgtacccggcggagcgaaacaaagacggagagagaaacggaaagagaagacggaaccaaaagagggagaggagagaagaagagaaaaaagagaatgtcaaggtgggaaagaacgcatgtggagagcgacgcctctcaacctacgtacagccaagtctctcgaccgccatgtgaccgaagcatagcgttttacaacacgagattggaggctcacctaatcaatatcgctgtgaacctcaccagaacatgtaattgtgttgagagaacaataggaactgtttacttggtgcgaatgccgctgtgcagaaaggaattcccgacatcgaaacgtgtgtgtcctttgtttcagacatgtcagaatcgttgatccttttttttccagcgtcgccgctcgcttcgacctcttgccctttctttctagcctcgttcttccgtccttccgctcgctcagcttctctcgatccttcagctctcgaaaa

SEQ ID NO: 2415 - DNA, 3482 bp, Toxoplasma gondii
  source 1..3482: mol_type = genomic DNA
agttcttgattatcccgatgtaggtgtatattcgtaccaaacaaggcgccagtgtttctctgaaatgagttgttaagatgatgttggcgactgtgttgtccagatagttaccttcccaaatatgccgcacgcagagcttcagcgagctgctctcgtgagtcctgagtcacggaatcgtacactctatagcgcaccgtacgctgtagtcttactgatagttcggcgattctctgagacgatcgattcaagtcttcctcgatttccttccgccgctctctttccatcaacacttcctctttgagcttttcgaggctagcggacgactaggggctgtttttttattttgtcccttgaaaagctctagagtgtcataccgcgataagttgttctctcaggtgtgtagtatgctgccgatatttgtgctcgtctgcctgatagtcgtccacggcagccttaagcgcctctagctccatctgcatttcaagctgctttttcagaacgtcactccgttctttcttgacatcttcattgaacgagagcgacatactgaccgtggaaaacaagccgcgtgtcacccggaatgaaagtaccttaccgttcaacgcctgctgtagatcctcaaatttcctagtcgcttggccttgcagtgagatgatcttgtcgcacaacgtagccgaggactccatatcgtggtcccgtgcgcgtgtaagagttttacaggccttcagctcctgtatcgcactgtatctttccagctcacactgtttcagcctggcttggattgactctaggagatttttgaggttatcgcgggtggcctgcagcagcctatatgctcagcctcctttgtggattgggcaatatggtcacctcaccttcagttcatcattctcctttgacaaaatgcgcgcgttttcgcttgctatcccgcactcgatggtccggtcaacggccgcaagctcgagctccttagcattgagatccgattttagcgaactgatctccagccgtagttctacacattctgcttttttgcgtctttccgactcgcttagtctcgcagcttcgtcaataatgtcaagcagctgagtcttgtagcgcactatggacaaaatgtccaagcactcctccggttcaaacatcttgtctacaaccattttttctcctgcagatggacccaggaagaagccgttgctggcaagtacgtccacacaaacgtggcggagtgggcgtgaacactttttttaatcttggccgctatacattagggcagccacccttgtcgatgactatcgtcttccatagacatccgccaggtgtaatttcaattctctgatagctgccgctgttgttcaggtccgaaaaccggcagtagctacaccgcaagtagttgaaccctgtatgtatgaagatcggcaggagaaatgccgctctgtgatgacaccttcgcctccatcgccaggctgctctgttcagttgtgaggaaggatccgttacttacgcctttgtagccgttcctgggtggaggctgcggtagtctctttgcggagttcggggtttcacctgagtttttaggcaaaacaagagaacttgtcagagttcacgacaatgtggtgacgaacaccggcttttttggcgcattttacggcgcggttttgggtgtgacacgacattaggtggatacatcttgcgggacgcaaaaataatcagtggacagcaagtgcattccgggcgtgaaacgaaaataaaggtatttgtgtcaacccctccctagattgacgaagctgaacgtcatccgaacgcaagcagaatgaactagttgcatttttctgcggcgccgtgagaaagttggcgtcgcttttgtcgcgctcattcctacaaaaggcagttatgatggcagccaaatttagagttactgtggtacggccgttttgaggtcatgtgctactccgctcgacccttctgtggcatactagttaccatgaacgtgtgcagaagaaaaactgtgcagcttcattagcaagacattgccatgtacatgctctcgcgatggcattacgaattgttggtttggcgaacggtgttcaagtttcccttctttaacgcagaggttcgctcagttcaataggttcataactcgagaaaaccacaggcatcctcgagcctaccgggatagcaacgctgttgatccaggcctgtgccatctgctaggtgctgcagcggcatgttcaggtgctccggaaccaccgtttgagtttttcctttgatactgttcggaatggcgcagctcaactcgtcgtgaaggcacatatcgtgacaacgtttgctgccgggtagcaacatattagtggacgaccaaacgatgcgctgtttctttagaaaacgatcagcggctgacaagactggtggctgtggttgttgagactttgccatgctggctggtgagagagggtgtgcccggcgcctgcaaagaaaggaactactagatgacacttgatctacgggaatccctagaatcaacccttcctcacattgatattcccacacatgcctgtttttcgttgtggcaacatgatatcttgaaaatgcgatactatcggtgcattcgcgagttggcgcgaagcatgctggagctccagccaatgccaagcactgcgtgaacaggttggaatcggccaccaacagaaaaacagcaggcatgcctgtagcggtgatgcatgcaactcgcgtcgtctctgtcgctattcccggtggccgagacagggcaaatgaaacgaattcaagagttggtctgccagcgagaagctagtgttttcttgaacaactcaactttttgcgtagctaccccttgacatttttgaggggtggtggtgccgcggacgacgactttttatgggttgcagacggctggcgctgcggcggtttcgcttgtggacatctgattgttcgtgacattcatgaaatgttccttctgcgtttcattcttggcggcggagcaactgtgtagcgtacttgacctttgtgtattgcgctttttttcgttcaagtgcgaacgggtgcccggggtcgatgtcccctcggaaagtgtcgtcttttgcgtggtaaaggcaggagggtgtgtcctcctgtcgtagggagaggtagtcagacatgttgcgtgtcttccttgtctcgagtttccttgccagcctgctttggcacagacacgcgtgagaagcctcgctggccgcggtctacttccgcatccgtagtccaccatgtgatcgccacatggttccatcttctcgctgctgagtttttttcagtgttctctcctcgtgtatcgacgaccgtgtttcgcttcggctcaggcctgcgtctgcggggacccggctccaccccgtgaaggcttttcttccgcagttcttgcgtgtccgtccctaccccggcgccctcttctgggaaggcagatagcaactcaccgcattcgctccgtttcgcca

SEQ ID NO: 2416 - DNA, 1404 bp, Toxoplasma gondii
  source 1..1404: mol_type = genomic DNA
gcctttcagcgccctgcggcagggagaaagcttttgcactggcaaggagcgcctccctgccggaggcggccgcgaagagaacagcgcaggcagacgttgcttcctgttctgcggacctcggagacgaagagaaggcgaggcgcctgcgcgcgcggctctggcgctgatgtgtgcaagccttccgagcaagaaggcgtcgaagcgaatgtcgacggtgggaagccgagcgattggaggaggaggaggaggctgaagtccctggcgaggcgcgcctgcccgcagttgctaccgagacggccctcatcttgctcgactggagcactcgtgagttgcgcgcatgcagcaggcgaagagtgtcttcactggaggatggaagcgccgtagtctggggacggatacactcaggccgcagtctccatcatcctgcgagacagctgcggcggtcctccctcgcacgagcatgcggcgagtctcctgcgcttctggagaagccgcaagtcacctggtgatcgggaacgacggaagcaaagtcgaggcggaaaaggcgtcagggcagcagaggagaagacgaccggcgctgttcctccgggcccgcgaaaaggctgccgccgggaaggagggggaagaaggcggagaggaagagacgaaagagacgaaaaagacgagaaaaagaggaaagaagaaaaaagaaagcggcggaaagggagagaagactctcggcaaaagagggcagacaggagtgtgaccagcagcaagacaccgaaatgtgatctccgcgaaaacaggtccagtggagagaatcgactccaccggaggcagagagacggcgaggaaggcagcgggaaatgtggattcttctgaggcgagtttcgccgttcggcaaaaaacgagaaagacaagagtccgggggtgtgctgtttccggaaggggagagacagctgtctctcgcatgtctctcctagccaaccgtgtagggtctcgcggcgcgcaacacaggagagacactctccctcgccagtgcgtcttgtgatgcttttgaatgacagtttttcagcctgaagggagtcgggccaagacgctctgtcctcgccgggcagagcgcggacgcctgattttttcgttgtttctgccgcgtgcatgcaaccgttttcacaacgtccttttcttcctagggaaaacttctgcgccggtgaaaaaacaagcagaagcagcccccgagagaagagcgcacagagtacaagaaggggcccgaccagagagggcaagcaaagaagaggagcagagagaagaagaaaggacgaagaacagagagagaagtagaaaggacgaagagcagagagagaagaagaaaggacgaagaacagagagagaagaagaagtctggggagcacgagaggggaagga

SEQ ID NO: 2417 - DNA, 4098 bp, Toxoplasma gondii
  source 1..4098: mol_type = genomic DNA
agtgcaaatgacgccatagatgtacttcgctgcatgcgttggagagttggggtcgttcacaatccgaacgggagcattcgtgcccggcacgacgccgacatcgctctgcacttgtactgcagaaaagcacacgattgagagacattcgcgagttcgaaagggcaactttgtggtctccacgggttgcgaaaccgatgtagaaaaagttcaccgtagcaagatagtgaaagccacttattttagccgtctcaagaagcccagtggagtggtggcgcagaaagcattcatcggtggctgtcgctagaatcccaacttgtggtgcactggaccgagaaacctcaagacgctcctccgcttacatccagagtattcccggaagtcgaatagggcgctttctccgactgcagcagcttgtttgaatgtatcgctcatctccttgttcaggcacatttggttgaaaacctgccactgggactgatacatggagcaccaagtgcgcacgctgtggaaggtgggggccgtcatctccacaacctgtccgttggttagtggggtcatcgcctgaaaaaagcgagcgtcggacaagccgaggttcatcggaatgttgatacctttgcttcggcctctcttcgaatgtttgtgaggtctgccattacatgtcactgttttgtgtcgactccttgcatgtcacaagctcgcgctttcagtcaactacctgccccttccgtaatttccaccccgcatacacgcacatgttcctctgaagctgagaaacacttgtcaaactcgactgcactcttgaagagttcgtggagaagaataccgcaagatgtagaagggaacacgcagagtactggtgaaaatctaagatctatgtcagcttaccccaggccgccaagtctgtgtccgaaggcttaacctggccagaaacagtgttcatctactcccccacacagccagtctcatccttctcgtctaatgaggaaattccactgtctctgagaacatggtaactcgttccgccgggacgggtcacactcaccgtggcagtcggggcttggagcgcgctgtcctcccgcactgctgcccgcagggccagcgcgtgcccaaggatccgccagcggccatcgagaacagaagcaaggaagacaaatgtgagtgaaaagaggagactgaaactcctagacaagtgtacggttttctgctccgagtgaagagagccactcggtgggcagcggctggtgcagccgcggcaaggcgtggtagcgctagccgcagatcccattgtctcaccgcccgagaagagacgttaagtccccaaagaaacgggggaaaacggttgcgtcgggatctacagacaaacctcgagaaggcagcaattcaaaaaacgcacgacaacaaagggtaacgaaagaggagtgtcgggccactcgcgagagagccccaaccagcttgcagaaatttaggtcaggccgctggcaagacaagcgggtgaacctgtttgcctcgttgctcttttttgcggaaacctccgcgcgaatttcttaccctcctcagagaatcaagacacgaaacctcaccgaggcggagccgttcttcccaaagatacaagccttttcccatgggcagaccatggcaaccacgcttgctaactcggagccgccagccgcttgtcgactgcgggcagcgcgcaataggccatgctggaaacggcgtgcatgcgaattatttaccagcagtttgcctcgccaggaaaaaactgggagtgccgcgtcaacgcggagagacacatcgagaaagtcgggggcgtctaagcgtgaaggagactgctgtcttggtaagttgggaaggtgatcgtacttggtgcaccgtttgtggttcaagtgcgagtcggcataagggataaactaggatggttatgaacgttccagggggtaacgaggcaaccagaaagacaccgaaagcacaaacggcgtacctgacgcggcgttgtttatttggtgcctgcttctctggcgatatcccgagaggcatgcacgacaacactacgtacagtctctgaaacggtgaaaatccacgttcttcagttgaactgtttccaacgcaaaacaggtgcacgaagcgacatgcttctatggtcgaccaccttttcagtcctgaaaagccatcgttctggagagaaagctgtactgtggataagagcacacgttgaggtaccccggtacaacagcagcaggagaccggcggaattctgtgaccatttgacttgcgtggaccaaaatacaaaaccttacccagcgtcggcccgtagcgaatggcgaacgaaactgacagcacaattgaggtatacccgctggcagccggtgcaacaaggtgacagcatgtgtccgtccgggttacgctacacccatgcgtggagggcagtcctcatgtctctctaaaaaaagacgttcagcgctattctgtgtaaagggtgacccagaaggatttggaggagtgacccgggtactctattaggatgtgcagagctaaaccacacacacgtgccaccataaacgctggctttgaaatccgccattttgagttttcctttattttgtgctggtgtatcacttgaggggcccaagggtatatgtcttgtcttagatctcattccccgcacttcgtcttcaataaagatgttctctattgataggctccttctgcgtcggcctctgcgagcgggtttcaccagtggtcagcttcagagagaacggaagatgacataaccggcttttcccgaagccgcgatctacttgctggtggacacgttggtgccagctcaaagcggtcaacttgcgaggcacagtctcggaacatggttcaaaatacgattcacgtgacacaaacgcactttttaataccatcccactcagtccaaggggacgatgctaccatggcaccacaccgtaattcgggtcagtcagaaatcgtagtacaagacacgccaagcaagagaattattcttgaggctttgcgtggaagaggcggccagccagtcgcttcagaactgatattgatcttgttcaggacctgtctggctgttctacactaacttgccagtctcccttagaccgatcaaggtcaaagcgattgcttattatagtgctctctgaactgatgaaatgcggggagacgggagtcaacatcccaagttaggaagaagttccaagtcttagttcgtgcaacgctcggatatgggttgattttactgagctccgtgaaaacagaataacagccgttgtatatggtaagggcgctgcggaagcagacaatcagtagcaaatcctaactactccactgctctgctcttctcgcttcgtagaagactatcttgcatttttccttacacgataccaaacgctatttttgccgtttgtgtccctgttacgacaaccacgttcgcccacacaaactttcaatagaatggagcaaagcaaaaaaaccgtaccattgtcgactgcggcacaatcataagctgcggagttgagagctgaagtgtggctcgctaattctggttttctaaggaacatttaccggcgacagatgaaagattcaagcaatacggccgtactttctaaagcctaaaagcgaaaaatgatgttgtttaccacaatggcttatactataacccccggcggtaaaaccggatctcccgcagtagtgcagatggaattgcaggaattcgacatcgtggttccctcaaagactgtcattccttgaaaagagtcacgacactttcctccttccctgctcccaccctccactaacggtcttttccctttcggggtctctcttcactcgaaactagcagtgcgggaatattgccggccagggtaatcggtgtcgctgtgatcaacgacgctagcgtctcacgcgcttcgagacaagctgtgtcgagcacgtctctgttttccttgttcgattttttcatagaggctaatttcggggcatcaagtccgttttttgtgttcgttggccccgcagtcgggagttactagctgagtgacaccttggcatggtcaaaaagaatctgattcggtgcatcaatatgcggca

SEQ ID NO: 2418 - DNA, 4103 bp, Toxoplasma gondii
  source 1..4103: mol_type = genomic DNA
tggtggccattttgacaggtcgatgctttctagtcacaccgtaggaacccggcagagaccgaacgcatctgtgaggcgttcgattgctagtctgggagcagcgtgaactggcgtattcctgaagcgaagcaatagaaagaatgcagcactgcgggggcgtcacttcttggtgtgccgctcgtggggcgaacttgtagcgatgaacagaaatgttgcgtctgctccggttgcgtttgcgagctgatgaagaggcagttttggtctccttgattctggcattccagtgtggaacacgaaactgaggtatttcgggaagctgtccttcactggtggaatgcaggagatgctctcacttttgaaagcttcctgccgatactcgtttgatggttcaaggattaagagatgcgccagtggctccaggcaaaagctaccgtggtgaaactccgtagtcggttagagcatggactattggagcactgcatgttacatgcgtaacaaacaagaaacaattgattactcttcgtctgtatggcgtctgtgtagacatcgtgcacgggcatacgatatctcgagccaccgagtttcaaaggaaggcgttgcacctgcctgcacaatggaagcggggtttcttccatgacactcgttgagcgaccttcatttcactgctggttttcgtgccgctgagaacatgcacaagatccatcgttgtatccttgtagtaattcgtctgtccaagaaaggacctcggttaagctggaaaggtgacacccgcacggtaaaacgtgcctgcgttcgcagttgtagttgattccacacgttttcaggccgaatgtgtcggaaattaccgatgaaaagtgtatggggcaagcagttgatggtcgaaaacatttctgtctcaaagagtcgaatcaaacctgtcgccgctatatgctgttcagtgagcggtggtgaccaccgcgactccccgtttctgtataagtcatccagagttccttcgacacttggtcatacaggaataagcttagcatttgcagacttacaatcaacaccactgctgtcggtctagtcgcatcgaccatgatccatggcggcaccttggcaccgcaacataggtattgctgatgttttttgcgcagttcgacggcgaagcaaatggaaaatttcacgtctccagctcgttctgctggttcttgtcaccagtagccactagtagcatcctagtctaaatttcgtcgcgctttttgtagatcgcacgctgttctctgtctacgtggagggagacagtgacatgtcgtttcccaaaaggtcttgcaactcatggtgatttgctgattttcctagagtcgctgtccgctaatccaatccctgtgcgtaaatcaccggactggaaggaggacgacagacagcggggcacaacatggaacgaaaggacacattcagcaggaacagccaggtattccgtgctaagcatcccgtgagaagtggtagtaacgccactgcaaggaactagtccactctaggaaattcataaatagagagcaccgtgtccttgactgagttttaagaggacataaatcttaccagaaccacaccacctttgcaccccgcggccgtgttcgtgtaaccttatgattttgtgctcgtttccgacacttgccaagccttgtgagttctgttacctcagttcacctccttccttcggttgttccactttttgagctggtcgtactgaagtgaggatatacccctcgccgcttcagcagccgcaaccgcagcgactaataaaacatgctgtgacggctgggtaagaatgaaacatttctgttttaaccaacactcctcttctcacggtggcaccgtgtctgtttctacgcactccaaacatctagtccgaattctcggcgacaacgcgtgtctgatggaactcgtgacttaggcgaattgtacaccacactttgtagagcactctaacgcgggttcaacaccaattggtgtccatgtgcagaagatggggaattaacgttgccccaagaatggcaaaactccacgagagcacactagatcgaaacattgcaccctctcgatggtgtcagtccctggttcacgtgcgtaacaacgggttctgatgcatggtctacgccccttcgggcgcagcccgatgtagtacgatgtcttttatgctgaaaacgtgcgtatttgctgagtggtacgctttcaattccagacgtgttgtcatttttctgtccgtttatcggcatccccaatatgaacggggcagtgaagaggtcggagacgtacccccctgcaatttcttggtgagctttcgccacgagacgtgagcttgcactccattttcccctgccagtcttgcggggtggctagtttacaactttcgttaaactcttctgtcagtttagaacgctccaagaagaattcactgtgaacgggactcctctttttctctcaagtgtcacgccttttgagtcaccctgcccagccgtcggctgtgtgttcctcgccatgtggttgtaccactccacaacgactgcgcaaggccttgatcctgaagttccagcatgcgccattcaagtgtgctgtaaaccaacacatgtatgtgcgcaaggccttctagcgtttgcgcccaagttcctggccaggtgcgtagccaaaactcatcaggaggggaagtgtggaaacttggttcgcggcttcagttcttctcacgccgttcgattttttcgtcgctttgattgagtagaactttggaaagtgtagccgttctcggacattcgtgcaggaaactcgtggccctcgaaagacttctctatccaccacgccaggaaggagcgctgcgtcgccgcccctctgttcagtgtcctctggtccgctgctgccgcgcgtgcattctgcgcttgcgccttcacccaaatgtccacctcgtaccaaactgccactcgtccctgaactcgaaggcagtagagcgacagaattttggtgtgtgtccggtcaaccgagataatacgaaggaaaggcaggaagttcaacggcatgttgtgaacggtcttatcagtggtaggcgtggcaaaagctttcgggaacggaggagccgaggggcatctcaaaaaaagcctgttccactacatcgcacccctagaggaacgaggagggccgtgccccccccttgcacgtcaacacagttgttacggtacaacgtacacagaattgccgtgtccgtttatgtcttcaactaggtgtctgtgtttcttcaatattctgtcttccgtccaacggttttcaacttgccgctgcgaagaaggccgtaccgctccttagcaatgcccggtcaggccacgcatcgctgtgtcctcgtgctttagtacctaccttctcagggtaaatcattttccccaaagtgactccattcataattgctgttgccgagaccagaatcttagcccgcggtgcgtttcgaaaacggtggccccaagcgtccctcaagtcatctggccaacgtgttgtgcttcaaaaaaaggcgccgcccccgttaaaattcctcctttttggattccacaaaagaggaagatgtgacgctaggacgtgcacccccgtgtgtcgtgatcgccgtgtgtatacactcgagtctgtcagttaagaaacttgcgcctgctcatcatgtgacacaccgagacaaccgacgttctcggagagccaattgtgcaccgaggtgaattcccttgtgttcaacagggcgaaaactcagtatttagtggagcgtattttctcggcgtacgaaagtgttgcttgtaacggctagctctccgtcattgccggttccctgcatcctggcgttcgcgtgccacaagaggtgctgtgccgttgtgcacgctttgcagacacgcaatggtttctgtctgttcatgtccacaggatcattcccgatagactgctccgcagaaggccgtctccacatctggaaggtcttccgctaatgtccccgcgcataggtgcagcttaaacagggagttcatcgtgctcaggcggcgcgactgctctaacttgctccactttcgcctctctcttctccgtaatctatcctgtagcca

SEQ ID NO: 2419 - DNA, 1904 bp, Toxoplasma gondii
  source 1..1904: mol_type = genomic DNA
tcaactaggcttttgctgcggataggctcgaaatgatggcttctctcaacggcaggtaaagcgcgcggttcccttcgacatgtgagacgccaccccaggcgcaatcggcggaacaacgaagcagagaaaataacgtcggcgaaaataacttctgcagggtacgaccaagacggttgcagtgcggcatacacgatgtgtaacagatcatacaggaggaaatgtgaaggcgagaacgtcagagaaactcgaaacgtggtatccacaccttaagagcctctgcccggcctatgagacgctcctctgggtggctctaaacccttccatcgagttgagcgtgcagacggaacggcaagtcttctaagtcacttcagccaaatttgcgtggactctccatcacctgtgcatcttgaaaaagtgttaacgtacttcggtttacgaaagtctccacctcactggagtagacgaaattcggctcgcgtttgctctctctgtctgacgcgaacatgcacgggaactttatgccgtcgcggtagtcgaaactcatcaacaccgcgaagaagacaacgaggcaaattgccaaaatggcgcattcccccattgttcgcaggagtgcaggaaactccaccgcagagagacggatgccggcgagctgcaagagagcggtgttgcacaaggttggtggtcgacgccgaagaagcgagatccctcgtccccccgttgaacacaaatagcatatctgttcaacgtcaggcaagcttgcgtcaccgccaaattgttgtcactcaaataagattcgccggagccatgtgccatccagaactgacttcggcaagagttcaacccgagaatttccgcagcaagcacccgcttgctcgtacgacaaaaaacagagttgacactctcaggaagacggacggggctatgaatgatctgtatatcgactttagctgaatgattcaactgcatgatgtggcatcaccgccactacgccgcaccagtgaaaagtgtatttcgcgacgtttctcccgtacacaaggaagaagaaaagcgcaatttcccaaatttaccctgaaaagctgagaggaaagttttcctcgagaaaaaaagtctccagtggcggtgatctctcacgaaaccaaagcggtaaaccccgaaacgcgaacacgactctgccccgtccctgtggtcgagcagtcggagcgctacagttcccgaagaaggcaaacgatggcactcacaaaatgccagagaaaagaagtcaagtggtacaccttcgctccagttaatccagcagtgatgcgcgtctacattcactcctacattttttcgacggcagtgtcctgccctgcgcagctttatacagcgagtgtgcagatgcatgcgtggtacgggcgacgtcatgcaggcgcatgtgaagaaactgctggaaaacgactaccgaatccctaaaagtcagcaatgatgttttctcgtgaagattccctctttccaggaaatacttccgccgtctgtctctatcctggggcgtgtcgcttgggtggtcgatgtattgtcgcgatcggaatgaggtacgataaccgattcgtagctgaactggtttccgctggtcaacgccgtttttgtcggtatgtgttgctcgtggcttgttgacgtctggaaggaaagaagcgaactgacttgcaaccgacttcgcgtgacgacaacgtggacagattttcaggggtcgtagaagcttgaatgcgttcatacggggcttttgtccctgaggcgctgtgaaagtaaagcgttttaactttcgtgtcagcaaactgtggagacgcgaagcctcaaggggtggagtagggtcgagggcggtgtgctgccaccaccgcagcctcgcgtgtcctaaaagtttgtgtccacga

SEQ ID NO: 2420 - DNA, 1948 bp, Toxoplasma gondii
  source 1..1948: mol_type = genomic DNA
ttattgtgcctgagttaatgttcaacgtgtagctagagaagaagcagcagattgtgatttcaaactggtgcatgccccaattccttcgtcctcttgtgcttgcccctgcgcagcacccgagaactctatgacgttacagttatttaactcccgctgggatgcgtctctttggaacatgctttccttcctttctctcgcgcaccgtgtaggcctcatttttctttccggagacgatgcccacaacgacgtcgccttctacaggctcgtagcgtttctggcttccccgaatatatgacggagaatacggatagagaggcgagctctcgacaaaggcacagggagcagaggctgtgagttctcgagaccctgcagacgcgcagcgtgccgctgcagcgacaggagaagagaaatcaaattgttcttctacttgagacaatcgctcgatagcgcgcctcgactctgacggagaagccgaggggacaatccgaagcaacatgtctccgggcaaaaacactgcaggggaagatggacctgaggaggcccccgcaggcgtcggagccatcagaaagcggaaaaaggagacagagagacaaacaccgggagggcagacgggtagggcagacgaggaggggaagtcaggaggggaagtccgagaaatcaacagggtaagggagaggtcaagcagcacagcgagagcgagagagacagacggtgacagacagagaggtggacgagagaaacggcccaagcaggagaaagggagactggctaagacgaagagcagaggaaggaaacacgaaaagcagcagggtggttcactggaggggcggtagcgaatcaataggagacacgaagacagagaagaaaaaagctgaagagactgtcgtagagataacgagattattctctctttgccatggcgattcacgagggcgtttgcctttgcgataggaaacgagtcaacaggacgagaaaaaaggcgcttaaaaggtgaaggtaagcaggggaggaaaaggagactgacgccaaaagaaaattgatgctcctgggtgcgcaacttggtcgaacgcctccgttgttgggaaacactttcaacaacaatgaaaagcatggggcaatgcgttaaacgcagcacgacctgaaaaacctggaaccgtgcctgtcgagaactccatcgagaactccatattgtggagtggcgcgatgagtcgccagaaaattaacaaacttaaaaaaatacgttttccttttctctcagaagcggagacagaagaagcgctgcctagaagccgtccgagcgaatgcaaatcgcggtagtcgcgcccgcatgcggttatttccatcaatatcgacaggagacaagaacatcgagatgctgtctgccgtctcttctcgtctgtttcagtcactttcctcttttctcctctcacctcggattggagcgcattcaaaaactcactgaaaagagatcgtctcttcgccgtaccctcgcggtgagagagaacagcgataactcgtaggcaggaagaagtatgtttctcatgcactttgcttcggatttcttgttccgattacggtgtgtcgattgccgctcgtggcttgacctagtcagttcgctctctcttcccctgtttttccgactctctgtgttgttgccagcaacgtcatcgaacgcatcttcttcgtctctgggcggctctctcgcgctgccctcagtctctccatcttcgtcatctcattcagaggaaagagaagtcactttttcgcttgttcccaccctaccgtctctccttccaaatctcgacgaagccatctttcttgtctccttgtttgttctcattcttttcttttcgtatccttcctctgtctccctgccatccttcctggtcgtttctgtctcctccctcgtctctgtcttctctttcgacttccagcctccctcttacca

SEQ ID NO: 2421 - DNA, 1865 bp, Toxoplasma gondii
  source 1..1865: mol_type = genomic DNA
gttattgcacaagctgtcgcctgcgtctgtccttctccagaaaacgcctcgtcgcgcttccactcttgatgcagggaaagccttggcctatttgccttctctcgcaggacatggacgcacgggcatggcggctccaaagcttccgctttcgatacccaccgtctctgacacgaatcgacagagcacatgagctgctcgacaggatggtcgggatcgtggtacgcgttctcgtcacagaactccagtctgctgctctttttaatcacccggcccctcaacgactggccacgtgacacgcttattgccctagacacaacaggcgggaggcccggcgccgcaagcgtgtgttcatcgtcgcgagcaatccatgagtaacagcccaccgtctgtctgtcgctaaagcatgccgaaaaacccctttcacagtatccagatccagacgactttcgtgaagacagtgctcctggcgtacgcagagaatcctctatgcgtccaatgctatcggcagatatcgcgaataaacagtcgcctatctcggccggcgcggaagacccctgcatgatggagagaacctgcagtgactagttccccgggccatacaccgggggcactcagacacgtcacaagagaccacctagagaaacaatgaggcaaaaaagcaagccgcctaaaaatcgcatgcaaaatatttgtaaccgtacgcatgcctcgaagtgtttacacgcgcagatatgtgcgcgcccttcgtgtacatgcaactactccctcggatgtaaaggaagcttaagtacctgatcatcccgaccggctcgctgacgcaaatggttacgcgtcggaacgtgtacacacacactctcctgtctgacaattggggattttgtgaaacacggaggtcttctggagcgtttcagtctctcagcgttgccatgttgcggtcgcgcgtttacacagctgaactagaagcgccgacagaggctggatcgggtaaaaagcgtcagcgttgcaacgtggtaaaacagatccgcgactacagggttcaatgccacatacagcagctgcttgtgactgtaaaaggagaaatacgaaaaaacaacgaagcgcgctctcccaggcacggagttgtttacctgtccagcacgcgcaacaggatgagaatccacgcctgtttgcaacttttaacacggaacacggccttaaacacaaaaggaaacaaggttagatgctgcggtgaatcaaacggcgacaatcggtgacacgagtctaagtctctaacacacccttcacctacgactgtccgaactatccagggtctcaccggagcatgcatgcaacctgggtcgataaatgccatcctgaggaccaatgttctgtctctggttagaaagcgaacctcttcattctgcgtgagaagtatcttcactttagtgaggaggcctgtatttcacgcatccactgagggctctttttttgtgtggtgtttcccgaacttcgcaaccgggagagcgcaacatccgtggacacctgccgcgtgtctctgtctccgcagcctctgcggacgccctttccgggaagcggctcatttaatacttcccatcctttgccgtacagtgacctgtatgtctcttatgtggcgagcctttcacataacgataatatctaggtgatatatgtgccactcagaccccccgcgtttctcgtttctcgagccactcgcggccagacgctgaatgggcgcgaatatctggccgcggtcaagcgtgtcgagaccacctggcggcgactctctgtttgttctcgacgtacaacttgtgttgctcccctcgtaactctctctgtttcactgcgaaggtgtggttctgtctaca

SEQ ID NO: 2422 - DNA, 4548 bp, Toxoplasma gondii
  source 1..4548: mol_type = genomic DNA
tagtattcaaaggaacgctccacgaagtatatgtacagcagaggaaccaacagcatgcacagccagtgcatcatgaccatggccagcaggacgctgtgcagcccgacgatgaacaagatcatgcagaagacgggcgcgaagccgacaactagcaacacgggaattgagagagtcacaggtgcagttggggcaaggaaggtcagccaagacccggagcgagagaacgtcggggggggcggagagaggggcggagagagggaggtgtagtggctgcctgcgacgtgtacctctccgggagtagaaggcgtctgaggccctgcctcgccatccgtcgacggcgctgctgtcggccgcactgaagcgcccaaccccggaggtgatagaggaggtggccgtctccagtctccgcagcacgctgtgggaaaagctggcagcttgctccatacgcctgcatctggaagcgaatcctgaggctgacctggggagccaaagagtggacacgacacacgataagatgtgcagctggcgagaaaacccacttgcgtcaagtgtggttacccgctccacgaccgtccgcctcttccactcccagatgtacttcgatgatttctgcctctatttgtacgagaaggagtcatacagccgagcccatgcagagagtggccgtcgactgagagcactcacactcaacatatcgcgaaggaaacccggaaaagtgaacaagacatgagcaagctacctcacacggtttgtacagaccactaaaggcggaacctgagctcctatgctcgagtcaagcttgtgttttttacctgagctattccgcaaggaggcccgctggttcctcatcgtccgaagaccccttggacatcgaacaagcgaaatatgtgggcaccatcagtctgttcttaccgtgtagttggggctcatccgcaccttcagatctgatttcggccgccatacttttctctatagtctggggaagacacacactgctcctgaagcgcagcgacggtaaatgacttaagagggagcatagcttgcagaaaactccgtttatgtgatgcagagatgaaagacaaacaccagattcacattgcattcgagtacgggtaacgctgccttcctttgtcaattgaaagcctgctcgttagacagctgaccatcagtggcatcgaagaaacatattcaaacagtagtgtgcatttcccaccgacattcctcagtcgtgaattcacaggtctcatcccctcgtgttctgttgggcctttctgcggaaaaaggctggaagagatggaaagtcgcgcaaatggaactgacggaagggcagaggcctacaggtgatgacgcacaggcgagattcgttcggtaaaaaaagcagcttgaagaggtcactttgtaaacagaagcgccctggatggaagggagagctacagaggctaggaagaaaagaaagaagaacggacgggcacttgagaacaaacaaaaatgccgcctagcgcttgacccgaccgcacagggagggacacggccagtgtgtgccggatttacccgtttggggaagagttcgcatgctcatcgatacgtttttgattcggttattccctcagtctgtccccagagatctcggccaaaaagacggtcgctggttgccaccctgagtctgcacatccaagggatggcagacacgtgcaacgacagtctctgtgtggacggaaaagccacgagatctgtcgtcattgaagaaaggcacttcgtttctccccagaaggaaaaaattttatagttcccaataaacagtgtactaccatgcacaaatagaaaagttcagtccgtcagaactgacgtgaaaaacaaaagctggacggtgccgcgaaaactttgcgacgggaagagacagatccttctgaagacgattgaaaactcaggaacaactatacataaatataaacaaggcgcgagagtgaataagacagtccattcatcttctcctctatatttcttccccgttttatgctactagctgacccagcttactagtccattctcaggttgaacggagtatgccccccaaccgccctgctctctgggttcactgaaggcaggcgagtcgtgcccaacaaggtgtggttattcgtcattttcggagagcaagttctcagagctcctgttccggaagaagcagctgtttgcgtagggacatatctccaagtgggaatgagtaaattggaaaggatgcaggatatagacctccgtcaccctccgtcacccagtgctggaacggaagctcttcttggagatcgacagacccaccctgcacgagacacgctgcgctgagtgttttttctagatcactcctcctccgctgattgatgaattcgatggtgtccatcacaatgccgatcacgcttgcgaaggctggtaaagcaattcttcttggggatctgcacaaggtcctagtagcaacgtttgtcgttcatatcagccatgttatgctcatctaacccccagtgcgtgcgtatattttttcgtgaagggaaagaaaggcggattacgaagttgtctgctcacgtccaactgacacgcacagcctcccttgtgtaagaaaatggttgcttcacggtactccccgacttccgaaaggctattgagtataagaggtcggatcggccgacagtcgactcgaaaccattggctgaaagtgtgtcaaaaaatgaaggaaaacattttgaactgtggagcttctggttgttatgtccttttcaattcatctatttcgtgaaagaacaactaggcagtgaccaaaaggcccacgatttccaagcaattgccgtggagagttcgcactgggtgttacgcagacgccctcttccagggtgaacaccctcactaaagcgtccgtatgcatgtgcacttgtaaacaacagtcgcgtttccagtatcgaaatcaggttcccatccccaatcctatttgttgtgaacaagtatggtagttttttcttaagaagcgtctctggtgcgacatggatcaggtcgatttgcttggcaggctccgggtcgatagtgacgcgtaaatttgccgatattcggtttgtcagttaatttccactcgataatgggtttctacacatttggcaatgtaataggtgtcctccattgtcctcaggcatccctatttgaccaaagagtttctttgttggttgtagagagaactgcgttgccatctgccctggctgctgagtcaatctactgtttcggagaagtttcccttgtgtatacatcgttgtccgaaggcagcagaatcactgacatgcccctatctttccaaaatgcgcagcgtcatgctacattcaaagaagatcatgttgtcccgcgcaagtatttctttggagagcacctggggagaagcatcttcaaaaaacgggggttttcgatgaaatcctgtcagtccgttatctaaattgatgaatagtaaaacacatcagttgatccacaccttcacgcacactcgaaaaatgtatcctttcgttctggcaacatgtgattatagtaccttcggaggtccaaaaaagtgtctttaccggcatctaagagtgctgtcggtggcgtacgtgacactatcgagaaaccgtttctcaatcttgtcttctttttgaatcaacccagcctgtctcccaaggaaggaacgaactctcttcgacggcttcgcatctgtctgctttttctttcgtcgtgaactgacagtttcattgacttggaagcttcaaggtctccttttcgagattacttgcccaaacccacactaataaatttgttgaccctttattatccacatttttaggcgaaacgcgactctctttcatgagtcatgccctgagttgactcatgatgtctaccacgtacatcacgccttcatacactaagtgcggtcactcttgtaaggtaatcgacaggtacctgcttgtcccgagcttttgcagatgttaagtttcgagttttggcttgtcttcttggcaccatcgacagctcctctttccagcgactaaagaagctgcttctctgtttgaacaacggaaggcgaatggcctttcggctttgtgttgacaggcagatttccagtgaactgaatgatactggcattgtcagacaaatttcagacgtaggtgggtacagtactcgtatgcactgcggcgcaagacaggctatatagttacagacacaatcatacgcgcgccagactgtgtgactgggaaatcttcatctgctgactgaactgaaaaacattcatatggaactaggtatgagtgagtgagcgtcgtctgttgtacagaggttggtctaccgcaagtgagcatattcacacgtgtgctcagagcctgtcgagaacacgttcctctctccatccgttcattcttcgtaacatctttcccacaccaattcgggtggtgtgtcccgttaggtgatctagtgtcccagtttcctgatcctacgcaaagaggatcaccttgtttgccgtgcaatttgttctattactgatcggagtggcca

SEQ ID NO: 2423 - DNA, 1549 bp, Toxoplasma gondii
  source 1..1549: mol_type = genomic DNA
acagggaacggagaatgaaggaaaagaagcgtccacatgtgagtttgtcttttacgatttaactctgagtcactccccctcgccctcccccccctccccatgtcgcttttcggtggaacgagtgtcgagataaagcaaactgctgggaaagagagaaagccttttttttattttgccgtcgatgtcaggcccagactttgcctctgagtggctttgtgttctcagtcgggtggggagagactccattgctctttttttggagggggaggggggtctgcaggtttcggagctcgcggggagaagtcttgcgaaggagttttcggacaaggctcgccagtttcttgaaggaatagggaaagcagagaggcagagacacggaagaaatgcagaacgcgtcgcttctcctcttgacgcctttgggcgcggtagaactttttcaacaatttccgagacaagtttccgagtcgatagacgcagatgacccgagccaagtggcagagtcgttttctgagagaattcaggtgcagcatggccttctttctttctttttttctttctttttttctttcttcgcatctcttatttcggctgaggaaactcttcgggtttgaagggctgcactgcaagcaaagccagttaaaaagacctacacatggatacctatagggatgcaggcacacatgtaaattcgaaagtctttgaagaaacatatatacatggacatgaaatcaaagatgcgtccttcgaggttcacacgcatcccgatctgcctattttgagttggaaacagatctgtttctgcgcatttcggagactcttgctaaaagatgacaaaaggccattgggagagccctcgagaaaacgggtggtgcctccacaggcctcgcgtcggccgttttctccccttcgttccatgtccttgtcgatatagtctacctgttccctgtttctcggtctcaacgtccctctttcgctgtttgaagagctctgtccttctgtcagccgccctcgttatctatgttcgtcggacttctctctgtcttccattctctgtctccgtatttctctatttctcgctttcaccactcctctcagctcctcgatctaaaattctctcccgttccttctctctgtctccttccttttctcgctgtctctccgtctctcctttcctctgtgtctgcttttccctctgccttcctttctctctgtctcgcgtttctttttttcgtccttccacgttgctttctttcgctttttctcttcttcgttcttcttctcttgtctgtttttctccgctctgctattggcctcctccttttccccgtgccgctttccccgctagccggctcggtggagacagggggggccgggggaggtcacaagctgtgcggttccccggtgtctctctgcatgcgctcacatgcggtcaagacagccgaagagaaaggcgacctctgtgtctgcagcttcttcgagtagtcagtatttttcgcgatttttcctttttttccaacgctggaaacgcagaaagttccaccgtcgcgca

SEQ ID NO: 2424 - DNA, 961 bp, Toxoplasma gondii
  source 1..961: mol_type = genomic DNA
caaccgtgagaagattgaaagctccagagatgcagtgagacaagaaccatggagggaagacacaggttgaaagaagagaaagtgaacagaggcaagagagaagactcacccgaaagattgagtctggtaaggagaagcgagggaaactttgaccctacgattccgcttggcttgtgcatctgtctgtccaatgagctcgaggggaccttgtctcttccgtttctgtttcggcgcctttgtctgctcgattcccttgcatgcagaagccttaccaccccctgagttcgccttcctctggaggtgaaacccaccggcgttatccatcttgggcgctggacacgatacaggccaggcagagggaaagaacagagaacgagagagagagataggccagcaaagacgagaaaagacgacaaacgaagagatatgaagaaggagcagacgaagaaggcagatctgaaggaagcattgaagaaaaagttccaaagagaccgaggcgagaaggagcagaagaagaaagagacgacacaaaagcgttaggaaggaagagataagaagaaacagatctaaaggacagtaaacaagcaggtcgagggagaaggatgagcgtgaggcagtgaagcagactggtttctccgttgtcgacgaaacgcagggattcgacaagcaaatggaaggagacaaaggaagagaaagagaacgaagcctgaagaatgcacaccttcgtaagagacctcgatgcgttggctacgcctgatgtttctatcgatttcccttgatgcgttccacgatagtttcgcgtcttgtccaccggaaaaagcaggcgccaatctcgaaagcgggaagagaaactcatgaagacgttgttcctttcagcttttcttccgccgcatcttctctctgacctcatctacgactttcccggtctctggcgcatgcaaacaatcatttgcggtttgca

SEQ ID NO: 2425 - DNA, 1746 bp, Toxoplasma gondii
  source 1..1746: mol_type = genomic DNA
aaagacgctttacaaaggatcttgtttccatctttgcctgcgacttccagacgctgtctcgacgtctcggaagagtacgactcaactgggttcctcccccggcgcatgcatgacacacgagagccggaagaaccgcgtttctgcgtttttcctcgagtcggtcgatgaggcgaagccgacgcacttggtttgcgatgctgcgtctctgtggaaaaggaagccacactttttttcgcagaaaaaacgaggtctccagaaactaccgagtcccaagagacccaacgtgcagctctttgaacgcccgacagagggccggtcgtttgcatgttccgcagtctgccgtcgtcatgcgttgtctaaacggttcagaaaatccgcgcgtggagcggcagagttgacatgaggtagcgcgactcgtcgtcttcgcttggaactgacagacgaatgctgagcgacttgaaattatctacgaacgattccacgagagagcctgctttttccacacgcaaccgcccagttgtttgactttcttcctggtaagaaatgcgctgattgccttaaggatgccgcgctgccggcaaaggagtgaaagcgagattctcaacagctctcggtgtatgcgacaagcaaagacaaagccagcagcacaaagcggctcttttgacgtagcggtgcctcgtacatttttctgcagctaaactgggctatcgtgcaaaaagagttgagacaggctacaaatgaaaacaggagttcgaccgcgaaatccaccagcgtacgcagaaacctttctcggtggaccgcgagaaacatgttcagcagaaaacggtgcgctctgcgaattcagaaaggtaaagagctgtgcgagtggaaagagtttcagcggaatcctgaccccccttccgcccgccactcctggcgccagtttgcccacatgcgaagattctgcttctttccagagggaagctgaaaaaccaccgcaacctcaaagcggcacaacagaggtacgaaaaggcggattgctccttctccgacgacgacgtccgcgcagagacgcagcagtcgagaggaactcgaaactgcgcctccaaacactgtattacctccccaaaaacgaagttcgaggcagtacaagaatgccctttcgccgactaagaaacgcaaacacatagatcagaaacaaacaaatatatatatatatatatatgtatacatatatatatatatatatgtacgtatttaggtgtatgtgcatgtgtatatgtgtgaatttttatatgtgtacagggcaaagaaatgtaggaacgctgaaatcttttttggggagagactgcagaaaacagacggaggaatcacacaccttgaggaaagaaatatttccagtgggtttgttaggcaaacagctgttctcttgttactgaaaaaaaaagtaaaaggagaccggagaacggtgacgcgtacaaacgccacagttttttcttgttacgctgcatgcgtcagctctcagcagctgtttgaggcttttttcttcgtagttttcgcttcgtcttggcaacgccaattttctctttttctctgatgtttcgccactttttctcaccctcatcgccctgccgctttttttccgatctccgagtttttctagaggcgccgtgtctccttcctcgcggtgttctttgcttctcttctcactcttttttcttcacatagttccgcgttcgactctttttcctacaaagtcaaagaaaa

SEQ ID NO: 2426 - DNA, 1058 bp, Toxoplasma gondii
  source 1..1058: mol_type = genomic DNA
cgtttgctctgcttcggaacagcgtcgaagtccgctcgcgacttttgtcggagttccctctcgccgcgctgagccgaacagaaggagagaaacctttcgagaatcgcccctgagagaagcgaggaccgcgccagcgtctcccggtggacgacgcgcagccatgccgtccagctgagcacctcgagctgtcggaaaatcctcactcgaacgcggtctctctgtctctgtctcctctcctcttgcttcgaaggcgacgacgacgaagaagaagaggacgcagaggaagacgacgcagaggagagagaagaagaggaagaggacgcagaggaagaggacgcagatgagagagaaaaaggggaagaggacgaagaggaagaggacgcagatgagagagaagaaggggaagaggacgaagaggaagaggacgtatatgagagagaagaaggggaagaggacgaagaggaagtagatggcccggaacaggcagaggagagaggaggaggtagaaaaggaagagaaaagttacacgcagaaaaagagagagagtcttcgctcgcctctggccgggagtgggcgtccaaggctgcttcaggttcctcctcagttccaggaaggagacctagctgttcgtcaagagaatcaaagcgagaagaagaaagcggaatcgaggaggacgaagaagaagaggaagaagaagcgcctgctaccgaggacgcttgtggaccgaggacttcgtcgccaagccgagggtgtctcgagtcctgctcgtcaccggtggagtggagcttttgaagaggcgtcgtttgttcggcctcttctgtctccattgtccatggagaaagtccggaaacgaaggaaagaaattcgccgagcgcctcgaggcgagaacaagaaagaggagagaggcgacgcgcggaaggacgcggaaaaggagcgacgcaaggctgagaacgaaggcagcagagagagggcgcgttgaggagaaataaaaacggagagaagaacgcgcaggaaaacggcaaagaagaagcggaacttctcacgcgcgcttctgtgca

SEQ ID NO: 2427 - DNA, 4355 bp, Toxoplasma gondii
  source 1..4355: mol_type = genomic DNA
cgacgctcttgcacgtgtcgcctggcttctgagaggacctgaaaagcctcgaccggagacgtccatcttctcagagagtgaagtttccgtgagaagctgccaaaccccgcgcgccttccgcaaacttgttgctcctcttgacaaactctcctccgttctcttgcctgcctttgtcagaatgcgcgaatgcacgcgagtcagcagcagaaagtggcgagacagaagcttagaagagttcagcagggagtcgtttgtttacagcctgtaccgtgagtttcaggaggatactgttatagtcgctgatctcatgtgttcacatcagtgtaactcaaatcgaataaacagacacattaacttgggcagaaagcgttgaaggacgtggtcgatttccaagtagaaaaaacagatcaaaggagctcgacggcatcgaaaggaagagtgaagttgtcttcagagctcctcgaactctagagagcttcgagaaaagctggaccgtgctaagaacaagtctgaagtgtgaatgtcacgcaggcaatccatttacgttctgttgatcgaatacacttcaccgctgctcacactcttgcggatgaagagacaatcagaaaggagttcctcaggaacttcttcggcacctcagctgtggaaaaaaaactcgggaagcaagacagttcgacagtgaagtcgacgacgcgagacgcgatggatggtgcagaaagtgtaaagctctttgaggggaacgagagacgcagaacgcgaaacatttaccaaaagcaaacagacagaacagcaaaaggcaaacgaatcacgaattttcgaaaagagagtgctcgcgtcttcatggctgccaagtcaaataacgcacaggccgggaaactcccgccagggtctactcaaagttgttttccttacatgaatcagggatcagcgagaaactgcagtcgagcaagaagcctgtcgaattaaatgagaactcatccatgaagaagagcgtttgctgcggtttgcatagctggttgatggaaaagactgaaagtgaccccaggtctggctatttacgagataggccgtgagatgttccacagctgaacagacagcgtgaaaatcgcgcctgacgagagtgcaccggagaacacggaaggtggacgggcaaagcaggcttttttttcaaacgaagaaaagaggaaagcggaaaagcaaaggagagccgcaaacgtcgaaaatactagccactcgcgcgtttccgcgcctcctgacacgtactttgtgaaaggcagggtggccgtcgaacacatcgattcggagttttcaacgcattcataaatcacccgaattctgtgagacgaaggaaaaacaagcacttgcgacttgctccttggcgttcgttttccaaaagtgttctcggaaagaactccgcggcccccgcctcccttccagtccttgcgtgacagcgcgtcttggcgggccgcatgtgcgctgctaaaaaaacgaggtttactcgactcagagagcaagtctattgaatcgcagggcgggcgttcgagaaaaaggtcctgcactggtgaatctggaagggaggggagttgttcaatttatccggcagagatatactgttttccttgacaggggtgtgtcccgctttgcttcccactgtcggaagagggaagccctgtatcggattctacccagcaaagtcggagaaaaaggtctgcagaaccgtagtttctcggataggatttctacgcggacagatgagttcgccgaaagaccacctgtggtctgcaactgacacgtgcagctgaatgccgcggacggcaactgtgagacttctacaggcatccttgtcactcctgtcggtttgcgtgtttttttttgtgggagatgaacacacaggaacacgagaaggccccggaattccttcagcactgctccgttttctccttttcagcttgttgataggtaatggtacttcgttaccacgtggaaaagtccaggaatcacctgttctatggtcaaaacatgtacgatggcatttcctggaaacatgacactttgttgggaactgcgcaactggagagctttgcgaagaccaggttgaagaatctcaagacagcactgatatagagaaaatgatccgaaacaaggtcttcgccagcagcatagactgtttgcaaacatacacatttcctggtcagggcgtttacacaagttcttggtttcagataggaaaaaaaacaacggaaactgtaaggtacgagttgtgatggctggtacagccgaaaacgagacattcctcagagtgtacagttccgtaattggcacagatgatccgcgttccagaactgcatgactcaaaccgaataaaatagatacaacgagagtggcaggaacgacttgcattgagtgatatgtcaacagttgtggcaactctcgacggatccgcaagacgcttactcgtagactgcggcggatcaaaagtacttgcttacgcactgtggagtccgcgttttccggagtcgccttcccgacccgccacaagaggttgctgtaaccgacaacggtgacagcgacgaaaacatcaagaagcagagagatgcatcaaaacgagcctgatggcgttgaagaaacagtttccggagccccgtgcctgtggactgggaaacacccgctcagggtaccctttgttgggaaacaacgagaggtacgtttctaagcagctttggtgcgctcacgcacctcacatacgactgccttcgattaatgaaaaaccatacagagaaacgtgtgaattgatgtgtttctgtgcctgtcatgggttgtgtgtttggtcaaaactctcgagctcctgtgtggtggggagttgtcacgcgtaataggtcgctattcgcattttactcattgttgccgtgagcactgctaagcagcatcgtgttagcgcgtttcagaacgtgacgggagtgtttcttcttgtgcagcgagcgtgcaaacggagaactgactggccaagccaggagaggtgcaggcgagaaagacacgcagcttctcacgacgctttttccgtaggcagccgcttgccattttcctgcggttgcgaacgcaggccgctaaaatcctcagttttctcagaggcaacttggtagcaggtcgaacacgcccggcgagactgagcgagttcctctcactccccaacacagagcaacaccgtactgtgaggcgtgcccgccacacacttgacagagctcttcgaagatgacgaaacacacacgttcgtgcaggcgcggctgccacagaagtgaaccttcatgtgagcaggaagtggcggttctcgaagacggcgttctgattgctgaaaagccacagttgtccatttggtagggagggaattcaaaacattcaaatgatcctgcgagtgagacagagctctggaacgtcgccgaagccacagggactcccttagagcgacaagatacttcttttgactctccggcgacattttcccgttgtggtgtggaaacgcgttttttgcgagttacttggagggccctacgaggtgcatgcagcagccgttcgtttcgctgagcgccaaaccacttggacgggctttttttccttcaacagacgaagcgctcttgcttttccggctgttggccgacatctgtcaaaagagaacgccgctttcatgatctttctcctcgtctggcgccacggcgccagaccacgcgcgacacaactcgtttttccctgcatgctctgaagacaaccggagactgcaagtttcttgctcgcgtgctcggccggtgaatgcatttccagttcttcattttccacaagaagctgctcgggtgttttctctacggttttcatggcggcctcgaactcgggatactcaccgtctctcgaagttgcttctttctcggaagttggttttccgtccctgacaggacgatgcctacggcgagacacacggctccgcgaatgttgagttggcgagcagagttttccatctccactgcgttccacttctggcttttccttgactctcgcgggtcacagaaacgcaagtccctgtgactgtcgtccgcgaaagtccggtcctgcggagcggagccaaactcacatttttctgcgtcggttctgctggccgccaaagtcttctgccgcacgtcgcgaaaaccgagctgtctgcacagttgtcgtgcatttctttgtctcttctgcggttgttctcggtgcatcgtttggttggtggattcgtgaacttttcttgcgtcgatctttgtcgggtcttcggcaggcggtgtctctatgatctcgcgtcttcccttcacgttgcctgttcgcagtttccggcgaaa

SEQ ID NO: 2428 - DNA, 4593 bp, Toxoplasma gondii
  source 1..4593: mol_type = genomic DNA
cacagttcacagagtgggaccgggtaggtggcctcaatgtacagcaccggcgccgtttctgcacagaagcgggcgtgaaggtcgaaccgaacagagtcttccctaaggcaccgagcccagcgtatcgatgagaggaaaacggctgagaactacaccgtacgaacgcctgtaaatacatcccaaaccctcggtgattcgtacccttctctcccctgctctcttgaactgtaaaaaattgcggatggaagaggtgatgttctggtcgctcctgccgtgacagtgtaaagcctcggctcctcgaatttaaagaaaatatggacctagggaaaacggaagatgatggggtagtgcagttgcgtctggtgactgacgaaacaccactggagcaggcgtatactggtgacgtagcacaggcaccggaagaagccacaacttttgcaacaagatctgcaactaaaagaaggacagtgaagccgaacaacgaaacgcagcgtgcacggacactgcggtggcagaggggtttgaacgtgccggtgttcaaacattgaaaccgtctcgcacgagtagcagcgtgtggagcaggaagggtgatacgcgtcgacggtgaagggaagctaaacaaactgagaggagtccacgaatagcacttcaaggaggctgtgcaagaggaatatctacgccgcatctgtcccagaaaaaaactgagaaggaaggcaacggcgccagaagccatggtggacaagatgccctggaagaaccggggaagcacgcaaagccaccgctgacacaaaaaaaaatcgaaataatctttcgctcagttgatcctgtgcggtgaattaggaactccggtcgtccgttttctttgtgtcagaatactcgcgcctcacagtcgtgatgagcgcctccggaattgctttgacggaagaaatcaccattgtggaccacgcggaaacatctcgtcaacttccaactggttgcgctgcggcatgaagacttcctttctcgaattagcggagagtgggcttgagtcgagccactttatttggagtgattcgagaatacgggttttttggcaggtccactcatgctcggcccttcaccgctgtaaaaaacgagtgcacatgcaaatcaagcgccagaactgcaggggtgacgctgatgcaacgccaatctgacggatatatcatctgatatcgggtcgacgcggttgccaccagaaaacgccaacagatgctgcggcaaggttacgccttccagcaccgcctcctgaccattggaatacgttttccgaagagaaacatgccacagagcatcttctgttttatgcatgcttcgtgggtgagacagcagtatgtagaacaacagtctcctgtggttgtcttgtgcatgcgccagcgtgtctccataagccagcgtcaatcaattgggcccgacatcgacgaaaactcacaacacttttagctgtcttaagcagtccagtggggtggtggtgtacagcaatcataaagaagatatgtaaaactattataatacaaccaataaaaggcaagataaaaaagtgatgcatgaagttgtcaacagttccagtgtgaaaacgtacttaaacggatacgagtgactcagcaaagaggtacaactaaacggggagcaattggaacacacaaaagtctcgacgatgccctttcttacaactttcggaccgctgggggcggctgcttttgcactggaacggcttggggtacttcgtaccacgttagttccccggaaatgttcccagaaaacacaggagtggtaaccttgagcactttattggctcgaggcatccaccttgactcgctcccaagtgcttgggcacctcatttggcagtagcgcttgtttgttggaaggtgagtgtcggtctgccaagcgttcttccgcagaacttccagaactgcccgatcatcctgaatcattgtttcttgagatctttcacagtggagcgggtgcccttccaagatgccttgcaaaacgaacgcaggcctttcggcaagcgtgtttgcggcagcatcatcggttggacctcctgtagctgattgactgcgacacctcgagcatacacgtaagcaaacaactcaccaaacgggaaggatagatatcgtcactaggctatgaacagcgccttacaaccgcagaggcgatccaacggcatccctccggacgagacctgcatttctgtgaatacggccgttgagtgtgagattcagaccaacgggaacgttctgctgcgccagcgtagtaattcgggcgcgaatcgttatggaggaattccataagctcactggaattcataaaaggaaacaggtggttttatggcttgtcaaagagtcacgatgaaaatggactcctgcaaaaaaggtgaactgtctcttttggtgcgaacggcgcccatctgaatgagaagagttacttatcacagtctgcggcgtaaacgggaggaagcgtcacactgtggatagtggcggaacctctgacagtgtcgcctcaaaagccattccttagcagcgtcgtattcctctgcggcagtgcgatcatttgcacaagacggccccgcgggtctccaatcctgaagaacagaaaatcgctctcatccccaagataactgcggtcagggtacagaacaccttctgtcaatcaggtgcaaaggcggttccggataacgaggggtcatgagcagcacctacactgatgatttttcttttcggattgacgaacacttgagttactgataccacgtagcacacagggggacgctgctctccctcccgaggagaaacttgtcaaccatctgccggaaccattctcgaaaaaggcagatccttcctcggagtagtaaaccctaaacacgttttgctcaggcctcaatcctaacggggactcagatacggtccagtagtcccatggctccccagatgcccctgcaactgggccggtttatttgattccgcacttgctactacacgcgggaccacctttacagactatttccacggtgtatgttggggaaaaagatagagttcactgactgagagacgtacttctgtaggaacaacagcatgtagctgcttgctgtgacaccaaaagagcgtgttttcttgacagacagacaacatcgttcctgagtgagaaccaccttctccgtgacaccaccgtaacttacaagcgtcgttatttggtccgcaagtctcctcatatctcgtgtttgggcttcaagcagaacttcagccgaaaggaatccaggagccagaaaaagaaaaatcagatggatatggataaatgtcgtcgttctagacaaaacgtgtccaatgggcgctgctcacctaacgcgcctcgtgcgaatgtgtatgccagagttttaatatcccatgcctggcctcaacgtatacacaacacaggcagattcttctcttctctcgatgacacgatcaccgcacaatttgtagtactctcaactaccataaaacaccagctcgttatttcacttaatctccgaaacactctgggcatctctcctacaggccttcactagaaaacatggagacactcagaacgctagacccaatcatcggtcagtaagtacgtaatgatatcctgtgaacgtctccaaatagacgttatacgtatttcgtgcgatgatatcccgagataatttgatagatacttgcgctgggcccacgatactacattattcgaaggcgccacgcagaggccaacgctgagtgcaggtagaatacaaggagcttctcgactgtagaggactgtttagctagttctcttgagttcatgactgtacttttttggttctcggtgaacacattagaaaaatggattgagacacaagagctataatgcgtaaactggcgtggtggaactctgtggcagggctggagctgtgttgatgaatccatgacaagagtagaacgaccttttttgcatgatcgcgtattgttttcgtcacctgtcgtgcacccactgcaggggcatgacgccgtcggtcaaacgccgctggcgacaggaatgacaggaaagtgtctgcgtcattccgtcctcccgaaacgggtttgaaaaatgggacgacaaagctgcgaacccgcctgcaccagggaaaagcagctagatttgttaccgttagtttctagaaactgttgagggtggcacgcttctaccacgagaaagaaactggtgtagttggcctcacatttttgcgcgcccagtgtctcagcttgcacgcagcggaataacttcatggcaccacccggtttgcacacggggggggtgacagtagaggaggtcacgtctcccagtcccactgcctcccaaagaaccaaaaacaaccgtgccgaagaagtctgttcgattgcatgatccacctctggtattcgggtcttcacggatatcacctgttgtgaaacaaggcttccttcacgattattttccggtaattttcgccgtggcagcacgtccttctccaaaccgatcagttgtgtctccacagccgctcgtggagtagtcagaaacttttatacgttacggcggttctctgaatctcttcagga

SEQ ID NO: 2429 - DNA, 3642 bp, Toxoplasma gondii
  source 1..3642: mol_type = genomic DNA
tattctcccgggacactcgatcgcttgtcggtgaaagagaggttcgacattttcctggaattctctgccgcaggagagcctgacgcgcggagaccaggcagctgctgtagctgttgctgagcagtgtggttttcgccggtcgaaataccgtgaccggacacggaagaaattcgcgttccctcgaagctcgacgatgcctggaaagtgtccgacacagtagaagcatagcgggaatttcccggaaatgttggagtagcggcgaaagacacactagtatggtcttggcttattagccgcgtggctgagttcaactgcacaggttggccgtgttgagtctgtgccacggagaataagggagtgaccggattttgtgtcccagatggcgcagaccccgtcatgtccgtgggtgggtttgagtggaacacaggtcccatggaagacgggttcgtccacgaaggaactttcgtctctgcgttctgagatgaaacggagggtccagacggtacagcgctgctgccagcaagaccattcatttgtgcgactactcgaccgctagaattgtaaccgagcccttcaccgcgctgcagctgaaactgagcctccgtagccccgttccagtaggcctccattgaggaagagcgttgttttgcttgatccttcggaccggcctgacacgacatttgggacgttggaaggccaagacaaaaggcaactcagaaaagaagtgaccacctcatggacgagcgagatactgaatgtttgaggttgtcttcgcttcttctgtcccgttgtggctttagctaccccggtcaaccaggtgtagcgcggctgagacaccggggagacttgctgagtcccaaatgaaaaacagatctcggcaatagccgatatgagccaaaataagtaaaacactggtcctggatgaaaagagattgagaagtccggatatgcccaaacggactgagaaagttgcgagaaggggcgatgtcctgatggagagcccacgttgaaaacgggtaaaaggttgggcacgaagactgcgcaaaagtttgaaaagtgccagagaaacagaagcgacagcgccgcttgcgaagtatacagaggttcttttcgttttctgacgaaatttacttcgccgaacgaagaatgaacactaggaaagcgagaaaaatcaagaacgtgaaattctttgcaggacacgcgcgcggccagcgagcggccagcgagcggcatggcttgcgcggtgagagtcatgaacgcccatcaccacgttgtcgcggcaagtggggttccaagacagggttgattttttacgctctgtgcttctttggaagaagttacagaaacaaaaaacgcaagtaacgacatttcgtgagcatcacattctgcattggacgcctttgcaactcaacgcaattccacatttttttgccacagctagagcgtgttgagtaccgctcgctgccgaaagtgctgcaggcccgcaagttacttcgaacatctcgctgtgcttgtcttttcacaggggagtttgccagccagagcgagcagatgcttttcgcgcggttgccgtcgcctattcctgtacgcttccgtgcacggttactggtggttgcgctgtattcactgtccgtctcaagctgcgagttcggcgtgccctggcatgggacaaaaagacaccagtctcttcacagagaaatgtatcgcaagacactgataaatcaatcagaagtgtgcgcaccgcctccacatagttttcttcgttatattgagtcgctccaacgcgtgatgtcgggaaggccttccctttgcaggggtagtcatggtcacagtagctgtgcaagacgaggaggattatgcaggcgcgtgtatgcggagggacacttgcaatttgaatcgcggcgaggtgccgaggagcgaaaagctagagcaacaacggggcactctgcttgcgactctaaagtcgaccagacgaaacaagcggaagcccgtctgttcaacagagcacacttttctgacagacgttcgagagaattcgcgactcgtgtgcccaccctcagggcaacactccagaagcactcagttcacggttctgtcaattgctccctgcatgtcagcttctcatcctgtatgttccgtctggactgccaagtagactccgcaaaggccgtgtcgttttgtcaccaaggatgtcggtgtgtgcgcaggtatggcacgcttggcgtcccaggtagcaatacgtcaacgatgaatggcagtaccacacaacatttcccggaattccgggatgcacccaagcagtcacacggaaacgccaagcacacttgtcaaacttgcctcgtgcagttctgctggactgctagtcctgctttcatggtgtcattatggcttcaaaatgcgggccccagaatgtcagcagcagtctttacagtcacggcagaacggttcatcgctctcaatagtgagtgatcattcacactgcgcagttttcaaaatgtgccacactaaccgggacaccttgagtcgtgaatgtaccttcataaaagcacacaccctcgtcgaaggcactcattcgtttatcactaccacacgaacgtcgctgtagccttatttagtcgtctagaaaaaatgccacgttttaatcttgtggttcagtggatgacggcagtcggtaacccagaccttcaaaagggtacttgatcgagccgtaggtatcgagatgtggatgaagccactgctgtctccgatgtgggggaagcatctatctcgaagttgttacgagtttcccttgccaggctgaccgcagggctgagatgacgaactgaggtgtaagatgagtttcaccactggaattgattcctctgtcgagcttacaaaggcgtttcgcaggacacacgaaaaagacccaagtgagaatggagtgttgcaacacaagacattctgaacgtcgacaaaagtgtgattgtgaaatttgagttaccgatgttgtgacatttcaaagtacaagtgcatttccaacgataacagcaccaggagtgtctaggctcggtattagcttgtattggttgactggtgcctcgcctcatgagaactggagacttccagttgtcttgctcatgtcgcgacgagatatggatgacgacaagaaagaacgcttctgcatgcatattgtcagtttgcggccataccactttggttcccaacgagtcacccatattggttttcaacgtgatttgatcactgtttctctagactgcagttgaaacatacgcgcccatcaatgtccgcgtctctttaacgatcgcctataggtgacgactagaataggctttcgctcggtgtcccctcccgctcaggttacttcgtggttaccatcacggcaagcggagcagattgtagtatgcggccgactaggcggaagtgcttttgtgtttttcttgtcattgaaaatgacaaaagggttccgaacgacttgcaacactctagaccagtcagcagcaccagcgcacagtggagacataaagttgttcccggttggctgtgtgtgaaacgctttagctagccacatcgcgtgagagattgagcctgtatggaagcaatctacaggaccagatcattttttattatgctgcatttgttgca

SEQ ID NO: 2430 - DNA, 4202 bp, Toxoplasma gondii
  source 1..4202: mol_type = genomic DNA
gagattcgtgacatcgagggaactttctgtcgggccttcctcccgttcatcccgcgagcgcacgaagccacagcaactgtccccgatacagtccgactctccccgacagagcgcacagcctcgcggcgtctcttcgtttgcgtcgtccgtagcctcttggcagcaggtcgactcattctcctgaagaatcgagagatcgcgagaagtctcctcgtcgtcgaagtcgttctcccccgtcttgtccttcggcctcgacactgcaggcagacgacattgggaggccgcctccgtgtcctcgttcgacgcgttctctaaatcattcgcgtcctggacgacactcacacgccaactcgagtgggcttcgaagaaagcccactcgctctttacgcatgcactgtctgcgcctctcgaatccgcgctctcctgtgcagacgtgccatcgtctacacgggtgaagtcgcgatcttccgcgacgcaggtgctaaagtcgtcgctctcgccctcactttccccctcctcaccgccggtggtgaccaccggggtagaagtcacgagcgtttcacatgagactccagtcctctccggctctgtcgaaacgtcgcgctctacttcgacacacatttccgtgtcctggtcggtgctggacgaggctcgcgacgtccgcagggaggaagccatctcgggggacagaccggacaacatgctcggaggcagcgagggtttagcggaaactccagcgcaaagaaacgcggcctcccccgtttccttctcgcggctctcgccagaggacagtttcccagcatgcgcgtcggccggcaaggtcagcgcagcatcactggaaggagcgcctgcgcctgagtcacagtacgaagcgacgggctttgcggcagacggcggacacatggtgtatttgagaaatggtaagacaacgtgggctcgagttctgcgcaacccccagccaaacacgcggcgggaacagactgagcgcgcgagcggaatgaggactcaaatgtccgagaaaaatgaacgccaacgacgacagtaccttggactttcgcggtgtcaaggaaaaaatcgagctgcgcaagacatacccgacgacaatcgcgcattccggaaaagagccgctcgggtctctgacctagagtaaaagcgcggggaaacagcgacgtggaaacgaatcaggccgaaaaagcgacgataacggatgctagtcacaaaacaagatgttaataaaatgcagccccgcggagagacgcagaagcgaacttaggcgggctcgcggagctcggtcatgtcattcacgtcaaaaaatcgaaatcagtgacaagaacttgtaggaaaaaacgttggtaaataccccagcaaatgccgcgttcttcctgaagcatgtctcaccagagttgagactgctcttccattttcggggggaaacgccgtggggttggagggcgcaaaaacggagcagagtcagcaactgtacaacttgctcaaaccacgaagatcggaaacgcttttcgccactttttggctaccggaagtcaagaaagcagtcgagctactccgttcgcgtcgattcgccgaattccccaaaccccgcacgacagccacgagtcacgaagaaacgacgtggaacagcaccgcgtccacgcagaccacgcagccaataggaagacggcgctctttcaggtggtcggcgttcaaagacgcgacaccgaacgcgtttccgacaagattttccaaagctgcgtcaggtttgttcgcgagcaaggatcgagttcaaagggacagcgctaaggaattcacaatttcgcagtttcccttacctcttcgcaacactttcctcgcagtttcaagaggcggagcagtggctaagaatgcgcggctccacctcgatcttccgtccgaccccccaaatcgcagttttcccgacagactacgcgcagccaggagtagagaagcatggagctcgatgtcgaggcattctaaaaagccaaaaatgtgcatgcaaacttccgttgcaaaaaaacggattgaacaagttctgcagcaaacctgcctgtctggcgatttgcctcgtggaggtcgggtggcaccctccaccccgaatcggagctggggggaacgcatgcactttctcacaccaaacccccggcgaagaaaccccacagcaagacacgcaaccacttttactgccacgacactgtttttccacgctgaaccgactttcgagcgacaacgaaacgttcaccgggctgacgagcgcgctaccgggggactgaggagaactggagctcgacggacacgcgcttacgacttcctttgtgtcgagccgccgcggatgagaacggacagtctgtttcatgtgccaagtcgtgaaactagaagaaacagagactccaatgccgatttcatacaagcacttctgcattacagaagacaacgccttgcgctacgaacgcacacacccgcgtggactaacagctgactgcgaggcagggtggcataccgaaaggttcttgaaaaatcgagactacaaaaagatacaccgaaacgtgtcttcgctttggatcagaccgacgaacatgagtctcgtttcgttcacagacacgcctgcactcgagagtaatacgagccttcaggcacccgcaacaccatcaacattgcgtgcagatggaccagaggcatgatgcaacaaactggtcatccctgaagcgccagatccacttgaagaattcatcgttctgctcatgcacacccttctccgacataatcgtcctcaactcttgaacaatttctcacagccgaacgcgatgggtggagaagggcacgcattctacaaactatacacagcgtctttctagcgatctttgcttctcgagagtcagttgaggttcagaatcctttcagacactagtgaaagaaagaaagcaactggagcccgtacacagcgtggctgtacttctggaaggacaagaatctcgacgccttcgcgcggctggaaatgccagccacggggaggaacaagggggggggggccggagctgtaacacaaacaacaaaccgtccacagtttccaagtgaagggtcaggtccgctcttcactccctcggcaatagagggaaataaagcaggaaatcggagccgatgcgcatagaatgtgacagcagcgtcggaaagtgtatgccgttctgttcggcttgcagaggcatgctctgcgtgacccaggagtatgctctgcgtgacgggtgtgctactgtggacgacgagctgcacagaggcaggcctgcgtccgtggaatgaacgtggatgggcgatagaaaacaagcaggaatttatcagaaacaccaacacattaaagaaactctgacgaacatgttactcgaataaaaaaatgaatgtgcttgttttacgtggatctccacgtgggtctggtgacgcttctgttgtgtagatgcgcagacggggtgagattctcaggggcggttgttctctttttcaccagtcaaatgctcagtaaaaatattgttactaaggaaagggtctttttcaactttgttaagtgcatccggtcgaacgagagtgagcacgtgtgccgtcgggcgtggaattcccgggcacacattaccgcgatacggaagtcttgccaacttctttctcccgtttcctccttccatgtacgtgacttcccgttttttaactttcttctacaggtttctcagcctcactggcactttcaagcgcttaaatctcgaaaacaactagcctaaacgggtatgggagatttggggtatatctgttccgcgtggagggtcaggagtgacaagcaccgttcttgccgttactcactgcaagtttcccgtgtaattcgaggaccagcaggccactctgcattgcgttcctttgaggttaaactgcctttcaaggcgtgtcaagattccatgcttgcctccagctgcttaaccccgttctgtgtgacctccacgtgctcgcgtgctccgcctcggctgtctgggaattcgcgtgagttgagggaacttctgtattggaaatcccattcattgtgtctgtgaacatgcactcttcgtgcgacgtcgactcgggaatggaggtgaagtttccttgaaagagtggacgtttgccgggcaattccacagacttcttgggcacactggtataggggttgagcgcgaattcgcgca

SEQ ID NO: 2431 - DNA, 919 bp, Toxoplasma gondii
  source 1..919: mol_type = genomic DNA
tgtctataatcgactcccgcagtcgctcaggctcatgaaatctgtctgcatttcggatgctggcttttgctgtagtgcctgagacggcagttgcccccctcccgccagacctctgtgtttttcgatcgagacaggagatcggacctgacacgaacggacggctcagcacccattataaataaataaacaaataaacaaatacatacatgcatacatacatacatatatacatatacgtacatgtatgtatttatgtatttatatatatatatatatgtatatatatatatatatatatgtagctgtagctgtcaatttgtgttggaaaataaatgtgtgtatatttgtttgcctatttgtgtctgacctcttcgacagctatttcgcagaagggattgatggagtgcttgagtccttccgtctgcatcgtcgttgcgcctgcctggacgcgaggcttcacggcgtagtcgagagtcctcttgacgcatacgacagcagtgtcgagaacgcctttcatcttgaagagttgaagaacgtcagggttgagtctctgcttcgaggcgccaggttcgcgtactcggggaggcgagaaaaggatcgctagctgggtgttggacgccggcgaacgctccgctgtctcctcctcgcctcaggataaaaaaagtcttgtttccaggaaggcgctcttcgcttcggagctcgtaggtagtcagggagaaaggatgcgcacttcgcgtggaagtcgtgagtcctccgtcgagtccccagcgacggttttcgcatccgtcacaatgatcaactcgtagaaaagtacaagggagcttgcgtgtgcgttgaggaaggacgtttcaatgacacccaagagaagcagaagagcaacgaagagagaagaagcgaaagaaaaaagaagagagaggga

SEQ ID NO: 2432 - DNA, 1917 bp, Toxoplasma gondii
  source 1..1917: mol_type = genomic DNA
tcacaacagccgatcgacaagatggttcctaccatacttagatctacgttaatgtctatatatatgtatctgtatgaatatacgcattaatatatatatatatatataggttttagaagttccacgttaaccacccagtgtgtagcctgtctctcaaggcctgtgccctcgtgctcttccttctccgcaaatcagatatatttctcgcatagtttgcacttctgtgtatacgcgcacggacatatatccatgtctatatgtatatatattcctttcaaagttgcgtaagtgcactttcgcacttacttgcatacatatcgagaccaacctcttcgagagttgtgcatctgcacctctgtgcatatttacaaatccggctttcgaaagcaaaacagaaagatccaccatgttgttgcacagaggcgaactgtgctgcggccaacgatttaaacgcatggccccccatgcagaaggaaaccggctaaagcacttctttgcgtgtgtatgtatgtatgcacccacgttcgagttcaattagctgacctgtggtgtttgccacgtctgtctcgctacaaatatgcagaaagacacatacacaaaaactgatgtacttgtctgaaacaatacttgcggaattgggttctcaccacgtctatgcagttgttgcacacgccaggaattacgtgcaaacacatctgcaaaatgttagacgggtgaaaatacgtctacgcctgtgaacctatctgtagtggtgggcttgagagaacgatccaaccataaggcattcttttcccctgtatccacttgtcaccagtgctatatttggcgtttcgcgtctgtggagatcccagcgtttttgattcgtttctgttgttccctactttgtgccctgccgcctctgtggtaaactcccccgactttcctgtgagcctttagactggcaccaattgagtctacgcttccaggtccgtttcttcgtgaatttccccctttaccggttgaaaaaagtcgtggggtgcatacgatgtgctctcttggcattccacgtgtgatgtcgtgtcgcggagtcaacgaagttttccggatagaacatccattgacgagactgatactgttgcagctttgttgacatgcgtggtattcttgggcagattcgctaattcagaagattcttatgcgccgtgtctcagtgaagcgaatgcgacagttaccagagtgttgccgacgtgcttctttcccgctctagcacccttcgagaacataacatacgaaatgtggtgcctagtgaaaaaatctccccatggaaagtgagggagcaaggaagcaacacaacttgcctttctgaggccctgcacacctggagacctggagaccagagacatacgaggagagggagacacagagaaaaaaccaagggggagagacatcagggactgggaggaaagatggcaagagggcgggcggtcgcgatgtgaacgagacaagtcctttgttgtgcggtttccagctggtctgttcttcttttcgtccttcgaggtacccttttctcgggagggcccgaagggctgaggaggcaaaacacaactgcatgcagtgattcagagcctatcctccgatcgtcatttttcgctcggttttccaccgccacttttcgtttcagcatgcacacctcgtccactgcccagtgtattcttttcctcttttttcgcttacccctgccggccagagacgtctggtttcgtcgaaacgggctcgacagggagacccccggaggaaaaggcctgggttaatctactgttttctgagaatttccattttcttcttcttaaggaaacgttgccaggtgtctttgctgagtcgcatttttgtgttggcgaggagcggcttttctctcccctattacccgcacagtcaaga

SEQ ID NO: 2433 - DNA, 4746 bp, Toxoplasma gondii
  source 1..4746: mol_type = genomic DNA
cacttaaaatgtaaatagatttaagaagttgagacgctgcgagcttcctagttcacacgccgagcgggagaacacggatgttccccacagaaaggcgatccgttttcttgaggaggaagaccgcttttcggtggacgcgaagagcccgcggagacaggggaagagaggaacgaggagcctgggaacgaggaccgaactcgagcacatgaggagtgtgaagcgtttgcgaagattcttcttagtcgagtcccggcggcgcaggagacaaccttgtcgagacgaggcagtgcggcaggccttccttcgcaatacatctgggctcaaggtgcagggcagagagccttcgagagcggccctcagttccacgcgttgacttttctggaaagtccgtggcgagtcgccgcgtctgacgagaggcgcttcatttctcagagggttcaggttttccccgttctcgcggagggtggggggggagagggtcaggacgcgacaacggatgctcttaagaaggaaagaaccgcagcgaggagagtcttttgagcaaccggagacgggcagaaggcgccgggaaggcgccggacacacacttgcgctctcctcgattgaggcgcggaaaaaacgtccgtttacgagggcgtggagcggcgaacggcagtcttcgagctggaaggggaacggacggaaggtgcaagggtagggggacaccggaaaactcgatttctcgaggcctttgtttcccctggaagcagtaggaagtggaagacattctcccgcagagactgacagacgagaaaaaaaaagacgagaggtggtagacagagacgaacgcgaatcggctgcggtgtctcggcgaagaaccccccgcgaggtgccggctgcttgagcagcgaaagccgtttttctggaggcggtggccgtcgttggcggcggcaatctctgttgcaggggactttctcggcaaggagagcgcagaggaaagaagtcgggttttctccgcaagaaaggtaggagaaactgggagaaactgcgtttcggcggcacacgcctagcacggccgagaccttgtcggcggcaagacaagcgtcgaactccaagagccgttcctcggagaaaacacgagaaagaaggagtttcgggggattgaactgtcagcaaaactctcgccacgatcgtccgcagcgaggcgaagtcgagaaacctcctgaacgtctggaaatgccgagaaaaccggatcgggcacacgcagggcaggcaaggtcacacggggaggcatgcagagggcgaaaaggaccctgtctgcgttctcacatgctcgcgtcgcgttcggtaaaacgcttcgagctctgaggaaaatgggcttcattccggaaggcgaaaagcagtgacttcttttcacgtttgtgcaggagttccagtcttccaaagagccggagaattccggcttctcttgtttgtgtttttgtgcacttcttcgctggcctatcctgcacttcttgtgaaggcagcatgggcgtcagcaagcgctgccgaaggcggtaaacagccatgatgcccagatgcccccaacggctttctagactgtgttcacctttgaaacgcacagttctctgagagtacagcttcggagacgtgaatatgccgacgcaaccacgccctcgttccgcgagaacgcgcccgcagcagagacgttccagaaaagagtgattgagaacggccgggtcactggcgacgctcgtctagttgagaagtgtcaactgtgcggtgactctgcaactgcaggcgcacaacatctgattcaagaaggcagttttccccgtgttccttggcctttgcgcccccctggcactggagaggacctaggttctttctcgatttcggccggtggaagctacagcgtacctcaacctcactttgaacaagcctggccctgacagttctgtcagtttggtgcatggaggggaaaccaccgaagaaacgcgaaggacgctggggcgcagaatcggtgagtcttcaccgacacgagttttgtggtggatgtaaaatggcttggcaacttgtcaggatcatgctgtggtcgacacagatgcacaagagaaaaggacgctgggctagggtgaactggagcacctctcaagtgttgcaggaaacggcgtttttctctcggacacggacgtgaaagactatgtgttttccgagtcactctgaggcaggatagctcttcgtgacaaaaggtctgagaataggaaggacggcttgaaagactcgaggacgcatctacttcccatgtgccaatggctgtagtagcgagtccaacatgtatagaaaacccgcagatacccccatcgaacgacgcgcaggagcaacaccggaaactgcatttgacgtagcagaagaggagtgtgggctacggaagaacgtgcatgtgtgtcccttccctatatgtgtacgaaatcgaggagcgctctgcacaatttggcacagatgagcttctgcaccgctagccttcgccaccccagaagaacaccgaaaatatgtgtcactcgcggcgtctgtggcggaagcaccgagggaatgcaacatcccccttggtggaacaggaaaacgctcttaatttgagttgcacatctacagaaaacagtgaccgagaaaaaggctgctccagtccagttagtggatgttcgacgtctgcggcatgcaaaaaaccgcaacttcaacgcggtcgcctactggcgaatttcggccttcagcaaaagaaccccgttatttcacttctttttgtctttgctctgttccgccgggtgcgagcgaaaccgtacttagttgaggcagaaaagctgcgagacctagggggagaaaaggaccttggcgtctcctggctgccgttacaaacatccttgtgatcaacattactgagagactctcctctggcaaggcagtgatgcctgttatttcagatgactgcttgcacgtccttttgaaatgttgcaagtcacttgcatcgaagccacagtcactctgtttcaagggcagaaaacggagggagcagttggtctggttcgtgctagctacccgtccagaccccgagcatctgcttgcctttctcgttacggggcgattggcgcctgtatccagagcctcctcaactctagatgtccttcctccgtctcagaagactatggtaactcggcgtcgtacccttcagcaggaaaaacgactctacagcgacgagaattgaaacgcaaaggttctcgaccccagcgcgtccgcgcaccggcgtcaggtgccagtctcgctgtctgatggtagcacggtgaccacgcgtcgatttgctcggacgcccaagtttctctttcgtcttgagcaaaggctcatcagcggaagatttggcgcctcgtcttccttcggaattttcgtctgaggttgcgaaaggcgtttctcctcaaacgtttctgaccagtgtgccgccgcttcctgaggaaagcgcaacgcaaaagatacagaagccgcgtctcgggaacaagcgccgacgtcgtgcgcccccgtcactgttatgcttatgaatcaccaccgaagagttcttttgacgcttcagtcttttgcatctgagtccttctgtcgccagctggtgacctaaatttgaaaaagatttcacgtcgcgagtctcgacgtgcgacagacacagccgcctgctcgttcgtgcgcgttgtcttggtattcgctcgactgcatctttctctgcaactcgcgcgtttccgtcgagctggtatcttgacattctctccttctgtgtatttgccgttcggcgttctcgaggaaacgtccaggtcgggttggtctctggaaaacgagcatgcaacactgtaaaacctcttttcaactttcccttcgcgcaccgcaagattgcaagatagccatttgcatcatttcatccgagaggttctgtggagagagaatcctcaacaggcaaagaaaacaaccgttttcggtggcagagaggatgtgctcgcgacccttgtgccacaagtgagcaatcgggagcaacacagacgcaaagtggcctaaatttcccgttgcatttttatctttgggactcctcggacgatccaagtccctggctctctggaccgttccttcctttattttatcctgtgcatcctccccgtgtggatgcatccttgccatgtcgatttgaatttcgcaggaaaaacggagaggcggtagcggcgcgtcccgcagctgggttggggaaaggccggattcttcgccgtgacgttatcgtctcgcgggagaacggcctctcctggtcagcagctgtcactgtagagagtctgtcagctgcagaaagccatgtcggtaaatgcgtcgaagggtttatcaagtccattggagcacagcgtgctggacgggcaggctaccccaagtggcagtgtgggtggcattgacagtgcctctgcgcaaggagcagctgctcgtgaaagtcgtctgtgtggcttacacagagtggaccgaaggagtgcgatggtagttgctgaggctttgtttctggactaggaaaaagcaaggtgcgatacatgcccggcctgtcggcgcgccagactgcaagcgaaagactagtcagagctgccgacacgcatgcgcagtgcgacgtctcaggtgtcactttttttcgcgttgcggcacattggttcattgaagattagagcagaagttttccgctgtccgtgacttgtcgcgcacgacacacaa

SEQ ID NO: 2434 - DNA, 2419 bp, Toxoplasma gondii
  source 1..2419: mol_type = genomic DNA
gacggagaagcgataagcgtagcaaggcgctactggtcccatgttttgcttgctctgtcaattccaactcccttcctccgcgtggaagtgaaaagaaagttagcgcctgccctcacccgttcactcatttatcccttatcgtcctcatgtctccactacccccgacgcagttctcggtcgctcttcctccgacttccgcgcagtctcatccccccacctcccctgccgcatacgcgttggtgttttccaacgcttctcgaggcctttgttgttctcgcgaagccggagagaagctgtctcaggagtctggagccgtgcgtgtcgcttaaaacggtttttctgcggtcattgcccctgcagaagtcgacttgtcagtggcggcgaagggggaaagaacgaacgggtgtttctggtcgtaagagaagaggcgcgccttcatccataaactcatcaaggtctgcttggggtctttttcgtcgacgggccgcgggcagagcgcggcgtacgcgaaatccacgcgccgcttctgctctccgcggcagttcaagtactggggaagagcctttaaaacatcagcgtcatcccaagaaagactctgaaaggcgctttccatcgcttttggctcctgccagcctgcggccgaatcgtaagctgcaagcagtttgagatccccgagcagacggtccatatgcggcgacgacccgctggacgcgaccgacgcagacgcagtgggtggcgacatggtggcaaacggggcgacggggatggtaccagcaaataacagaaaaagcaaaagtgggagagtcacagagagagccggacgagtgtactggccccgtggaacagagcgacacagcaggtgcacggcgaaaccactgaaaaactctgactgtatctaaacgctgtactgggaagcgcgaaatacagacaagcgaccagcagaagactcccggagacaagaagctctggagacactaacagcaactgtgcacaccaactatgcaaatcagcgcagaatcagctttctcttgcctgccagaaaagtcaggcatgcaaccaaaaagcgggatccgtttcgctgtattgcgcttcgtcgcatgcgacaaccaaagctgctgttttcgcagcgttccccgcgagacagcgcttttctcatcaaggctcacacgcccacccccctcgtgttgcttccaaggaggtgggtgaaaggacggtttcggcaagccgcttcgagcagtgtgtgattggcgcagctcagcgcatcgacgctagcgtaggttctgtactgatctcttcgatccaatcaaatctcgcttggtccatcagcccagcgatgttaattctactgtagccgacaaagtttcggcttgtcgcttgccttgttggtagcacaggtcctaaaaaaaacaagccgtttcgggagcagtggctgtggctgccgtgcctcagatcaatcgtcagagttgcgtacgggggagttctgtacagagctattcgtccgatgcagttactttgcatggcgcatatgccgaatctaataaccactatttccgacaaagttacggcgcttgccttgttggtagcacaggtcctacaaaaaaacaagccgtttcgggagcagtggctgtggctgccgtgcctcaatcatcacagttgcgtacgggggggttctgtacagagctattcgtccgatgcagttactttgcatggcgcatatgccgaatctaataaccactatttccgacaaagttacggcgcttgctttgttggtagcacaggtcctacaaaaaaacaagccgtttcgggagcagtggctgtggctgccgtgcctcagagcaatcatcacagttgcgtacgggggcgttctgtacagagctactcgtccgatgcagttactttgcatggcacatatgcccggatacaaaaactaatatttccgacatagttacggcgcgtcgctatcttttttggtagcacaggacctagaagtcgtttcgggagtagtggctgcggctggcgtacctagatcaccgaagcttgtgggaggtttttgtacaggttttgtccgatcccgtcgatgttttgctcagtccacctggccagttctaatacctagtattgccgacagagcctcggtgcgtcgcttatctcgtcaactcgtcgcattccatttcacccgctatcgacgcttttctggtgcgcgtgtatacgccagtacacggttgtccaagtgtgagcacaccgtcggttaagagacgcaattccagtccatggatttgtgacgcagctgggtaaagctcgtcacattgaagacagttttagtacttccgaaatttggtttcgcgccctccctctagtctcgagacctggtgggtggattgttttttttttacgcacaactcacgtcactctcccaaca

SEQ ID NO: 2435 - DNA, 1678 bp, Toxoplasma gondii
  source 1..1678: mol_type = genomic DNA
accctccgctgattatccgaggaacagtcatgcgttttgtgtttcttagcattggcatatccgctgcctccttcgatccccgatttcgtgcgttctttgctcgtgtttccagtttcacggactttcgtgacacatccactcctcgaattacctgcgcttcgattagcgagtagctgcgtcagctggaggctggcgactgcgcacatggcgaaacgcatgtccggttcggctgcatggttcggtgaatcgttgcactggttgttgaaagctccagtgttctggtcttgcaaacgtgcgagaaaacgctggatcttgttaagtaagtgcggcggcaaagtggaagggcccgcactccctaatagaaacagtatctgcagcgcactcaaggtcgatagactcgttgctgggtaactggggtctggatgtggcgcaaagccgacgcagcaggagcaggctgcatcttccaaagactctgactgagggtcggcgctgttttctgtgccttccacgtggcgactgcaagcaagtgttcgtttgcatttcatgacaagtctaactaaagaggatcgctgcgtttcgcctagaaaggaagtggacgcttcctcgcggttacccccgtcgggtgcgtcgccgaatccgagtctgcctcttttgtagtcattttctaagagcgccaaacccgcgagcgtccagtacactccactgagcagaaaggactctgcttccacagaatttatcccatcactggagctttcttcttgagaaaacggatggtggtgagcgaaatagtcttccttgtccaatttcgaactctccgcctctctctttcgcagggactggaggccggcgcctacaacgcgctggagaaagcagcggtgccgagcagcagccaggggggcctccaccaccattcgctcggatcgtctgaacacacatcaattagtgaagcgaaaagcaacaagaaagaccgaaaccgagaaaccgtaacttcgtctgcggcggaaaacgagcatcagagaaacagactgtcgtcactccagcacacatcgcgacagacacacagatcttgaaagcgactccgttcctaagtagagggcaggacccgaaacggatagaaaggacatttgtttacaggacgacaaagactggcgtgtgtgactctgaaggaagagttgcgacaacaggcggctgcaacggtcgcctacggaaaaccacacagttgcggtaaaaagacaaaaaccatgaaggacttttgcaggtgaatcgcgcgcgttaaatcgatgagtttgcgtcgcacggagaaattctggaaactttccttcatgtcgttttctgttgtcggttggagagcaaagccaccacgctttacattttaccgcctgcatgtgtgtgtgtttatcgcatgcacgcaaaatccatcggtaaaaccgcgagactccacgtagaaaacgatactttcagaaacatcacttcttgggattctctggttttgaagaaggactcctttcagcagtcactgcggtgtcgcttcgtgagactttcgttccttccctcttttttctcgttgcctctaaccgactcttggcctcttcgtgcgcttggtccttctctccctcacagtttgcttcccaacttcctcgtggtaattacgttctgctcgacttttgttctctctgca

SEQ ID NO: 2436 - DNA, 1773 bp, Toxoplasma gondii
  source 1..1773: mol_type = genomic DNA
agcatttgttgatgtatatgtcactacatactggtgcacacacttcccaggaaagcgatatatgcatattcatgtatatatatatatatatatagatatatatatatatgtgtatcgtgacgtagcgctacaaccctttcgggtggcgtccagcaagcgcgtaaacgtgacccgcccacaggggagggaaagaaaacgttcgatgccgtccgcattgaggaagcattctttctgcagtcgctcaaatcgaggatctacattggtgccagcaaacgactcggtttcttcacgtttccaaggatttgacttttagtgggacagctgagtgcacatgacaaagagtcctgctttttgtgcaaaaggaaggcaacgcaaagtacctcaccacagtcgtttctgtttcaagatgcgaaaagaagcagtgctccgcgaatgagaaactttcctctcggttgtatcggctacgttttgtcgctttccatgagcacaaacacggtgtctcatctagatacaaacgcattttcgacgcttaccactcttctggaagtgaacagtgttttacgacaaagttaccaaaagtgcacggtggtactactgacactaaaggaggctacagagcgcttttctgttctttttggagacggtcacacaaaacccccaggctcatgcaacaacagaatagaatgctgcatctcagagcagacgccgtctttcctcatggtccccgtttatcgagaaactccgtcgagtccgtatcggaatggcactcttagaaacgaggaacgaacccagaaagtggtaacgagtcttccagtgtgtctcaaaatctgagcaaatattagcagtactctatgtccatattttgaaaaaaaaatctgggccaaaaaggcgaccgcaacgcattcatggtctaaatcacaatctatagccgtgtgtcgctccggcagccgctactgcttctctggaaagaacggaaatctgcagaactaatcgcgaagttcgttgtgagtgcaacatgcatcgcaaaatgtacagcaagaccatcatgctgcgaaacgagaatggtttgttccccgtgtgccgcgaaccttgtttctgaaaccagcgcaatcgtccaagatgtacattgtttcatgtgctcattctgtgtatgtggcactcgggccccagtcacgaatcgagctctgagaaggagtcaatgacagtctgagtctttcttctctcgttttccttgattctcttctagtctggctgtgaatcccgcaacgatgcctctatcccgccggcttccgtttgaacttttcacattttcgaaagcgcttactagctagcgaatccagaatcccaatttgtgtaggtctgatgtggactgagcgtagaacctccgtaaacgcatcgagaggacgccagggcggaactccagttatccacgtttcccctttgtgctgaactcgtcttcgtttgtatttcattttgtatttcccctttggcactgccagcacatcggggttgcacagccatcctgtcaaaaaacgtgaggacgcaaagctgtgtcttctgctagcggctgacttttgcttttgaagacgctcttctgtcttcgcgtcgatgaacgtggattccccctttgtcaggtaggaccaacacggtttgcaagcgagttcaactttttttcatatcctatgcaccgtgcagcgcgcaatctgcaatcctcggatacagctgggaaggtcgtttgaatgagcaaagtgaaagaacaggaaagctaatcca

SEQ ID NO: 2437 - DNA, 3727 bp, Toxoplasma gondii
  source 1..3727: mol_type = genomic DNA
ttgtcaacttcgtctgtgttcctcttcaaggcctcaaggaacttgcaagcagggtttggacggtacagcaggcctgcgcgaggtgccggtgacggagctgacgagcctcccggcattctagcgtgtcttctacggacaaatcgtcagaacagatggacccagggcaaatgccatcagtcggcaagagagcggcagcaagaagggaatcacaaaagggcgcctgcgactggggatgatacgcaggcaacacgaggtgggagaaagacaaataactcagacgaacggaagacaaagcgactgcgcggggatatgtgacagtaaaaacaacgcagaacggggatttcgtggaaactatatgcggctagtagcgatgaacagactctgtgagcacagaagagatacggcggagagcagcaaggcgacaaggggataggttgcactcttttgacgtgaaaacaaggacctgtgaaagacaagtattgtcccgatgtgtggtcggtagcacgcacaagaagcaggggaggatcgaacgaagttggctgaagccgtgggttaactagctaggagtaacgggaaagggcgaacatcgctgtagtgcagttctctcgttttggtgaaacggtggaagaattattaactgcggacgatctgactaacaacgcagcatttccaccacctggttagaagaactcccacagatcgagtagtgaaacgcgtggctgccgaaggatgaacggaatctgggacgttcacgtgacgaaaagatgtttgagaataacgggggtggcaaaaaaggatagaaatttccacaggaactgcctccaaaagcaactggcgtaagacacctagaaaggtgcagtccccggacggaagaaagggtcgcaaagaatttgttctcagcaggacgcaggccactggaggtgaagtttctgggacgtcgctcatagaagccggttgcagttgtgtgtggtctgtttccagaacagcatttatcaccggcagataatgtacatgtccatgggcgtagacgcactgcccgctaacggggctacccgtccttcgcagaaatacacagggaaacgcagtcttgtgtgcctcagagtccaccacgttttgttttgactctcaccatcagaaaaagggggaggtgaattcagtgacagctcccggacgatggcaagtgagttgcgcttaaaaggagaattgtgtgttagcagaagccttcggactctcttgtgcgggaagcgcgagtgtcactacggaagaaatctgcacgccggaaagcgaatgtatccagagttgccaaggagaatcagacaagtttcattgagactcaacgagagaaattacatcaacggggtcatccgtcctcctctctcgatctgccggctcttcctgctcaggaactcatagagaggcgaggcgcggtcttgtcgagttacccggtttctgtggcagctacggtaccgcgattgcccagcgctggacagcaaccagacgcaaacggtaaacagccgctacaatggcgggtgagaaaacaatcgatttgggaagaggtgtggacgggagagtcaatatctgcatgtagtaaggagtatcgacggacttgcggctagcaagccgcttcgaacaggctgtcccgcttgagaggacggccagcgcacggcgtagcgcggcaaccttcttgcagtggcaaaatcccgcgccagcttttcttgccccgcaaaccacgggtggaggcaacgggttgccggaaatcgatgtccgcgattcgtaccaggcggtctcgctgtgttttggacgaacctcgggagaagccgcgcgacactacccccaagaaaacgagggacttttcccaacatccaacaactgaaagaaagaaacagccgagtgtaagtagggatggaacttttaaggtagactgtttgtggtagtcttcggttcaacgcagatccctcaccgcataaactcacccactcttcagctgagccagcattatcctcggatcgcgacaggagaggttccgtaggtccccttaccggacgaatagccaggggatggctctgccgtggttgaggtctcagcgggacctccgacaaaagggtttgaacttaccatcggtcgcgcacttatcagtttcttatgtagtctggggagcttaaagatatctggaagcgtctgcttgcactttctagaagggaagcctcacctcagtctaccaaacgggctgtcgtaggttggcggtggtcctaggcgttgtactctcgagttaagttgttactttgaatgaaacacttcaccaacagtagcgctgccttacatcgcacttcgttcacgtaggaagaagggagtctgggcgtctgtttgggcgaatggcggcggacactcgcttcagcctcgtctcaccgtggcgaactagttcctgagggcgaaggtttggggtagggtgtggtcgcggtggtggttacgacgcgttctgtgtagtttcttcccgctaattatggtatggtgctttgtgttaagatgtgcctcaaaaggtatggctacagagacgcgtggcaacgccacggaacagcctgcgaaccgccgggagcaatagggaaagtgaaagagcgactgttagtttgccgatacaacggatgacgatgctcctttcgtcaggactcggagaagtttcatcgtgtgaagctgtagacaccatacatatttcatcatttccagcgttgccagtcttcggtggccccataagcaaagcaaacgcaaactggtcactaagaaggcgacactgaacgctgacagagaaattgaatcagttcaccaatcatgagcaattacttctctcaaaaccagcctcacacggagctgttgcagctccttggcctgcttgatcagtgtgtatcgtcagcttaatacggaaaatgacacttgctgaggagggcggaagtcctgctggaaggcagtgaggtagataaaacggacatttatcggaaaatgacacttgctgaggagggcggaagtcctgctggaaggcagttaggtagataaaacggacatttatccaccttttctctcacggcattgtcgtcggatgctcggcattgtatactgcagaatctagggcgacggattcgtacacttatcaactcatggttttccaaatttcatatgagcaacgatcccgtgtgagctaggtggttctccttacccggagacatccttggtaggcgttgtcaatggctttgtaatacgcatgacacaaaaatgaggtagctccatcaggagtgacagcgagtctagatgtgttcgtgtatccttgtcgctgtgggcacacgaattctttcggctacaggacgctgtggccgatgccacgcatcgtcggtggccagaaccccagaaaaacgaacgcccgcgcaagtgcgccttcaaaaagaaggcagaattcttccgttcccttttcgggagtttctgaagagatgatggaacagagtgtgctgtcaccacgtactgtgtgtgcacggaatcttcgtggatggcaggggaaactgttatctcgaagcacatgcatttcctgacagcccaggactctgcagtttgctggaaagtgggcatgccagcagtacactttttactcagtgtagagatggtattcctgaagagatttttggaggacaccgactagtgcctgattctcagcgtttgccaggtggcccgaaatacggcggttaca

SEQ ID NO: 2438 - DNA, 2967 bp, Toxoplasma gondii
  source 1..2967: mol_type = genomic DNA
ctgtgtttgtgagctttggacaaactccgctttgcaagagttggcttttcttgtcatctcgagggtacagagttccctgaagctcaggtgaacgagtccaacaaacacgaaaacatgcacgagcttccacaattgttgccgcagcattgacttttcccctgtttctgtcggtacctttagagtagacagtgagatgtccacgcattaacgaatcatcctctcatagccagagaagcgtgtatgcaagttttcaacgatcgatagatagaaggggattcactctggggtaaggatacaacgtcaaatggtttcatggtacaaaactcggggatggagtgacttagattaagggatgtgctcaacggaagcacctgaaatggagttcgtgttgatttacgtcagcggttaacggttcggaacgacctctgtacacctagctgttgacccccatttaaacacagcagttaccgtagctgcaggtagacgcgaattcgagacttgtctcctatgacactgcatagcacataagattcacacaaacgtgaggtctgtaggggcatgagacggtaagagcagcttaagcgtcccgcatctctcctcccctttctcggagatgcccacatacgttaaagaaacctagaatttctcgtgaacaaaactatagaacgaaccctgaatatatggatcacagttcggttggatgtgagtgcccagcagcccgtcgatccatttgtcttccccgttcaaatggtgcaaattctgtaactgtgcactgtacatggctttgcctgtctgtaccgatctagctgcatatctatctagatacagacgcgtgattagattcgcaattacacctccgtattcgctcttttgacgatgaaccaccgtttcccagaataggttgtcctgccagcatcgtcgctctcttgtggagtcccgcgaagtgattctgaaatctgagttgagcaaaaatagagggacggcgtactgattgttcccgcggtctgggaggtggagcgtctgattgagagagtgcaaaactcacaaaactgatgacgtcaaatcaagaccactaccgacttcggaatggataatttgagttacgaattcaaaaccgaatcacactgggaaatatgccggctttgtacggaggatacaggaagttctttgtaccaatctgtatcctccgtacaaagccggcatatttcctagtgtcggcgtctgaacggaagaatcgttgataaaagcgaactaaggatttgggggattgatcaagacatggaaggagccgagacagaacattcaatcacattccagaagacttgagacagtgaaacaccctggcgaatgggaaatctgaagtttgtcgtgctttgacgtttctgttgtctctgacaccaacgacgacacgcgcaaacccgcatgctgcagatgagcaagaaaagaaccgtaaaaggatcgattctgtcaatttgtgcatctgagttgaaacgcggttatacatgtaacacggtaattttccggttaaagccccattttctttgacacacacgtctctcctcgccccaagtatgatctcaaagtgccaaggaccgtgtagcatgtaaacgcgagttaaagcagccgctttggcaagtgaaatcaaccactttaaccttgttcatgggtcaaacacggaaagagctctttgccttcaaggtgacacgggttatgagctgttctgagggaaaagacgtttctcctgtttactcttttctggccgacgctgacaagtgacaagccaaaagtggctttgccgcgggaacctatctcccaccaacctgctgggatttcctccgattcttcgccttcacttttctggtctttttccatcttttcttgtcgctgaagaaaacaactcgagtctagataccatatatagacatatatctgtatgcgaatgcacacgatcaagaccatcatagatacgcgtgtatattcaaatattgccctgatcctctttcgcctacagacgaggacaggaggccaacgaaagacgggcagggagttgcgtgtacttcttcatgctgcaagtatctcaaaatctcctgtacactccaaactgcttgaccgctctaaaacagactgtgtgttggtgtcctgctctctcgctccgtagccgcatacaattaacacaaatgcgtatctgtagctacaactactccctacatttacttgtgtacgccagcaaaaatattcctgtcccgctgcagcatgccggacaatatagaagttcagcaatcgcgttggtcttgagttttctaactgcgcaactgtttgcttgatttcaccacaagatgagaccgcatgttgtgaccgagagcagggagtctgtccggacttcccctaagagttcttgtcccatttctccatgcgtttctccacctttgtccaactgttgttcaaagactcgttcaacaactgtttctcttcccgctacaaaaccgacatgctgccggtccaagtctccaagtatctcctcgcttcctgggggtgtggaagaagctggaggtacctgttttccttcgttggtttgttccccacgtacttcttctaaattgtgtgctgcgccaaaatgctgtcattcgaaacctgcaggacttctgagtctccctcctcaggcacgtacgtgctgtccccgatcgaatgtttcgtctgcaacgcctgccgacgcctctgtggcatctccctcgccttttcctaaaccgcctgctcataccgaggaaacacatttgtctgcagaaattcattcccagcacccggctgttgctcgtccacctcttacccctcctcttaatcctcctccgtttcctctttctcctggccgtgacagggatggtggtaccacgtctgcgacgcttccctctccgtccgatgaaacgtcacctttcctcgacttggaggtctggcgtatctcggttgccggaa

SEQ ID NO: 2439 - DNA, 3199 bp, Toxoplasma gondii
  source 1..3199: mol_type = genomic DNA
ggtttcggagatgaccttgcggcctcttttgtctctcttccgaattcgcgggcgcgcgtccacgagcgagttccggacgtctcactccgcaagcactcccagcgttctgtttctcgctcctcttttccttcttccttctcacgcgctgtgccttggacgcggacaccaccagctgatgcggcctcgcttcttcgaagagaaacgccgaacatccactctctcttgcgcgcgtccgttgggctctgaacgaggagtgcgaacgcgcaggagacgcgaagggcgttggttctcctcgttcatcccctctcgcgcgttcagcctggatgcagggcgcgcgcctcgcgcccccagaggcctcaagagagaagtcgcgacacacagccttctcgactgcggctaaccagttatttgcctcgagtgtctgaacatctccagagcgcaggagagaggaagccgccagcgcccgcgtcaccgcagagcttagactcgcctgaatgcctagggaagctgcgtcgagaggcgaggaaagacacgcgggtgtcctgaagcactgctccaagatgtctgccaagaactcttcacactggacgtcaggcgagtacgcacaacgagtttgcgaaggcgcagaagatccggggaagccggcatcggaaatgtcgacggccagccaccacgttggacgaccaagtcgcgtctgcaaggactcacgggcggcctcggagattcttcttccacgcactgcgagcacggaagcagcagaggaagcagagtctcccgtcgacttccacgacgtctcgttcactggccaggaagacgcccccaccggaacacaggtttcagatctcttgcgtctcgccgcctgtcgctcttcctccatgtctacgtcggccgctttcctgctttgctgcgttgctggttcgtcggtcttcacccctctctgtcggtggtttgtttcagcagcgcgctggagggctttcgaggatcgacgttcgcgccggtccgatgaaggagttcccagctggaaggcgaaaaaaacagtttgcacggagcgaaacggaagaaggaacagacacgacggccttccattcttcgagttccgtcagagaaaagtctcttttctcgagactctggagaactgcggtcccggcgaccgccatgatcctggaactcggtgactccgttgacactgcggtgtctgtacacctcacacaccggcaacttggtcgcgcatgcgacggttccgctgtcttgatttgcggtgcaaatcgcccttgtaacgcctttgaaagtgaacgtctcttcgcgagcgatgcagtgcgtaatctactttctccgcagcctccttcccgtgaaggcgctcggcggacgtcgcgcaacgcttgtcttgccgcctcaggtctgcgcgaatggcgcccgcgcagctcgcgaaaagatcgagcttctaggcaaagcgcagctccctgcggcgaagaagtgtgcggaaaactttgcggagtgtctgagaaagaaaaatgagttgtcgaaacgggcgaaaacgcagggcaggaccgcgttttcgcgttggacagcaagacgcgaagttccacgcgaaaccgcggcttctcctggggaggcaggcctgcacagccacagtgagagtttcatgtcaggagcacattctctgctgcgcgggagtcagttcagaaggaatttcgaagggaagcacagaaacaacgcgcgggagatatgcgactcggactacgggagcagcgacagcacacatgcgtgagcggaggacgcagggagactcgaccggaggagggggggaagtcgattttccaaggcctgcagcttttgctgtttctggattttccactgaactttcgaagtttgttttccccgcgcttcgctcagagagacaaagaaacgcggacacgatgggtagatttcatgaagaaagcgtcgcgaccgagcacacagaaaaccggccagcagagaaccgcaggtcggcgccgatgtttctgtcgattccttctccaccaagagcagatttctgtttatttcctccgcgagcaatcggcttttcatcacaggctagcgtggccggcatgaccattgtgcagatggagtacacagcctcgagctggtctgctccgcaacacgcacttgactttatttccaagcatattttctagactccttgcctcttcttgggccactctgtgctggatatcgtggtgaaagggggtttttctgtctggtctgtcacaaatgttctgaagaggagaggtcataactcacacgcttgcgggacttcgttccatctcaagccgaaaccacattcactgcctcagcggtggtactctgtctgtgtcaggtatcattggtgacgaagacgctcgaaatccaacgcctgtggctgtcttcagcagtccgaagagtccgaagaggggtgcgaagtcaccacaaagaacgactggcgtcacacagaatgggcgtcgcatgcttttcctgtgtgccctccgtctgttttgtttacgtctgccaacgagacaccctacacatttgcgtagttctagatgcgtagtgcggctcgaagcgtcggtacgaggaaagcgaagagaaacgaacgaacgcagacaggcaacttgtttacataaacgaggtgtcttcgatgggagagaggccagcagcccgtagcgggtgtgaggtctcgtagcgtctggcttcccgaatagccgcctcacaggtgatccgcttgaaatttggagcttgccgactccgacagagtcgccctgctcactcgaacgttcttcgcttttggtaagttgactctcctcgtctcgttgcctctccaggggactcttcttccctgcctccttctgagagacgtccctttctcgcgccgcctgtgcgagcagttccaggatcttctcgacttgcatttaaatggttctaacaactctgcaggtgttgataccgcgcttaacgtggagtgaacggtctctctcgccttctacgtcgaccagaaacagtcgacatctgcacaaaagcgcgtcaaccgtccggtcgccgacgcgatgtcctccgtgtacacgcaccagaggaggtcgataaacagtcgtgagtttttcttcgtcgtctcgtcgacgagtgcgacgaacagtgcgtcagtccatttcgtcgggacagagacagacagaagtccggctcaaaagga

SEQ ID NO: 2440 - DNA, 2944 bp, Toxoplasma gondii
  source 1..2944: mol_type = genomic DNA
taaaagcaactaatttcgtggtttacttgcgaacaattgctgcttatggcagtgtgtgattggcaccctgcatataaatgtcgtctctctcggggtgttgaatttgtcagctggagcgtcataaggtgctgtcttctaaacggactgattgtgaacgcaagcgaacagagcgacaaactgtagtattgcactcgtgtgaaaaacacacacggacagtcgaatgacggatagtcgctgtatgtcgcgattggactgcaacagcgaatgttcaaccgaaagacacgaacaagcgaattatgtagtggatgaagggttgttgaatcaacatctcattaggtgcttagtggccagtgaaacgcattgcaagagcccgtcttgcgttacagtgccagagcccctcttttttccggtcaaaacatgttagtctgcctccagtagtgtcttgcgggtccttctggttttaaggcttgcaacaaggctgaagcgagcagctgctaacagtgatccacgtccatttattagtcaatcagggttgctccatgctttgcaactagattgaagagtgtggcgagacctctttgctttcgttcggtgattgggcatggcactaagctggtgcaatgcgagaaagcaatggcgtagccaacccgcaaaggagagattgtgaagccgaatcagccggcagtcgcgcggttccaagtgacctactgccagctacgtcatttctctaagcaaaaatcagtaaacttcaaaaaacggtgcttccttgcagtttggacacgccagccaatgcttaaactgtgccacctagcctttgacatttagcggggcactgctgcgtgtgcacgttgcagcttcatcctcagtgaccccttatgccggttgcgtcacactcgaccatgcttcttttcacagaatcatattccttcaggcaacgacctgtacgtactgatatcctagtctgcagactctctggcgagaactgctttctatctgttgcttcatttgttgtctaaaacgtactcaccagactaggcattagaagtgctccagtacgcagggatgggtcaggcacacccgttcttacaacattttgtgttaaaataagtcctgttctcgctgccgaaaaatcttttacttcgagaacttacttttttcgctgcgtcttacccagtgtactcgagtgactgatccaccctgaacgggttaacactacgggtgctgccttgtcgagagcgcttggagtcaaacacgacgcaggttgaatgcgttggttgcaaaatcatacacaaaacatggcttcacgggtaggggagtagtaacctttctaatcccgttgactatttggtgacaactgcattggtgggcctactgtggactctcgccagaaccattctattttcgatggacccacgttcgtagaagcttgtagggaagcaggaacgagaaaaatcaaggaacccggagggttccatttccaagactggaattgagggactgtttcactgcattttcaggagtgacgaagacagtatattcaggatacggattcttaaacgtatcccgtgtacagtttaaagggaatggagcttaaaaatgtcccttctttgtgtccagtttcataaggaggcaggattgcatttctgctctcggtcgtacacagcatcctagctcagcttgtttctgttgcacaagttctcacactcgtgcaaccccgcatactgtttgttcgacgatcgtgaactgtgctttttgtgtcggctgctataaaactcgacatttttcttcgctttcccttgtattggaactgtgcaagatgaataagggagcatttctctttgccggtagaccctttgttttcccgcttttctcggtctgccttgctgtctgacagcgtccttctgtcccctaaacctctctatagtcaactcgatatcgattgttgttcctcttatagagtgtttccctttgtatcgtgattcctacctccagtttattggctattatgtgctacacggtgttctttaaattttttgcttccgcaccattcctgcatgttcccgttgtcacttgcacttgccttctaggtacaagccattatcgggctctcaaacctttattttccacccctcgttttccccccctttttgtcagaacaccgtttcccgttttcttttcctgtgacggattttatgaaaggaagagtgcacaacggcgttccaccacggattctgcactaaaacacgcccgatcctgcttcttgtgtgtcgcactcgctgtctccgcgaccttggcgttcacatgcgtttgctgtgcacataatacgaggataaaaaacagctcgttgttgcatcgagtctgcgaacgtacacacaatcaagccggaattacccgaccgaatcgaggctgtggcccttcacttcccatgttttaagccaccacgtttcattcgcccgacagttctgtcaacccggttgaacgtgaaccccggggtactcctgctccaatgcgaaggttttaaccgtcgtcttgtttccacaatgctcaaatgtgtgactggttggccacttttccatcgtgaaggcactttgacgttatttctgggtgtggctcttttttttcgaagtgaagagcgtgccgtcgctgcaagtgcctcgggatccggatcctccttttcgtccgttcagcctatccgtctctttgcgtcctctcatgtggttgctgtttgctgctcttcactgtatatcggagtctacagttcgtggtgtcgtcagggcttggtctgccgcgggttgcacattttctctgggagtcccaccagcgctcggtttcgtgacttccggattcctccagtttaaaaaaattcctatgggcgcatctgcctcctagcgtagccgcggcgaacgggttttgtcttcgcttcttgttctttgagtgttcggga

SEQ ID NO: 2441 - DNA, 1372 bp, Toxoplasma gondii
  source 1..1372: mol_type = genomic DNA
tctccttatctgtctgtacacctcacgagactgttgctcgtgctttccccaggcctccgacgctgattggtccagcgtactgcctctgcagtcgtcgtggcaggaaggagaagacgaagtctctgcatccatcgctccttctccgcatttccgatcgacgtctcgtttttcagcttccaaagcatctaaacaacgaagatggcgtccgtctccgagtgtactgcgagtcccgcgatatacacccggagtcgcctccgagggcggcaggtgtgttgggttgttctttggagatctcaagagtcgaatcggagagcaaaactcagacgagggaggcgctccagactgcttcggtgtcttcaactgcgactcgttggtttactcgcgagacagccggtcgcgacgccgagttcctgttgaggctcccgtcggcgagcgcgacaggtggtgaagaatgagcggagggaaggcggaagaagcagatggtcgaccggaaggagcaagaacaacgtcactgatgagcgcggttgaagcgtacttgtgcagagcagagcgcgtgcccgcagtgtgaggagtcgggagcggtaaagagatggaaatgcggagggaaaaggaagcagagaaaagtctggagaagagccgcaagtcttcgacaagaaagggaaggcgaagcaactccgcggaagaagtcgccagcgggatatgggcaagaccgacaacgtcggagaatcccgaaggccgagtgtgcggtctcagcagatccacgagaagagcgagagcggcggaagacacagatggggcagagagagacgcgaaccactgttcctttaaaagcttttcatcgagggaaggaaatcggtggaaactggacaaaagcttccaagagagtcttcagaaagcagtgtgcacagttacgactcggagcgcgccggcaggtgggcgcactcatccctgttcgccgggaaaaaaagagagaaaggcatgcgtttaacacaagaaaggcagatcttttttgcgggtcttctttccttctttcactctggaaacgtcgcgagcgacgtcggctaccaccggtgctcaagacacgcggtcaagtgtgtgcatgcatcaccttttctcaagttcgagagaatctcggcaaaccctataaaacctcgaccggcgccaggaagaccctctcgctcgccttcgaaaggtgaaaacagcgcagcggaaactcttctcaaggtggaccgcgctcttccacgccgggagcgagtagagtgagtgaagtgagtggagtgagtggagagagagtggagagagagtgtagagagagtggagaaaaacaatcgcattctgagaaaggagaaagtttcgtcttcttggcgaccag

SEQ ID NO: 2442 - DNA, 1701 bp, Toxoplasma gondii
  source 1..1701: mol_type = genomic DNA
tcaccgttgtcgtcttaacacgctgtaatctcaagttcagttagtttttctgggaacttgcgggcaaatccggttgccctggaatgatggtaggtgaagcgtagggcgatacacgtcaagcgaaaagaatagttcgcagcgcagtcgttagcatgcggtggtatgcttttcagttcatctatgtgcttacatacatgttagatctggactgtgattagtaccgaaggaagcttcgtgagatacacccggtgtactaagacgtgaatgactgagagagaagggtggattggaatcccacagttttctctcccagttatctttcagttgccacccggaaaatgatgtcactgccgctttcgcatgaggatgatataccggataccagctgtctctgatgaggcggtttgtacctgagagaattgctgtaaggagtaacagttcatcccgatatagcatgtgaaacctacctttcttggctagtgccatgtatggggcgaaagacagtcccttatcaatgcacaaagtaaacctccaaggtatgtaaaggggatgtgtcaaactggatctgcctgtgattccggctcagtgacaccaggcacgacacagttcgtgcaacaggttgatttcgtgcctcttttagagaacgaagggctaacgcaacagtgagcatacacatactgcctgccagacaaccacgttattctgtagtcccctcactcacgacagccgagtgcacgctatatgtcgcacacccgcagaatggatttatatttcatgtgaaataaacactaatgcttgtgaaatagcgcctgacagaggagcgacaacgcatcactcccctaaacactgcacatgcagcgctcagcaaacgggagaattcgttaccgtggagtttgattcaggcgcgaattgagatatatgagaagtggaatgctcgcagggtcctctgaccgcaacctactgttgacggttttcacaggggaagagtgatgatgcatgcgccctgggttaccgacatcagacatttcagtcttcgtgaatacacttcttcccccatttccaacaacttgtcaggtctaccatacactggcgaattcatttttcgagcttcaccctcatttttcttgcggttcggtcatttcagctgcatgtgcactgtcgtttgttacatgcacttgagtgtgcatgcgagagcgataacggcggcaaattctggcatcatccggaagaaaggcccgaccgttctcgacttgtttccacttgaatcaccgagtcaaatttttgaacagccaactcgttagtgggtcttcggaacccatggctggaggagtatgaaacagcaaagtatcatctatatcgcgacggtgcgtcattgctcagaactcagcttaaaaaggcaagacgagcggtatcccacgaactgaggtctgtcttagggggcttcccacaccattcgtcgtgggaggcctcctacagatgtcgccgtattccgccgtgtttttccggtttattagtgagccaatgcttttgttaagaaatcagcgagttgtggagtacagtgacacttgtccactcgcgcgaggtcacaacttgcttgtagtgaggaatgctgaacgcgcgatcaccgtctgctgcttgatctgatttgccttcggccgaagagagagagctggaaatttttggaagcccccttctgcataa

SEQ ID NO: 2443 - DNA, 1570 bp, Toxoplasma gondii
  source 1..1570: mol_type = genomic DNA
tatatgctctatagcatattcgcgtatcgagaggtttgcgtaaatgaaggaagcgaaaaagagaaatgtttattgatattgctgcaccatatatatatatatatatatatacatatatgcatatagtcgatacctttgtgagagggagggtgtcgggagaccgagacgcgattctggaagacggagaaagatttcaaggtagaaagcgagtcgagagaaagtccctgagaggttcgctgaaacttgtcacgtttttaaaggagactttgttcttcgttccttttgggaagatccgttcttctctctgttctgcgtcggaaggagattttatcgacgaatcccagaaccagtgaggagcctatttcggcgtctccacctgtctctcccctctaaagaaacgcacctggaaacgttccctgcgtttgcctcctgtcgaaactttgtctctttttttctcattcgctttccttacgtcatcctcactactcgttgcggcttctctctgatggccgatgcacaagggcaggcttcgctgccaagaactcgctctctgcctctctctctgcttctgccttcctatacgcgctctctgctttcttctctttttcttgcgcatcttccccctgtccctgcttcgctctttctctcctctcttcgctttgccttccctcttcttctctcttctttgtcctgctctcttcttctctttcttctctttcttctctttcttctctttcttctctttcttctctttcttctctttcttctctttcttctctttcttgtctttgtcgtatcgctgtcctcctttctccgcagcttggaccggcgtcgagttgccctcgagcgagggattgcggcagttcgacttgagtcgagttttccagaattctttcctctgcgcagctgctttctctcgaccgaattggagagcgcaaagaaagaagaacagatgtccggccgttgtcgtactgtgaaggttgcgagaaggagatgcgtcaaacacagatggcctcacccttgcatgcgaacggtcagtgtgcattgcaacttttcgccgaaaagaagggggtcgctgcggctgtgtgtctgctcgcagtgcgccttcatgtctcgacaaatttcgagaaaaaccgaagatcgctcctttcgaatctccccaaactccagagaccagtccgcgagagtcctgtcggatgcagcctgcgttgtccttccctcctcgttccgacggcgagacctgacgcgtcaggatctccagtgtcttccggccctccaggtcgccgtcctcgtcgcggcttctccctctttctcgcgcggcctttgtttcttttttttggctccgaaacgtccaccactgcctctcgacgccgttcgcaactctgcctcgtttgcggttcatgcgcgcagaacgtccgttctcccggtgttgggacagcgtcttgtgcccaggaactgtgagaggctgggcgagacgcagaggagactccaacgtctcccaagtcttggaggtcttggagggcggcagcttccttgctgagaagagagaggcgcgagccttttttaagaa

SEQ ID NO: 2444 - DNA, 3094 bp, Toxoplasma gondii
  source 1..3094: mol_type = genomic DNA
tctttttcctctggaaccgcacctcaagattcactgctttttccagagtctcttgaacggtcgaagcatctgccaagtctgcttggatgacttgtatcgccatagaaattgagtggttcttcgcctcctcgatgcacagggactgtgcatcttgcagagttgagagcgtccgggcaacgagagaaatcactttcgcgcgtttccgaacacactccaaggcgagggacaagccaatgccttttgaccctccactgatgagcacatggcgcccttctatgcgatacgggagagccaagtccaccctccagagcggaaagactcgcgacacagcgtactggaagaccagacgaagaagagcgaggaagctgacgggttgctgcgtctcaccgtcgcctggtaggtggttagacagtctcgcgcccctctttccgttctgctctcggtcgccgcatgcttcttctacacacgaggaagcggattttgagcccaaggggaatcgtacagcagcgacttgggcgcagtagacaaaaacgaagagaatgagcaaagggactgaaaccagcagagaagcgaagccgctcgccgtgcctccgagcgccaagaacggcagcagaaagatagccgcgagtgccaggagggtagagacggtgttgcgtgcgacaaacaataacattttagagacagggggaactgagacagagtgcagcgacggaaagagcacgaaagcagttccaacacgcatccaccaaccagctaaaaaacgcgcttccagcgtggtagaagtgacacgaaaggtgaagggaaccaaacttctacatgcacatacatatgatatccggtactacacgcacacagatggccaataaaaggcaggaggatacagagataccttagagaaaaacttcaacgcaactttatagcgacaacctttatgtgctaatccattctcctcagtttctgctagacaatgccactctcacaaacgattggaaaaaaggaggcccgaacgaattttcgtcggagggtctcgacaaacctcccgctgcccaatctgggcaggcccagcttgggttcttctacctgcaggcggaagtgtattctccaggcttcgaaatctcttttctcgttggtagttccaaaacagcttatgcgaaacgcggtcacgagaaattcatttccaccacacacagatgcgcacatgtacatgtctcttccgcgaatgtcttggcggctggacggtataggagaggtcgacccagagctcagccgccacagtcgctttcagcaccctcctcactttcacttccctgaaaacagaaactagagctgactattaacatgttcagacagaaaagagcctgcattattgccgcgaaggtggaggatagcgtcttcactgagcgggtcgacgactcttcgctggcaatcgcggggcccgagtcccgagagttatgtcttggtgttagatgtgattttctcgcaaaaagagcgatcgacttcccccggaaaaggcttgaaaaagagagcgcgcggagattcccggcttccaaaatgcaactattagagctcaaggaacaccacggaatttatctgctttcttggacgcaatcgtggcagtcgagcttgcgtgcaccgcacacgaaaaaaacgacccatgcgttgcaaaggaaaattcgcaaggtacctccactcagaaggttcctttttccttaggtgcacatagaaagcgaataattgaagcggtcggacggagttgcgctgtctagcttcatgcagtcgcggtatttgttaaagggaatctaggtgaaacgcgcgatgcgcaacaccggccgtttttccacagcgtgagactgaagtctatggcacgagagtctgttgaaatgttccgttcctttagcactacgccagaaccaagcacgttgtccgtgcagtcaagagaagaaacgtacagttactctcgagaaaaaactcgagaattttcgatgacgcaaccctgctcacttagaccatcgcacctcaggtgacgacgtttggttcggggttgggaagacagctccaccacaacgttcaaaacgcggatggaagtgataacgatctgctcttaacagaatttgttaatgtgaaatctctgcgtcgattctgaggctttctgctgactaaaaccgctgcgcctagaggagagtctgtagagcatgagctcggaagctcggcgtggagtctcagatttgctgctccgaccttcgggctatgctccatcccaaattcatcttgatgctttttgcgcagcttgcttaaacaaatggcgactcagttggaaacggcgtatcgaaagacatcgggagccactgtgttcggactctcacaagcgcgagtcctacggtgtcagggcggaccttacagttgagatgtcgccccacacacataattctatcgaaataaagaaaggcgtagcaatcagcctcttcgaaaacagtcttctttctgtcaccttcttggtagaactgtcttttctcctctacagttatccacctcgaagcagtaccgcaggtacactgattcgggcaggtgggcgattctttgaatgcgtgcaacgatatttaatatctcacctgacgttcacaagtttccatcttctcagcattttctcaggtcaacaaccacagtatctcctccaaatcaagatggctgcgtgaccaaagtagacacggcgctgacatgcgtagaaagtgctcgtcgttacttgttacagtcgtcatacctataccccagtgccgaggctctctatgacagataaagagagtctcagtgactgcgtaatgcttgggagccgaagcaaatagatgcggatatcttgctgtcgaaaaattcagttgcctggctttctgaacagcacatgcttctgtttttccacttctctcacaagcatatcctcgctgaccagccgtcgatgtggtcaggatgtccactgctcttttgaaaagcattcgctgttgtacaagaaactcgccttttctcctctgccacacttgcgttgtcttcctgaaggaggacaaccgtcacgtttcttgtgagctttcctgaagcaatcagaaga

SEQ ID NO: 2445 - DNA, 2486 bp, Toxoplasma gondii
  source 1..2486: mol_type = genomic DNA
gctcttctctcccttcctcttgtgctgctgtttttcttcgttcagcggcggcgcttgccgagaggctctccgctttctcggacgctgtggaggctgcgaggttggagcgcgcgcgagggtcgacgcatttggcgacgaggacgagtcgctgcgagaggctgttctcgagctcctcgcctctgccgcattctcgcttgaggtgcagagccggcaatgggcagcaagagatttctgcgagcgacgcgtgagcgccgggcagcgcaggaaaaggactttcttccggtgcggggacctgagcggactcgcgagactcagccgtctcagaggcggactcgcggctcccagaaggcgaacagagacggtctgctttgcagtcgaacaccgaagcagccaccagctggtgcggagacgacggtcgctgaggcatcttcggaaagcagagaaaaacttgatcaagaacgagagaaactgccgaggcaaggagaggcgacacagagacaaggggagacgagacaaaaacgggagaagactggccgggagaggaagcaagactgaagaaggaaagaagaaacgcagcggcaggacgagggagcaactcctgagagcgagaggaagacagagagtcggctggagagaagaaagccgcagggggaaggggagggcaaagcggaggcaagaatacgtctagctctcttcctagcgactcgcgacaatggtgaagagagaaacgcgctgggggagagaaagtagagaagcgaagccggcgagaaaagctgagctctttgtgtcggcaatcgcagtcccttctgcgaactgaagcctcgaaattgcaaaggcgccgcgaagaactcgcagaaacggatggaaggcgaaagaagcccaaatggggacgacaaagaagaaggagaaggagaaggagaagaagaagaaggagaagaagaagaagaagatgcagaggtcagagtgctgaccgccggcgagagttgagaggcgaggggcgctccgtctgaatggcttctgcgcgatgagaagaaacaaagtctttatgaaagaagcgcgtcgaatttcttatttcctctagacagctctgcgttctgggagagacatttgcacccgcttcgcggcaagtgcggtgtctctctgcagctctgaaactgcgaaccgcgagggacgacgagttccccttttcgcctggcggaaggacgaacggaggatgtaccagaagtgaagagagaagagagacttctctcgggagaaggtgcagtctcgctcttcagaaaaaactttgttttttcaaatcgcattcgctggtccacaccggaaacaccgccgagacaaccatcgggcgtcgaggagaaggagggagtcaggagttccctcggagcggaaatggtctgtacgcgttctttctcgctctggaaacaacgctctttttcttttctttttcagagaggaagagactcgcgaggcgacgcgttgtgtctcgcaccccccagctccacccttggtcgtctttgttctcgtctccgctgtgcatgcgttttttccgcgaaaagacgcccggcgagctcggcgctcggcctctctctctcgcaggtttatcgacactcggacgcgcagagttcgttgtccagtcttctcggaggaatttttttgggactcgctgagcaaacggaggaaaaggtttccagagaaactcaaccgtctgtctgtgtctgtgtctgtcaccgctgctgcacgcagcttcgaggatctcttcagacgtcgctctgcgaggatgcggctggtccgtcttctcagtcgagtgcgacggtctcttcagtactgcttctcgcttctcgcgtctcgcttctcgcttctctgatttccttcgttcttctctccgagtatccaccagaaaggcctcctggagaagaggtctttctgatgcgcgagtctccttctcttccttctgagcttctccggactccacacctgcatgcgttcgacctcggtccccgactccgattaaccatctttgtttctgcgtctcctctccttctttctcctcgccgtccgaattcgctggtcgcctcctctccgcctgcgctcttcgctcgacagtcttcggtggccggaggagcctcggaacgcggggcggtctgaggcgagtattggcgagctctttctcttctttgcgtgggcgcaaccgcagtttctttcttcgagatccactgttgtcctcaaaatcgttcaacaacaagaggaggaggagaaggcgcttcgtttcgcggagcaaggcgccgtcgcagagcgttcaggcgtctcctccatcgccacccccaactccgggactctcttctcttcgtcggtctccctgtctccggttcttctctgaccttctcgcttccgcatccttcgcgccattccctttcctttttcgcgtctctcgtccgtccagtcttcgagagcgcgcaggaaccgcacctgtgaagctcggcgaaaga

SEQ ID NO: 2446 - DNA, 1666 bp, Toxoplasma gondii
  source 1..1666: mol_type = genomic DNA
ttttttcttcatctttttgagacgaacaaataaggaaattggcacagatggcgacggcgcgcctcgctcacgctctctcttggggaaggcagaggagagagatgcgaggaaaacgcagaaacgaagaaaacggagatgacaaagaagcgaggactctctcacattgtcgttcactctgctccttcttcttcctctgtcctcttgtgcatatcttattcctccctcctccaagccctcttcctgctctctgcttcctgtgttcttcctcgtttcctcttccttatgtcttctttccctcttctgcttgctctcttttttcagaagacgacaggcaacgagagaggtgtggaccctcgtctgtcattctgtggacctccgccacaaagggaagaagaggacgcagaggaaagacgcgggattttagtgaactcgttttcttccacgaaagagagatcttgtcggagttcttgcagacggtggccgcgcttgttcacgataccctgagactcctgtattcatcatcccccaacctccctctcgccaaaaatgcagacactcagcgaaatggaaagctgcaaaaacggaaggcacagaggtcgatcaagcgaaggagctgcagaccggaccgagtcagctgtacaaacacgtgagtccctgtggacaagtctgggctcacacagatgtagagtcacctagacatttatatacacacatgcataaacgcatacgcgcatgcatgtacatacacgcttacacccagacacgtacaacatgcacatttgagtgacatatctgaaatagtggaaaaaagcgaacagcaagtgaactgaggtcgtttccagcgcagctggataaacagcgagatgcacacgcatgcaggggaagagaggagctggccactgtgtagcgacggctgcgggcctacatagacacgaattttcgaggaagctgaacccccgaatcctttctcttcctccttccgagagatgtgactcaagactagacgaaacacgttcaagcgacgctttcactcttgcaaagaagccccagtggattgactgcgccttctcgcgcggtccactgttccgcatgcaccgcgttctctcccgtgttcggcttatattccgacgcaatctgagtcagtctcgggaggagagcccggagcattcgtcctgcgtttttacaccgctttcccgaccttcttttctccgttcgccgttccgtcgcgtgtacatgcaggagttcacggcgttgtctgcttatttgtctttcgtgcttctggggaaatgcgcttcgcttcgtgatctctgcccctcgtcccctcgtttcttccgggaggagctccccgagaggacgcgtttcttcggcagaggcaagtgagttttcgctgtctctgcttcattgtgagtccccgtctcgaaattattgccgtaaaagtcgaggaaagcgtctcgcgctcacgccccgcttcttcctgctctgctctctcccctccgctctcgtcttttctctctgccatttgcttgcttggcggcaggaaaccgtacaggggtgtcgagcgcgagaggaaaatacgagcaagtgaacaccgcagaacgaggaagagccagggtccgcagacggccagaccgggagtggcggcgaggaagaagcagacaacgctgaa

SEQ ID NO: 2447 - DNA, 3239 bp, Toxoplasma gondii
  source 1..3239: mol_type = genomic DNA
agaagattggagaaagcggataaatccgattcttcagagtccttttcgctctcttcccaaactcttatttgatctttttctccgtcagcgtagacctcgcagtggcttctctcatctcgggcacccttggcttggcattgtctcgcgcgtttgtgtttgtttgtgtctctatctttcttgtctttatctcgacgatttgccatgttcttcgctgcctcatggctccaaagtacgcaccatggaaaaaacgcgaaatccgtgagtcgggacaacacagctgctgagaagccgttccaccttcacaactgtaaacgcgcctgttgttggggtgcagaagactcagttcgccgctaaacagaatccaaaggcttgcgatgcctcccggtgtatcgccttcgctctttgctgtcgactctctcggtctcgactgcgccctcagctgtcgaactggtaggagagcctctctagctttcgcgcatggtagtttctctgcacccacccggtctagttgctgaagcggtgaagacacagagttgaacttcgtagctccggcggcgtgtgaacaaaaacagggtctcctccgttctgccagatgtatcctggggaggtcaaagaagtcagacaagcacccccgcaaggacccgacgaccagcttaaacaaagctttctccaaaaagggcatggcaacgccgtgtcacacgtcggttatggatacacatttctcgatgttggagccccgtaacggtaaacgttttgtacgcatcagtcaacggggggagaaccgccgtcctttacatctcacgcatcgaaagaaattacttcgaggatggtagtatgtgttgatgacaccccacaaactggcttcagccagaacagaggtaatcgcggtgatctgcgaagatttcggtaattgtcacgtgggaacctaagcacagaatgagacttaagttacttccctcttctccgctggaaaggtccgtggacagtcgatgtcgcctcgacatcgaaggcaatctccactgccccagtcgcatgtgctcatcctgtccaagtcctctcaccatcgggtaatcacaggatttctgctcgactgtttggctgtcgacaatcctctgtatctgtgcacatttttcacactttcagctaccatcgatttcttttttgaaaagactctctcggagaccacttgggggggagttcgcccgtaaggatggatgctcaacgctcaccatggcgaatcaaaggagccgtggcacaaccggccttcggcttgcgttctttgctgatgatgatcgattcttcctgagaactttaggggagacgaggagatactgaagacacatgagaggatccggcctgttaggaaaaagagacgcctccctcttttcactaaaagcaagaaacgctagttgggttttcagagacttgtggcatgtcctctcatgtagttcctgaaacctacagcggcagtgaaagaaagtcccatctcgctttctcaagcctcagttcttgtcttctacttttgtggtacagcttaaatttgggtggtgaggttcaaaacggaactcctcctagtcaattcgtcatccagatgcaacgatatgatgtccttactgcgccagtttacatcgggtgttcggaagtcgttctcccacttgactggtgttactaaggtctatatcgcaggtagttgtacagagagtgaacaaaacaggaacttggaaacgggtctctccctcctacctttcagaaggaatcccgcgatgaaaaagatacccgcacatcctcgtatttgctacggactctggaactttcgagagcctcgcttcgtcgctctgtgtgccgtgagcaccacgaaaaatgaaaaggtgctttctttgtctacatcttttttccgccaagagaagacaggcgcttggttcagtctttcttcacctctcttttctctccaccgtccccgtcttacttcctccctcaccgtcatccgcaaaagaaacgcctttctctgcgctcttcttcatctgcgggaacgttcctaaagaaccagtccacggacattaaatccctctgccagtctttctcctccttccctcccttttattttgcctcgtcttgcctcaaatgcatgcacacatacatagatgcattgtggggatatatatatatatatatatatatttatacatacatatacatacatatacatacatacatatgcatacatatgcgagcttcagttcttctttcacttccaggccacctaggtcccttttctcctgttgtcttcacctgcctgggctgtttaggcgtttccgtctcagctttttttccggtcgccgtccttctgcggcagtcttgctctttcgcttgctcgtctctccagcctgacgccccccactatgggcacccgcggcgccgctaaccgcctcgcgtccaaaaaggcgggaggagaaaaagcggaaaaggctgccatttgacaggaaatagtcaaacctgaaaaaacatgtttctgcccaagtcgtggctgaaaggaaacgatgtggggtgttcgacaagccacggaaggcgaaaacgcgagcaagtcagactcaaagtcgccggcgaacaagcggttcgttgactaaaacgcatgccctctccatgcatgcatctgtctggctgagaggatttgacgttttttgaggaaaaaggaaagcgttgacactcagaaggaggctggctcgctcgttccaccaagattttctctcctgccgatcctctgtctctctcagagccttcttgacgccctgcgaggtttcgcggcggcccacactctccccgcgcctctctgcgggcgacagactttggtgtcggaatttagggtccttcgatttgttttctgctcagtacacttccagtttttttctgtgttggtttctcgtgccgtccgtcttctcctcttgaaggggaggcaccctggagcctcatctgcctcgagcaaggaggacgctctgctgtagggggtttgtcgttttctcttcccgctccgtgacctttcagcttttctctcttttcagcttgttttccttctcttgggggcacccagcgtctgtttcttctctgtcgcgcgttcctctgcccctcattttccgcttcaacagaccctgtccctctcgcttctttctgttctcacgcatttctccgcctttttcttcccgctctcgcttctctctgctctctgcgtttttctctcttttcga

SEQ ID NO: 2448 - DNA, 2243 bp, Toxoplasma gondii
  source 1..2243: mol_type = genomic DNA
acatgcaatttcttctccaccatcacttctcgcacgactttgtggtcctcgagcaggcgcccgaaaggtttgccggcttcgacgactgcggcgcggactttctccggcagagcctgcagacgcactaggagcaggccgtacgaaaaggccgggccgatggcgccgccggtgtccgacctgctggaaggcgtccgcggcaaactctcaggttcctcccggactgtctgcaacgctcgactgctctcaggttcacccgacgagggctgagaactcgcctcccttggcgcagaggccgcagccgctgacctcgcgagcgcggaacaaggagacacatgcaaggtgatatgcctcaagtagagggagtccccgcgggagcttccggcgccgtccgccgtccccgcctccccttcgccatccagggcgaggacctgacgccagtcctcgtcgcggtgcagcctttcctggaggtcggtctttcgcttttttccggctgggcaatcggtgcctgcacttgaatcgcgcgcggcgccgtccgcaggaccgtggacgaccgccagtgtgcgaagaagcaagtccgagtcacacaggcgcctccccaccaacgttaggttgcagcgatgcttcagcatcagccgaaagactgggcagagaatctcgtcttggcgcgtgtcaggacaagccgccgcgtcgatatcgccggaactcgctgcgaggacttccgcagcgcggcttccgtcgccgaggtcactgctgccagcggacgcttcgcaggcagcggcgtcgaccgactccgcagacgcaggatgcgatgcacctccctttgctgctgcgtgaggcggcgcctcacgcatctcatgagacggaagagatctgccgggtgtagcggcctccccgtcgtcgatggcccagaacgaggcagctgcgaactggctcttcagccaagtcaggcgacggccttcctcagactcatccactccagcgcaactcgctgcgccgcagctgcttgttgcttctgcggctgcaccactggcaaaagcgtcgcgttctgccggagaattccctgaactcgtttctgtggacgcctccgcctccccccaccagctgtacgaactcggcagaaaaaacggatttgcccgggatcgcgcgacgcagcttgaagctgcagcagaaactcccgagtcctccatggtgctttgccgccaaggtcctgcgccgtgtccacaacccaagtcggccccagacggactcttcttgtggaggaaatgctccgagtttcctccctcgcgcgtctggagtgtcacagttcatgaacgggatctgtccgccttttcgctcgcacagaacaagcagttacgaagcccccagcccagcgaccccgaggggaaaaagcggcagatgtcgccgcttcctcgggtctggcgcgtccacaccgaagggaaaaatagaaccgtgccgcttgtcttccagatgggtgaggaaaagcggcagaggacacagaccatcacacccagcgagagaggcgaaactcagcatccagattggcagacgctgtgaaagctgggctcgggtcactttgggactgcagagaaaaacactgcagatccagaagaaaaggaactgaacgtgatctgctttggcaatccacccctcagccctgcacacgaacaaggaactgcgaaagacacgcgatacttccgaactcagagctggcacgatttgcgacgagagacaccgagaacgccagagtggtctcgacttttcgttgagagttgcgttgaggcaaaagcggcgaattccttctcgcgttcttttccgacttggagccaaggcgggaccgcaaggatttccagtttcttcgcacgaaaaaacgaatttcttgtggcggagttgccgcaggtattatggagggaatgcggtccgagacgtcgcttctacagaagctgcctggagtgtcttgcgaaggagacaccacagcgaagccgcttcggtgcgggacgaaggacttcaacgttgaaaataatctgatttttcagtcttgaagatccttgaactttgcatgttgagcaaaaacagatcctgcaacgaaacactcgacaaagactccaggagagtagaaatggatgttgatttctcgtctatgtcccaacgtgaggagacagctctcacaaaaagacagcatcgggcgaacgtcgaccacaaggatagacaccccgaagccttggagagcggcaagtgacaacgga

SEQ ID NO: 2449 - DNA, 4300 bp, Toxoplasma gondii
  source 1..4300: mol_type = genomic DNA
gatgcacgccagtgaatgctccctctaataatcatccattcatcaaactgggtcccttcacgcgtttgccttcagacagaggaacaaattggttttacggaaaatctgtgaaagcaaaaacagggtttccgctcagcaggcacactgtataccaaatggcgagcgcgaaaccgcagggaaaactctatttagaagataggaagatgtgcctatctgttttcttggacatgtatggtgtcacttttttttcctcctagggcttgaagaggtcggcagggaaagacaggcgccttttccttaccttcctttcttccggaacagaaaaaaatgaccaccacagataaacgaagagagggaaattgcagtcgggcctgctgagtgaggacagcgctcctagagccgcaattgtgagcatgaggcactcggccacttctcgtgcgtttgccatattgcctcttgactgtgtcgcgggaaaggaagaaaattcttggctagaacaaggcaagcgtcgctttgcaagcagaaggacaaacgttacgcacacagcgacaaacacagaatccaaaatgtgacggcggaaacaggatgctgtcgatgcaggagaggaaggcggaagtatactggaagatgcaccctctcgctcgaatatccacaacttcgcggagctacttgtagaggcctttcggcatttaacaacagctgcggaaaacttccagcaaatttgcgttggaagaagaggggcgccacggcgtttcctgccgaaaagggaagctggaatacagattgagaacgttacggtaaggtactgtctttatgggggattcagccaattggagccagcgacacagccgtcttgaccttctagagttgcaacgggaaaagacaggcgaggattctgctcaacagaaactctctcaggatttcgtatctcagctggcacggacgctgctaaaaggcacttttcagcttgctggactaagaaatgtgtgacagcagagtcttgcagagacaactggaaagacgcgtttgtacaagagacttgacgacatattctgctgaagtgaaagatatcctcgctcctctgtggcatggaaaggagaaatcaacaacgaagggagattcactagagaccgggtcaacaacgactttgagaaccacgcagtcaaagccagagggccagaaaatgtggccagtcccgtaactgcaaaatgcttggatgttgatgagctcagattaatctgatacggaaaacgacttttagacttgagtgtgacagtcgtgctacgagaagttcccctttcacaatttaggcggtagaggcagctgaagcatgggtcaggggtgacacggccggcgaggaaagtctagaaacaaactcgcgtaagacgcgaaaagatggcctaaaggctcaaatttaggaggcattcgaaaagtgcgctacgctcgaaagttgattccaatatgtacctcttcaattgtactattaaatgggcaaacacctgcccagtggagcaaacacttgaaaagacggaaatctctctggctactcggtcatatggggcaagacataccctcccttcctcgaagggttctgtgaacaagacacacaggaaattcaacgcggcgggaaaggatatgcacagcgatgtcatctcctgagtagcagaacttttttgatgaatccttggaaagaactcccaaaacactttaagatacttggtcgttgagagagttttcttttggttctggtgcggagccctttgtggaacacgacgggtcgccgcgcacagcccataaatagtttgcgctggcgtgagctggtgaccaaagactctgtccttgccttttttatggccctccacgtaacaaaatagcgatggattcaagggtgacataccaatcatcatctccatgcggcaaatgaaaggaacggcaacacaaattggttcatctggcgtatgtggggtaacccagaatctacagagcacatggccacaccgactttctggtaaggcttatgctaggatgtgcgttttgacttgttttcgtgagaacaaaagagctttggcctgcgggagagatgcttcctcaagacttccactttggatcttttgctcgcgagcttcacgcccgaacttgtaacacttatcaagaccctggttcagagccagaggttcttcagggctgctctgaaagcagtacttgtgttaccacgtcgatggtggcgcatggaggtccaccgaaacctgttatacgaccacattttgttgtgaagaaccaagagaatgccaactgatgccagcgttatgcaacaagcaggaaacgattctgtgtttgttcctgtatttgacgtcgctgccacagcatctactgctcgaaagaccacttgcatgttcaaccagaagcagtctggatgcttcagctgcgaagcaaactgagcttttgttcgtgagccttaacctaacccaaacgcgttttcggtacaactgtaaacgtggtcggaaaagtctaagaaatgctccgtcatgccttcgcccagtcacattaccgcattccacaattttgtactttatgttcccttacatgcaatcttggtagccgagacggagagctagcgacttgcgcccccatcgaactcataagggctaaatataaaaccgtcccttgccttctcagtcgcttttctcattcgcctgagtgaggcaaccggtaaaagagcactgaaacgctaactaacagtgcacacgttcgcgtaacgccattctccctcgtcagctgcacaattccgcctctaactgattcgtccgagtgttctaagagtggccatcggctagattagagatgagacgtgaaagtcccctttatagcagcctttgtgcaggtagctggtcgttccgcttacagatatggagcaaggttcctcgatacattcctcaaggtaggaaaaggatgctctttacgtggacctttcagagcgaccagatatttgctgtcacttgtggtgtctctccctcacaactatcacttctcaacgagcgatagaactgcgggtgcaaggggttcagagttagaatctcagtttacttcagtcccatacagctcttcgcagaaaggatggaattttcgagagaagggcaagaaaagagacgatcgcatgacacatcgacggtgtcttcagcgatgtcttgggggaaggggatatatgtgtttcgtacggaacgtggacgtttttgccgacttactccacgcgggattgggagctcttccactgggaaattcacttagcctgtctgtaatggtagcaggggagtgctgcaaagccggattagaccctctgaatagaaaaaaggtttacacaagtagagtcaggacgcctcttatgcatggcaagtccgcttaccttttccatcaacagcggctcctgtatgccacggaattgtggtatctcccgtgaaagtgccgtatatgccttacaagagcggctggtgttgcgagtttctcttcgcctgatgccttctagtagtgcccacttctcgctgcaatctcggaaaaggagacacgcaacaaaacaacattaactggtcatgtgaggtctgattctgccccttttgctctggttctttcttaaattgccgcgtctagctatggtcatagcgcttttgcggctatccgtagtcagctgtcttgaaaataacgggacccacggagatcgttggggaagcccaggtgggcaacagatgtctggaacgcgcatttattttcgttgggttttctgtgggaccttgtctactgacaacttcggactggaaaagccaggagactggaaactggtaaaggggaaggctgcgcatcctgatgtcttggcgtggccgccgtggcaccgcggcgtgcgtcgcgacgcgatacgagggcgtcggagaaagtgctcctgcgatacgcatgctgttttgagaatcatatttctttagctcatgccagactccacctgtggctgttcgtttcacggacctcggggagaatctcgcctgcattctcaacaggccgccgtatcttgcggaaccgcggcagttgacccggacgaggctagtctggtacaagaggggtaggtgccagtgagccatgcgcagaagaagttgttcttgttcgtctctttttcgactcgtttttgttggtgaatgacgagctcattcgaaaggcacactttgccagttcatacatgttttctttctctgctgcggctcgctggcagcctcagtcgattcgatcacccgcgagagatacataaatttccgcggaaaga

SEQ ID NO: 2450 - DNA, 2470 bp, Toxoplasma gondii
  source 1..2470: mol_type = genomic DNA
ttcgatcttcagtggtgaaagagcaggacagacgcgcgagtctttggtctacagatcgaccctcgaccaggtgtagagagagaaggatggagctcgatcgtctgtaccaacgggcttcaactcgcctttttttccgcgtcgacagacatccagggatgccgagctgacgcgctcacgccgactctctgcgggggtctgccgcaagtatctccttgcctcggaccggaaaggcctgtgcctcagccgactgctctgctgggccttggaggcggcccgcggaaagcgagggccttccccacaagtgtctcctccagggcggcggcgcgggtgagtagtgctggaaaaactccgcaggcgtctcgcaccggctctcggctcgcctctgacgaagtcgctggagcgaagacggctcggccggtgccgcggggcctggcaggagactggcgggaggttggttcttctcgcgagaaaggacgcagagagaaagccgcgtcgtcgctgcggaagagctaccggggagccggtgcgaccgcgaaggagaaagtgatttcacacaactcacgaaggaaaagccgagcagctctgaggcagagcgagtcttctttggaaactggggacgacgcttggtgtcgtgaagagaccggaagcgacgacttggttttccacggaggattcttgaaagacgagactagagagtccgaaggaaaaaaagaaaacgaaaaactttcgacggggaacgagggagcaaagacacgcgaagacggtgctgcccgtccagctgcatggaaagacggggacgccctgccgtcgatttctttccgagaatcacgcaagacaagagagcgaagcaggggaacgagccggaaaacgcagacctgctctggatcttcaagcgtcacttggaagaggaaagcaagtgagcagtctcgccctgctcagttgacctgagagcacgcaagacaggcgcgaggcggccggcaaaggagtgcagagaaaacggaggggagaagagagaagagaaaaacgaagaagaaaaagaagagagggggtcctctgctcgggccgcgagagagagaaggttcagagactcttcacctgaggaaaacggctggcgtaagggatctaaaacaaagaaggaaagactgcagacatagctgcagcagcggctctcagctgcacacagagagagctcaaggaccaagacgaggaagcagaaacgcgagagaatgagtgagaaatgaagaaggtgacggtgcgacacagagaacgaagaatgcgaatgatgccgaacaaatgtcacccccgtacaatgtattcttgcgctcgacagactcctgagctccgagcgtcgacgcctccccgagagaaagtgaaggtctcctaaacagagaaacatggtccgttggttcctctcatttcgctcctgtccccgccgcttgccgctgtctcatttctcgcctcttttttgcttgtgcgggtctccttctccgcggattctttcatcaagagtctccgagcggagacggcaggcgcgaagcctgaatttctccctttcctctgcaacgcgaggctttgtggcggctgcggagagacgaaagacagaagcggcgagagccttgaagatgcgttttctacaactccgacaaaggccgagaggcacatcgacgaaggccgacgaggctggaaaagaagcgagtcgaggaaaaagttccagcttttttttcagcgcccccgaagacgcatgcatccgtggagaggcctcgaacggttcctccacgttgaacggcgttcccgtgtctctttgtttctcgagaaaacctgaatttgaagagttctctgccagtgtgcagagccggtgcatatgtttcctccctgcgaaagcagcgacatgcacacatctgcctccttcggcgcgttacatctgccggaacagacaaacagccgacgaccgcatgcgctgtgctgactgatctgccgaggttctttgggtctcccttgcggaggtctagatttccagcgtctcccgcgtttctctctcgacaacgctcgactgtcgacagggcgattcgcgactctcttggcacttcctcgatgtgagctgcacagaagtaacgcctcgccgtccgggtgccgagttgcagcagccagagtcgtcatcaggtacgcagagaccggagagaaaggcattcagagtcgggaatctgcgttccttctggcttgcggagaaaacaaaggcaactgcagagagagacgacgagttcctggggcgcggcgattcctttccgcgaggagtccagcggacgttcacgtcgagaggagcagtgtggaagtttgcgcaggcagaaacgcgcgcggtcttcgagcttgtgtgttttcctggtgctctgaaaagaagagcgagagagtcggcggagcgtagcagaggcaaacgtcaatggccgagggagctccgatacttgacgagcagcta

SEQ ID NO: 2451 - DNA, 1710 bp, Toxoplasma gondii
  source 1..1710: mol_type = genomic DNA
tcatcattatctgcattacattttctagtcaatatgtgtctcctgtttattcctcggccagcaactaagaagatgagaccttcgatactgtcgtggtacaagcttctgctggcagagggctttgttctctggtaggtgggcgcttccgtttcgtgcttatgacagacaccttccccccccttattgatgggcgatgtgcacttgattgattgaatatgtgacgcgcaggtattctcttctacagttatgaatatggaagagatcactggatgcgtattctgcccaagcaacacactaggcaggtgcagcataaccagcatcgttttctctgtccccttgcattgtcagaacagagcttgtacatgtttctcgtcggttggcgaggaacgggatgccgtaatcgcttgttttttcagctgtaaaggtggctgtgtatagcgctgtgcgaacacagaattcactgccaactccagagtgacgtgcagttgacaccttctgctggacgtctattggacacacctatcactgcgacgatagctcgattttaccgtccggagtgacaagatagacacgcagtgcttacttgcaaaccagggacagagcgtcgtatgcttagcacgagcaatcattaattcggagtccagcgaacacccattcgaacagaggctaggaagggtatcacaacggggatcctttttagtcaggtgatgtacagactgcggaccacaaaaaaccaatctgacttctcagggcgattcagaaacgcagaatcggtgttatctagggaattgacactgcatatttttgccaacctaggtagctgcggcagaagtgcacgcatttttgcatgtagctgccgtgtaaaggggctcttattccagttgtgcgccgctgtggctggccgttgcctgcacagcaataaaggtgttggcgacggtacggacctttcgagaatttggggagcaaatcgttcttctgagggatactgccagtttcgttccgccgctctccgcgccaagacatactagacatgaagaacacaacgacgagagactctcttggaatcagctggggcagtttcttggcaggaggcagcggcccatatgttccactggatctgcattgcaaactcttccacttgacggacgttctaaagttcgttgaaaggaaatgtgccggttgtgtgttgtgcgacacagtttctcgaagtgttattcgacagaccacgagcgcatgcatgcacacaaggtacatcttcgttaagagacaggagtggcggcggacttgcgccgtgtggcttctccaagttgtcacgtgctgagctcctcgaacaatccttcagggtaagcccttggaaaatatcctgcggtcgtcaaatccattgctccagaacgcgggtgtctccggttgtgtgagcgacaccggcacacacgcgttgagttcacagctccatgagttgactgagcgtcacttttccaaaccaagagacagtgcaagctaggcatcttcaatttttttggggtagcatcgcggattgacacgttcttctcaacggtgtttctttccggctagccagacgcgtgcgttgtttcctgaaacaaggggtaaacaaacatgtgagctcgtccgtctccaaatcggctgccctctggcacagacagagcagaactgacgtcatttcttgcaagcgtattcccagaacgacttcca

SEQ ID NO: 2452 - DNA, 1838 bp, Toxoplasma gondii
  source 1..1838: mol_type = genomic DNA
gtgagtcagaacatggacgaggcaaccatctcatatcctatgttgctggtcaagatggacatggctgaccctgggctgctgagtgttggccgttaatgattctcccctttctgctgctagattgcgactatggggaaccaacagccagactgattcgtcccaagtcttgtctttagaggcagttccatcacctctttgtttttgctcggcagcctggggaaatgagactgctgcgattcaaggttttgtcctgcttctgatgctcaagtcctcctctgtttccttgtatcttcaactgtctgtgcctacgcgctgcttatgtgaatgcacacatggctacatactcatgcataccaacagccatacgcatacgcatgtttatatacatatgtataggcgcctccttgtggttgcaggcctcatctgttgtggtcgtgtggtatggagcgtgtctgcgatacatcagatatcacccgtttggttccgaagacaccgcacctctcacgaaaggtggtctcaagctgcgagtcactctcgagcctgtcccgccaggggaaagagcagctgaagcattacttgaaggttagcttttttaagcatgtgaggatcccttctgaggatataagccgcccacgcgatggcaaagtcagtgacttccattgacaggaacgcatgctccttccgcacttcttaacacccatctgaaccgtgatgccacatgcttccctcaacccgccaggggcaacagtagaatcactgttcaactctaggctttaccgtttagtaccgtgtagcagaaacagagcaaaatccagtgcagagcgggtttacgaccccccagaccttgcaataagctaaggtggtcagcaattcacaaatgactttggaatccctcgaaattttcacatagttgtaaaagcagtgttctatgaagtggttccagcagtctaccgaaacatagattgctcatccctttcacgactgcacgcagctatgtccccgctgatagaccgtccgaaagttaacccgttaacccgacgaatcgagaaagtgccacagagtgacaactcctcctaaaccactttcatgtgggtcctcaagtacaaagatcgccgcgaaatttcccatctactgcaagcgaactgtcgtaaaacctgagagcaagttgtgtttctggtggctggccgcgtacttcttctagcaaaatcctcatcctaaatgtgtttcgtaaatcggaagacccaacatacgccgaatgacttccccacaaaaaggctgtgaacgtgtagccatggggcagtcacctgtgaccagctggtgtgtcgtcgagttacggtcgcctctataatgcaaattcagttcgtcgacagcacagagtgactatttgggcaaatagccgcgctgcatggaacgcgatcagacatctagcaggcattagtttcatttttgtctaggttacgaagcactggtgctgcgccgtcagcagcttcgagctgcggttgacggagatccgtctttggttaccctttatcgtcatttgcctacgactccgggagacctctatgctgcaaaccgcgctgaggagcgagcgtacgcggcttccgccgccgcagctgctgtcgccgcaatgccagcgcctgaagcagcttaccacagtggagcactgcagccaaggagttcgtcaactcataccaaaagagtagtgctactgagagacaagaaacgccaggacgttttggacacgagactcggacgtagccgccccctcaccgcctgcgtgcgtcttctcattctacttcagagatgcggcgccttggtacccgaaagccagggtccca

SEQ ID NO: 2453 - DNA, 1872 bp, Toxoplasma gondii
  source 1..1872: mol_type = genomic DNA
cgttgtggcagcacattgtagacaaggcgagtcatggactacacacgggatacgccgatccacgtgaaaaggtagggtagcgctgcagtcgtgccctgcgacgaagtggttcctcgtctataaagcgagaggtagaaacaagaacacgaaacacatgttgtaacggaataatggagacactgtaataacaccatggattcgaggtgcagacgccgacagcacacaccaggatagaggtgctcttagcgcctccctgcaactgttacgacaggtgacctggagcggaactactgcgaaaaagtcgcaagaaggcaaacagtattgtcctcaaaaaccatcacgcctaatagtgtgcagataacgactatctgtgcgccacgcataacccagtaagcgcaactgtggaactcgcaggaccagtgcaatccggtaaccctgctttgagtgttaccgaagctcaccgggaatcagcctgcgccataccgtcacaggcgggccttgtaggagaggttcccatgcgtggtcaacacgaccctgccgcacttcctgggcaaagtggaggaacttgtcgagctcggaatccgaaattgtcggtgggacccgtctccgtttcctctttctgtttccagctgatgagctgggagccgcggatctccctttcgcctcggtggccgagtacggaggatcagaatgaagagccagctttcggtctcgtccgtcatttttctcagacgagtgattttgactagaagaataagagaagttttcccgttggtttaccggagagggatccttcggaggctcaggcggtgacaggttatagcattcgacggaaaggctcgtgcacaggcagcaacatgcaaacgccgcaacgagtagctggcagaaaaacaacgtatagaaacgcgacacagagctcgtcctttcacgagacacaaacgactgatggggataggctacttcattactctgacgagatcgagcgtctcgccagccgtgaaaaatacttcgccggtgccggtgggtgtttttgggtggcgatgagggtagaaagcacgagacagatcctctcaaattcagcctgtcatcgtgaaaggcattggaaaaactggtgaaacgaccgcgtaatttcccatggcaaggatcgcggcaacttgagagacagcgacgtaaagcagaggagacaggggacaggcccgctgactggtaaggagaggaccggggaaaacgcctcaccacggggtcgttctcgggatccccgtaaggtggcatttttccagacccaaaattctcctggaaaagggattcacctgcatagtccctatgaaaccacacgaaagaggaggaaatagcctgctcgacagagataccagctaaactcaccggctcacggcttttttacagagtgcggagagacacgcgcgttccaaagtccccggaacctgctcgttgagagcgctctggagagatttcgattcgttgactttgccaaagttttcagacaaaacgctgctgcgaaaaccagtcgcacaaagaagagacacacgtcgaacgagacgctccacacgcaaacttaacagttgtagcacgaccgcgtctgcaggggacactgcatgcacacagccgcttctggagagtgaacagaacgaacggcacacgatgataacttcttctacaaacatggaattcgttcgttatccctcagggtaagcaaaaatgaatgctgtgcacgtatcatcttgtctcagtgtcgtttcgctgccacgtggtatttcttccccttcgaacattattgcatatggcaagttcactcagacatcagcgcggcagtaactccacataagattgctgtcatcaaaacacgtacaacaa

SEQ ID NO: 2454 - DNA, 2646 bp, Toxoplasma gondii
  source 1..2646: mol_type = genomic DNA
tgtccgttctctgtttattccactcgaccgacatttcctatcctttcttctgcagtgaaggaaaggtgaaacaccatcagccggagaagagaggaaacctgacaaaaggctcccgagagaaacacgaaaggcttcggtgtgtcttttttctgatccgttttcttctctctctctgaatccctcccccctctgcttctcctttcttccccctgtcgtctttctttccattcttttcagcttcccggcactctctcgtctgcgcattcttcaacgttgcggggtagctgtcgcgctgtagccgcgcgtcgccgtttcgacgtgcagagcgccgccgccggcaaccggagggagcagagcgacagtcgcatgagaagcggcttgtgcccagtcagttaaatgatcttcttggatcggaagaagcgtttgaagtagtaggcggaggcgagggcggccaggacgaggagcatcatgttgacgaggcagaaagtcatcagacggttggcggtactgtcgcttgcctcgcgcattttgctttctttttcgcgcatgtagagcacattcgcgtggtacagtttcaggcggtcttggagtcgcaggagctgcaccatgacttcgtccaggtgctcagccttcgcgatctggctgtagtccctggcctcgggaccccacaccatcttgaagtccacagcgagcttcaggcgtccagtattggtcacgcagaacgtgtgagtgccggtgagcgccgtggtgaacgccgtgcgaacgtgatctttcccctgttgcttgaagatcggggagtgactcacggggtcctccgcgacgaccagcatgttcccgccttgcgccgtcgccgccgccggatacgcgatgtggaactcgcccaccacgagcacgtgtctagacagctgctcaccgacgcaacgcttctggccgggtgcgagctcgatgaccgcttggaaggcggccgcaggcggagtcagcgccagagacgccaggccgagaccgagggcgaagaggaggaaagagcgagggcaagagcagaggccgcgggatccccgagaggatcggcgagaagcagtgagttgagacacagacatcttgggcgcgcggaagggtatcggccgtaaagagagtgtgcggacagatgcgaggagcggcagagagggcgacgggtgcagcgagggagaggcgagaaggacgagaagagtagagggcgacagaggcgaaaggtgttggcttcaggcagaaagtaagagagacagagaaaggggggaaacagaggaagaggaggacgcgctttctgacctgcgatgggagagacggggggtgtgacggcgtgggcgttgacggtcacacagagagaggagactggaaagccagataattcaagtggagtcgacgagactggcgatcgcacacagcggacgctcgcgagacaagaagacctcagaaagacaaaaagcaaacgagaatgctgcaaaaaaacgctgcacgcctctcgagctttccttgatggaaaacaccttgtccctcaaaagacgggtcgagaagaggcgccgacacagaggaactgagactgagaaacgcgctgaaaacctgggagttcagaaacgaccgacttctcttgccccttccgagagcggtgccacggtgaaaagtggaaagagctcccaagacaagagaaggtcgcgagcgccacagaggtggctctcttccaggtgcacgagacgacggcggcaacagcctagacgcgcgaaggcgtggttccctggacactcggcagaaagtgaagacagacacgtttgtgtgaaggcaaaaaacgtcaaaaacgctcaagaaaatccgaacaggcgccgccatgcgcggacggggggcactatgaccgcgcgagccaaagaagacgggatcgcctgtgcatgtgcgaaaaagaggcgacgcactgccagcttttactcgaaaagaagtgcggagaaaagctcgagatgtttctcgcgtgtcttgcgaaacgtgtgcgtcgaacccgggagtttcccttgggaaaacgactccagaaagtcgactttcgcagtattgcttccctcttctcggctgcctgctctcggggctgtcgccgtcgcagctccggtgtacagacacccgaggtgttcagaaggggatgatgaacccgctgagagagtgcgggcggccaaaggaatgtgttcccgtgtaaatgacctgttcccggtcacttcttcagaattaagtgcttgaagggctcgcatcgtgaagcagaaaaaggatcgcagtccgctgtgggcagaacggtggcgtgtcaccgccctcctgtcacgatacgtcttgtcctgggggttccgcgggatcctgggcattccgtgaaaaaggtaaaaactgcgacactgcgcatgcttacttgatgcctttctcgtcaatgaccttggaaacgaatcgatttggtccgtgcaggcctctttcccgtttaaaagtccgtctgccacgccgtatacggcgaccttgagatgctgcgagtcctgccccgtgtgtgtgcttgggtgtatgcacacctgggtttcgcgtagtggactgccgtccatgtcaaggacctgagaggtttgaattatttggctaccaacgtgccagctgtgccta

SEQ ID NO: 2455 - DNA, 3731 bp, Toxoplasma gondii
  source 1..3731: mol_type = genomic DNA
cgtgattagttcacttagccgaaacgatccttttatgtgggagcaactttcttgaatataaggataatatatgtgctacaataacacagtacgtacgcagtcgaaacagggtggttgggggtgaatctgtggctgaacaaagctctttacgggacacgggaggataatccgttagcagcgtgtttcacctgacggacggtcgtgtctgtttgatttcaggaccggcgatttgccaagtgcaatttggttcggattgacgggggcaaagtggacgatgtcccagagttcgaggctttggtgatggtcaatagtgccaacgaagtcgtcagcttcgagccagctaaggcagttcccatgtgcgatcttagcaacagcaacctggcttttgttccttgcggtgacaccgcggtccgccaggaccacacccgttttgtgttcccgctgccggacgcagggaaggtcccgctgcagaaaggcgaggacgaacagaaagaagagggtgaatggaggatagcgaaaatcgcccgcaccgcaggcagcatggcttggaaagcagcttcatccaccgtggcagcaggaggcgccgtggtaaactacatgatgggacgatctgcgcctcctgcagagtctttgcagcagaaactcatcacataccaccaaaagggcatttcgtacagcctagaatgcatggatcctgtttctgagacaaccatgaggagcacgttgaatccgcccctggcttcaatcattggacagggattcgctgctgtgctggaactcgaaaacagcgacgtcaacatgcactctggagggccgtatccggagagggtttaaaaaaacgagggtgttctgacctcaacttccttaccagtggcagatccgctggtcttctgacatgttgaaagtttctactcagtagagtccaccagcgctcaaggcctcgtggtgaaaggtatctcgtgtctacactattggccagtctacgtgtgtacgtccgtgcgtctgactttgaaccgagcggtaactttcccttttcttttttctctaactttttcaaacatgattggacctaacggcgttcaactgtcaaaaatcacaaccgaacggacatgttcctctcaacctcccttctgtgttgagccccgggttgagaatatgctgtaaccgtcctccctgttctacaaggtcccgctttttcacgcgtagaaatgcgagtgggggggcgactgtggattcgcaggttcttgaaaactatgcaaacatttgtcaccacgcacccttagtcggcaagatttcatatacaatgctacagggagtcatcgcctcacactcgatggtcgagccgtcaaatatgcatccaacgtgcaatacggaattacattttgtgtctacagatacagaacagcaacagaaaatggggcatccatttgcgctgaaaacgggatgcatataaagtgcgtagttgtgtaaaatgtgctcaggctgcttgcgcagtccgccgagacacccttttgcatcggcgtctcgtcgcttccttctgctcggtcgtctgttctacgccttcctcgaggaagagcttctgcgagtgtctgcttcgtttgctgcttatatctgaaattgttcccacgtttgtacttcgacgtttttctaatcttgaagtgttccgcgaagacccccgaaagagtggtaggagcacaagtgtgtgtcagtaagcatcccgtgcccttttgtcccctagaacacactgcctacctaaaatggcgtcaattttcatgtagtgcattggccatcccattccagaagcgctgaagtttccatctttaccagctgcagcttccaccgctgtgttagcgagacgggacaacagagtgtctggttgttgacgctgaaccatgggaagactttttgaaaagctgggggacaaaagtccgaatctatatcacatcagctgcattttttcactcagagcctagattcattgcattaccatgcctcttcttgttccgttttggaagaagcttcagctgtgttttttgtctgcgttctgcgttctcttggcttgccgtgttcaacccccaagcgctgctttgtgtcaaccgttgtcggcacctgttttccttctcctgcgacgttcgacttctctgttctcccaggggaaactccatctttctccggaatcctatatacaattcgaaactgagctttttgcccaacttcgaggacgaaatccagtgactatgtcgccttttcgactctctgctgtgccacagcggggctgagaaactaggcagcctacgaaaagattgccgcccagtttttcttcccgtgctgcgttccctaccctctcgaaggtgattttgtcgtgtttgaccgttcagaattcgagaaagctcgtgcataatgtcactgtctttatggacgcgtatcttccgtcagctgcaggtacccctttgtatggctgtgtatgctgattccgcgcacctctgcatgcactgcgatagaaaagaaaaaccgtcaacgcggaagacagtgacccctccgccactttgggctttgtctttcgcgaagaaccactggaagaactgttgtcccattctttctgcctccagttaaccttcgtgctcacatagcgaagaagacaactcggtcgggccgtctgcaggcataaagtgttctgactttttcgatccagtcaccgccattgaggcccaggaacgcacatagagaaatttatttttgttaggcgagtgttcgtgtgcgaaaattgaaggtgaaaatccgtgcgtcgtatgcgtggccgggtttggccgacgtacggagcgaaaggacgcagataattttgaacagggaaattcaatacccaagtcggtggttctcatgaattcctcgtcatctctggagccgccctccaaaactaccagtgagaaactcgtcggccgctctcgtctgtcttttaagaatttaactgcctgcccgctgaaacgaagtacggcttccgagagagtcgctgagcgactccatcggttttttctttccacctgtcgcaagctgtgggttagcgcacctttttcgcggcgatatcttctccgtttttcgaaagagctcgttggtgcaacgcacagctgtgtcctaacccacagttcaccgtcgaggaagcctccgtaatagaagccgacttcattgtgcctgtctggccctccagtgtacatacaccggagaggggcgggctgccgcaagcactcgtcggtcttgttgttccgttcgaggaaatggtgtgctctggcccgcattcagaagagcaggcgtgttttgcctttgcttttcagtttgcgaacctagaggctgccagcagcacattttaatttctccttctttgtttttggtttctccctgtccgctgctgtttgccattctgtctgggcgtggaggattagatgcggcacccgaggtctgcagccagttctcgccagcctgccgtacttctgtgcagacggcctttggaagaagcaacggagagactctgggagaaaactcagtgcaggttgagaacgctgcactctcgacgcggctgacggagtgtacgtacaccgcgtcggtgggcagcgaaggccggtcgtgcattaacacacctacctatattcacggttgctcgcttccttttttccttcctggcagagatccctttctgtcccctacatcttctcctttctcccttttttctggatccaaaa

SEQ ID NO: 2456 - DNA, 2932 bp, Toxoplasma gondii
  source 1..2932: mol_type = genomic DNA
acaactgcaaagcgtttccttaacagagcgcacggcggtggattccgtgaccaacggtccgtccacgggaagcagaagagaagtcacggtgtctatgtcgatttctgtcgaaaaggaactggtagcggaatagaacgaagagcagccgactgtggtttcccagcaagtcgagcaggtcaaggcgaggaaaggcagaaacatggcagtccgtggtggacactggttcctgcgaaagtcccgttctgcgcaaacagtgaaagggcaagtctgatgtgcgtgtcattcggtgtctctctgtggcgtgcaggcgtgacgtacggccgcagtgggccgctcttcgaagcgtacaaacgcgttctgatgggggaggcccccagcaagacgccaggtatttgtcttgagcgcgaaactctcgcgtcggcgtcgtccggcactgcggaacgacgtggagagaagccgacaggcttgcctgaaagtgcctctacagctgccagttttcatgcaagcacacgcgaatgcgagccgcccaaagccgccttgttttgcgtcatgaacggcgcgcttagcgaaggcgtgaatttccacgatagcctagccagactgctagtcctcgtagggttgccgtttcctagtatcaaggatccggagtttcagctgcgggcggctttcttttcatctgtgctcgagcggacacagagaaacgcagacacacacgcttctgtcggggaaaaacgcgagagcgacacaacacgcgtcgaaaaaaacgtcgacaaaactgatagcggagcagcgcgcttccgggcggcgcaaaccacagctcaggagaacagtgttcatgggcgaggagggaaccggagcatggacgctgaagcctcgaccgtgaggaagcttgagagaaaaccccgctgcgctgaaccaactcccaacggccgaaccagctacggtttactccactgcttacaaacagttaaccaaaccatcgggagagcgatccggcacagccaagactatgccgcagttttgctcgttgactgccgctacactgcgaaacacatcgagacgcttctttctccgtggattagagaggctctcgacgcctcccgcagagccacagaggagtctatttcgcctctcgcccgggactgggcagaggaggacctctgccgagatcgcttcgggacagcaaaggaggggcactccgccaggccagatatacccgacacgtgcggcgggttgaccacgcgacttgccggatttttcaaacttatggcggaacatgaaaaactgaaatgtacctctcgtgactgcgtgcgagcatgcagttagaaccaagttttcacggcgattcgacgccaatctgtgttttgttggattcaacggcttgctgcgtccgagacgttttcagtgccggtaactctagcgggacgtcgacttctgaaggagttggttttcctcaaaaacagactcgctggagggttccgctagcaaacaggaactcttggaaacagggatttcgagtgcttctctcgtcagcgacgccgggcactggatgtctggttaacgaagaacgggagagcgagctacgtccatactctcacgtagacgtatgttcctcgagtgcgacagcacaacatccgtctttgaacacgccacaaagaaaaaaacacattcggcgatgcaggcatttccccttccatgggaacgcaaacgctctacctcccccgtgctgctcgagctgaaatcgtagaacgcgacaggcgtttacctgctcaatgagtcctgacaaacaatgacggttgtgtcaacttgagtgcactttgctttcaacagatcagatttccacccgtcctggttttcgtggctcgccttcgagaatccactgtgattttggcaatacaaaggagtcaaacgttgtggcgacgttttgcacacagagttggggtttccctccatgtggcttacaagtggctctgctttggacgataccacagagcgcatagatgcaatgcatgcatagatggcagtttcaaacatgggttgcgttgtccgcaaagggacaaaaaacagcgtgagggcctcggtacccgggcgtgatacccagcatgaatgggtttttctccgtaacagtacagtaactctgtccgagcaacgaggacattttcgtgaggtatgaggctcgtttgcttaacctatttagcaccacaaaagattaagctgaacctcccagagagtcctacactacacgggacccacattaccctgatcagctctgtggtgttggtttacggcagggacgtcccggtcataacatccagcgagtccttcctattatacgtattgctcaggcacctactcgtgataacaactccctctgtaaactttgcttccacccagtcttttgcaaacaccggatgcattgtagaaggcaaatatgaactctttctctatacgtttatctgcttaccgctgacttgagggggcgggtatttcgtgttggcagggccccgataaaaggtttgtcgacagacatcagagttccaataaacgcgtcaagagaatcactacatcctgccatgctgctctccaccgtgtctccgaagcagacatcagtgaaacgctgtgttaagggtaatggtacccgtgattgtcacgactttccggtactttacagtcattaggcagtcagtgaatataagattggagacgaggcgcttccccaaattggagcttcatcactcgcatgctctagcatatcatcgagaggttagagacgcgacgcctttcggcgtgacaaacgttggcaagcgtgtacttggaggcggtccaccgtgctcagtcgaactggggttgccaccaaagtaggcacaactactgcaattgcagtacttttagcagaaatttctttcttgggggtcgcacgtaagaggaagta

SEQ ID NO: 2457 - DNA, 1992 bp, Toxoplasma gondii
  source 1..1992: mol_type = genomic DNA
cgattgaagcaagcagctctggatgggtcgagagcctgtggagagactctctcgatgtcgtccacggagaaaaggaacaaaggcgttgcttctctcgacgagaagacctgcgccttgtcgcgtctctgggggatttcttggagacgcaggagacaacgaagaagagcacgagggggaagaggcagagacgcgcgaagaagggcagggaggtgaacagcgagggacagaggagacggggaaggaagaccggagagaggccaagtgaagacgagaagagagagaagagaaacgagaaatgcacgtggagttgtaaaactgtcgaggtggaagaggagcgccgaaagaggtgccgagtctggcgggagaagaggaggaagaagagatagaagtgacggccgaaggagaggtcaggacagacctgataggatgagcgcagccgggcgagggagcaacggaggagaaggaaacaggagaggaagacggagaggaaaaagaaggtgaaatcggagatgtcggctgtctgaaataagacttctcacaagggggaattgtaacagaagaaaacgcgttgtctaagtttctttccccccagaccttctgtcggaggcccgacagagaggagaagaaagcacctcgtgtcatctttcaaaaacctgtgccagtcccttttcggagaacacacaggggacgagtagacgaagaaggcgagaagtggaagaaaaaagcgctgaactggaataacgtagggagagaggggggtcgcacaagttccagttgaccacacggctctggatgagcaaattgaagatattcggcaactcgggtggctctgacttttgattcgtgtcgagctagtcgcttctcacgtattccggaaaaatttccacgcgtacacaagctggtgtttatccgtcgccccccccagcggtgtgatcgacgttctcgtagtcccctgcgttttcagttgctcccttttccgagttgtgcttcccagaaagacgatcagacaaggaaagacggaaggaagcagcgacagaaagcgacactgcagacctcaacagaggcgtcgactcaaacttgattcccgcggccacgttctcctccaggtgtacatacacctaaggcgaaggggcatggcaagcggttttcctcgttcggcgcacggagcgatgctgtggagaaatgaggaacagaacaagaggaacgacgcagggaaacagaagttcaggctgacaaataccctccgcttttccccggcgaagcctcccgctattattttccagtgcatgcgaagacaccgagagagcagttcgcaaaacactgcttggactttctctgggttcttttctttctcttcgttcccctttttcggaagctctttctgctcctgactctttacattctgcatctcgctgcatgtcaatgctcctctaccttattttgttaccccccttcctcccgtcgcctgccgtccccgtttccgaggatgacacccgccagctctgggagccagccgcggtccttgcccctctctggaaagcgcgactctttcttttttcagttgtttcgctcacggagtcgttgcgtttcttgtctgcgaactctctccagcgcgcttttgcctctccggttgtcccttcaagtcaaacaggtcatccacgcctccggccgacacctgccgagacgcttctgcctcgcttcttcccttccaaggaaacctgcataatctctgccaccgtctccgcgggggctctttgcgggagttgccattcttgtgtgaactctcttcggaggagcgaagcggggcaagataagtgtgatttggttctactctgttgataagtcaaaagatcgaaggtctcatcgtaaaattgcatgtaattatactccttgaggaggtttgggaattcgaagaagctccgccatttaaaattcagggccttgacacatgcttctccctcaggctttcatatgtttctctcaatctaaaaa

SEQ ID NO: 2458 - DNA, 2651 bp, Toxoplasma gondii
  source 1..2651: mol_type = genomic DNA
gtctctgaagctctctgggagggtcgacgaataggaggaagaagaagaaagaaacgccggagaagaagaaaagggagaggcagaggaagaagggggggaacaggaggaagaagaagagacagacgaagaggaaggaagtatcggcgaagcagtagagggagaggcagaggaggaagagggagaagatgaggaggaagaagaggggaagacaggagaagaggaggacgaactgaaagctgaacgagagggagacacccgagaagagatagaagagagaggagcggcgacggcgtctgtccggagcccaacagaagcccccgggggagataaggtttggggaggaataagcttgtgcatggtgcttgctggtcgcgtttcatataatttcgactttgaaaacttgaaaaacgaggtcaatcccgtggagcctggagtccaggaagccgagaaacaaagaggcgacagctgcaagtagagcgaccgaaacaaactcacgaatagctagcaacattttcggcgaagacggcgcacaagttgcattcaaagatgcaggccttcgcgcgacgctgcgacagaaggggaacatacacagagacagaagaaacgagtgacgtggacgacgaagaggacaggtagcgtgaagactcgcagaagagaactggccgaacacagctagaggagaaggaggaagaggaggagacgctgtgaaggaagagaagttcagtgtggaggccgggtgccgggagagcgatgcgaacggaggaacaggaaaggcaaaaacaaattcaagggaaaaggcggcaactcacactgagtgtatacgcgcagcggaagacgaagacacccccggaatcagacgaagcacgaaagaaatgcgacgacgaatacagacggatgagggggaagggcttaacagcagctgagtaaaggaggagaaattcaagaggaagagagttcagcggaagtagaaatgagcgagcgcgaagtacacacggcaagcgaggaaccgacgcgccgaaaaaagaagagatgaggctggatcacgaggagaaggcgaaaaaggacgatgccgtggcgcgtttctctctcttcagtctccgtcacggccttctttggcctgaaaacttaaacacagttcaagcaggggaacggactactcgtttttagatgaaggaaacggcgcgttcctctgttcccaagacacaaaggcggtggtctgttaagtgtgcagtcccgagacagccagcaattcttcttccgacagagaaaacggcgtctcgaaatgccacgaacatccagagaaatctgttacccgcccgccgcaaaaaagcgagacgctgtgtatgtacacttgagcgtcacatcacaggttcccgctttccagaaggcgcagcgccgcagcggctgcgagccagagcttgcttttctcgtggttttccgttgaaacgacaatcgcccttgcctttctgtcctctctgtcgcttgctacccctccgacagcagcgagattccgctttttgcggagaccgccgccttcctggttttgctggcttatctttagaacgctttgtcacagctaccctggagagcagctcttcgcgccgcgatctctgaactcgatcttcttgtcggtgagagggtctcgcccgcgccgaaaaattgcgggtctgaagcttgtccgcatgcgccggtttttcaaacagactgcccttttcttgaacgactcagcctgttttttccgctgcgaaaatctcctgccttttcacccttgtctgtgtccttttttgacgctctgtttttttctcgcgaaggggaagtctgctctcttcgccaagatctccggtgtacagaggcggggcggagggagaggcgcggcatcctactttcttcgaccggaaaacagtggaaggaaaaattgacttcggcgggagcaacttctttcccccgtttttcggctatccttcttcgagatcaaggtggcggtcgtccttctcgttttcctcaaagtgtttgccgctctggggccgtcgctgtcttcacgcgaaggctctgcctcacacactggaaagaggcgcaaaagatcgagagcaattgtttttcttggcattttcttcgtgggttcacgggagattttctgcaaggctcctcgcttccctacgcccgtctctttggcgccttgcccgtgggagcacggcgggggtcgattcatgataccatagaccctctttgtcgacagccggtcaatttcttttctcttttctgtcatatccaacaggttgctgcagtgtccgcagacgagtcaaacggtacagttttctcccgcattccattccctctttgctcactgctctctcgtctgttttttcccctccctgcccttaacgctgtctccttcctcgccgacatcgtctacagcttcttctgcctgccctcattcttctgcagtctgtctcttcctttctaagtaaaattccttctcttcaaataaattgcgacgtcttgcttcttgaatttgtccattttttcttctctttctcccaggctctagtcgtataaatctcgccgtaccccactccgtcgagtcatgtgtgtagggttcttctgttagaagctttctccgtctcttctccaagaccactatcgatcaaaaa

SEQ ID NO: 2459 - DNA, 2377 bp, Toxoplasma gondii
  source 1..2377: mol_type = genomic DNA
aagatggcagagacgagaccgtgcgaaaagaggaagactctgagagggggagagaagaggggcaggtgggcggcgaatgaggcaaggccgtatgagagactggagagtcggagagatgctgtgaagagagggaggaaaagcgtttgtctggtcgctttgcccgaggaggaaggaggcctcgaccaagatagtgtcgtccgcgagaaggtaatcctccagtgggttgagagtcaggcgaagaaccgcgagacgaagacagagtctgagaagcgagcgggcgttcctcagacggcagcggacgagcggaaggagaacaactgggggaagcggatggcgaagaagaagagcaaggtataacgtcggtgatgtctgtgggcagcccaggcacggccggcagagacgatggaggactggggagacgaatgcactgttttttcttcacttcttcttcattttcatcgtggcttgagaggtctggagacctagatgtctctccggacgccagtcgctcccgcaccgtctctccttctctcggctttgcaagcgttcgcagagttccgccgccacgacaccctcgaggcgtcgaagaagacggagaggccgcggatacgctcgactctgcgcgcgtccggttcaatctctccggcgcgcctcgcccaggcgtatgtacacccgatgcgtcagccagggaaggtgcatgctgcacgaggggagaagaggcggcgggagaggagacggagtgaggggaggagaggtcggggggagggaggcctcgtcgagcctggaaggcgaagaaggcgaaaggattgtctccctcgttcgccatcggaggagagacagcagagggggacgtgtacgggggtcagaaggtgactaaaaaggtcgtttgaatggagcgtggagaggaaaaacaggggagagaagagaagttccgggcagacggaaccgcggggagaaggaaaaacgaggggaagggaaatacgtcaaccgtgctggcctctgtcctttctctctttctctttttccttgtctgctctgcggcgtcgcttgagcttgacgagctgctcgcgctccgtggctcgtttcttttcctgggtttaacgtcttctccccatggtcgacaagagccgagacaataggtgcaaggaagcgaaaaggaacagcgacaagagcaaaggattctctgtcggcgtttgcggagctagagccgcgagtctctcttgtgtgcggtttccgtggtgtagccggagacacggtctcccgcgagaggtgaccacgaaggagagacgagggagacccggaagaacagagtctgcaaaaacacaaaaaaaggagaaaaaatgaagaaatatggacgacggtttgcgggccaaaggtgatgttagagtctctcgcctcttcttgttttctgcctgcgtttcagggggtatatagagcatgcgcagtccgaggagacacgcggacgacagcgaacacagaagctcaattttttcgccgcttcgaggagaagaagtccaacagcgtcgaccgtcgtttttttttgcagaagaccgcctcatcgagttgatgagttctgcgtccactcgaatcttcaactccgtcgtcttctcgccttcgaattcgacgaagaagggtagagagagacacctgggggggggggggcatccgagcgagaacgccctcctctttctctgtctcgttccacccgagtcgtgtcttgtacatgcttcttttcttttcacatttttctctttgtttaattcgctgcaaagcgcccccactcttccagttgtccgtctcggaccgctggaaatgaagaagcacgaacgtttccgccgatccgtcagaaagaagaagaatttaaggagacgagacgcacagcagagagaagcgtcagacacctcgagaaagcgtttcatcctcctcctttcggattcttccatcttctcttctttcctccctcttttgatcctccctcgactttgaatccgttcatcactctctccccctctgtcccccttctctcgtttaccgcgcctccgggtcttctgtctcctctttgcctacgctaaaaagcgacagcgcctcggtctccattgcggcctgttcgtctcggcgcgtcttcttctcttctctcttctctccttggttttccctcttttttctcatctttctgtgagtctccttcgacatcaaaggcctcacttcgactcacgctgctctcttccgcttatgcgtgcgtctcgtttcctcttgcgtcttcgccttcgtctggtctaacggagccgcttttcttactcttctcagagacagtctcttccacttgttcctcttcttctcttcgtctccctccgctctgtcttatgctttgggggaa

SEQ ID NO: 2460 - DNA, 2172 bp, Toxoplasma gondii
  source 1..2172: mol_type = genomic DNA
gtgtattctcaccttcttcggaacacatccgacatttacgcaggtgcctccgagtctgttgccgtcggccagacccacccgaacgttgtacgttgccgcgcgtcgagcgcacgcaaggcctccgctgccgcctccgataacgaagaggtcaaagtgtcgtcgcgctgagagccatggcagagaaacaaagggaactcgagagcttctgcgcatcaattcgtgaagaaacgcttgacaaagaggcatgccgtaggtagaaacgaccagcgacgagaggtgcctcgactgcgcggggtccatgtcgctagaggtaactggggtgtctctacacaaccggaaacgaaaggctctcatttcatatacggagaggccaggggcaaatgacgccgagggaagtcgaacagccgtcattcataaggaatgaaaaacacttgtaagtgtttctgggaagatcgaggcaaggacagcgcgcatcccaagagtccgtgcagaattcgaaggggatgactgaagtcaaaagagtgaataccaaaacacttccacggtggccttgagaaaacagtaagagactctgggtatgcgtcgcggccaccgctggtcagattcccagtgtatagacatctgagatgacacaccaaaggtaatttccgatcagccggcacatcggaacagacaatctgaacagaacatttgaatagcttctggaatctattcctcgtaccacgcttcgagtttagatcagcgaaatgagggcttaaaacagaagcgcgctttgtcatagcgagtgtcgacgcagaatggccaacggaatcctgacgaattgacctacttgctgcggccattttcgctgccattcgtgaccagcgtgcagaacagccgtacgaacagttagtttctccccgaaggaaccgcccgacgaggaagttgctggggacaggacgggaccgtctaccacgaaacacaccgtcgttctcagtgacaacaacggaaaagttggttaaagttcataccggtgcagatgcactaactagccagaagagccaagaagagatgcttgacaactcgcccgactacatagggtagaacatttggcagttctggcagaggcgagggcaactcactgctgtaatacggtggaaatagtttgtaaacggaagcaaagacgaagcccgaaccaaggagacgacctcaactttgatgatgtggcctggtgacgcgtttccgtttccttgacacacagtttcgcacacggatacggtggatgcatgcaaacgcgcattttcaatgcatgcgtcttttgcgagggactaccgcacgcaagcggagggaaatgccatctattgcactgtgccttttcttttacaaaacgaagatattcagttctttgctttctaggctgtgacaggtcacgcagcgccttcgtgctcgcgactctcaagaaggtgtgttggtcctctttgcgagcagctgcgaaatggtcctcgttttttcgagaaaacaacttaagtctagccatttgtaaatactgtgttaaaatcaatctccttcttaatcttaaatttccatatggtgcctcttttcctttttcaccgtcaaaattgactgactggcatgcagtacacgagcgcatgcgagactgccaaaggacccttgctggctctgacagtacattttggagagttccaagtcttccccaaagccaatttattcgtagagaccccttgcttcgagcacgaatcgctcttgttgccgtttatctgtcttttcgttgatccatgtctgccctctaaattcgtcggttcgggactcgtggttcaccggtgcatgcaaacgctggtcccctacactccgactttaattgcgtgttcgtatcgacatgtttgagaagaaagagagcagtagtttcgtcttatccgaatgaaggcaggtggtgttctctcgcttctcactccagcccgagatacaacatcgcatttccattgtgacaaaaaaaaatccaacagaaggcgcggtgttgcttaatatacactcgaacaaacggcggattagacattgatagcgtgttttctaacttggtcgatggttcacaacttccgaaaaaaacgaactgtttcatcatcggctcccgctcccgcgtcaaacaagagttccttccgccctcggtgagcacca

SEQ ID NO: 2461 - DNA, 3091 bp, Toxoplasma gondii
  source 1..3091: mol_type = genomic DNA
ccgtttgcacactctgccgcttcaagctctggactcttttctctccacgtgtcgaggttcccggcgggttttttcttgcttctgctcaccagatggtctgggtgcgggaagcaggagagtcgggagttcttctctctcggaggaccaaacaatgcctcggacttcgtgtctaggttccatctctctgccttttcgacgaggaacgtgagagcagggacgcacggtgagcggatggacaggctcgaccgcgtttgcgggcagctggcggccgtcaacatcccgctgctcagccaatccgcgccgctccgagggcgggagccgattcgactccgccgcgagcggaaacgacggagacttcggagcgaacggaggcatcttggagggaaagagaaagacgagttaataatggtaagtacggaggaagagaggaaacgaaggagggggaggagggagacggcgagagcggattggaggacaagtagagagaaatagagggactgagggacaacagaagcagagaaacgaagacacagaagagagagaccaaggcaaaagccaggcgagaaggtgagaagagagaaagaaaagatggagcagacgtttttaaaaggtgaaacagagggagaaagactcggacgagcagacaaaacgaaaggcaggacggaaagagggaaatcgagaattccgaggaaaatgaatcaagggacagacgcacgtagaaagccgtggggaccgagggaatgggagggtcctgttggaagagagaaatgaacagaatgtgtctggttggatagaaaactggaaatgagaaaaaattcgcacgggggaagaacggaaacggcgacacgacgcaacgttactgaaaaggaacagaggaggtcggtaaggcgaactccaccggcgaggcggcagacgcaggtgaacgcacaagccaaagtaaaagaaggggtaaaaccggaaagacagaaaaacaatgaaaacaatggagcgaaggggaagcggtaccggccgtcatgaaaggaaatcgcgttcttacgaaagcagaccggggatacagtgaggaacgggaaagtttggtccccataacaggcagaggattgtcagaggcaacgcgaacactgccaagaacgaaaggaaattccgaaaaaaattcggaaggaaagcggcggcacacgccacaagaaataacagagaaaccgccgtcctgtctgcctcagtgttgtctcagcccctggctcgtcggtgcacggacgagggcaggaaaccaattccccctttttcccgcattccggtcatgccgtcggttccatcctagcttttcccttagaactctgctgcgtgtgacagaagccaagaaatggcggcagagaaaaaactccaagaaagctctcatcgccggcggtcgagtgatccgtgccacggcgttggagatccgaaaggcgcgttcgcgttgcgctggtgtgtcccttgccaacgaaaaaaggacggaagacagacgaagagaagattccggcaggcgtccgtgattcttatacttttctgtatctccgccaccacgtgttcagaattttgcgtttgccaccccgtttgtttcgaaaagcgcggttactctgctgtcttggctctctctgcagtgcatgtgttcgcggcagcctcggcgtccacgaaccagccaaggtcaggcgggtgacagccgaacggagttgtcttccccggcggcggaccgcttcctagaaaggcgtcttccagtgacttggaaagcgtatccaactcaattcatgttgtaatagagaaatttttgtcctgtgtcggggaaagcgaaacccgcgcgcgaaaaagctgaaaacccgtggatcccacccacagggtcgagtgtacatacacgcgagccactcggtgcccgatcgggcacggcgtctcgctcgtgaggagcacgagtcgggttcgcacacttcgtttgtttgtcgagtcgcggagtctcctttcccttcggcaaaagcaacctgtacgaagtcgtctttacagtaagatcattttcatgtgtttccggccactttccacaaaagtgtagtctgaaacttaaccgcagccggacccaatggcacctgcagcgacccggcctctggctcgcctctcgcagtcgccgtccactgtcgggccgcggcgacgggaactgtagcccgcttctcggggagtttcctagattcttcgcgtcaattctgttgcgcaaaggttcgcaagcttctcgcgtaagcaaatggatggacagtttcactcgacgcgctttgttgccagcaggtagacagcggacggcgcggtaaaacgccccccttcgcggcagccggaggcgctcaggcgcaaaccgcgagcagcttttccctctcagagaccagaaaatgacttgggaacaggtgtaaaaagcagatgaaaggcagacaaacgggttgtgttgtgtgcagaagcgaggggccggcaagaggcgcgatttctccgacacagtgcaacttttcgccggcttttttgccaagtgagaagcctaaacaaaactgctctggccaccacactgtggagggtgtgtgccagcgtgtgtaaaggaggccaatggagtaagtcctgttattctgatgcaagacttgccgtccgcaagttatctgtcgtctcttcggctgtgagaaagacataagcacacggagcctacaaatatacacctctctccgctgtctcttgggtcctttgtcatgtcctttctgccagcgcccttgtcgccgtctctctagtctatcacccgcgtccctcgtttctttcgcgattcgtctcctagtcacctgcgactgtgacttggtcgatgactcttcaaagtgtcctaccttcctgtgtacaccttttctagtttctcttcatttcctcaccatcgccgttctcccgtgtctcccgtcggtgcgaagatctcctgtctccgccacttttgtggtttttttccaaagagcgtccggcgctcctggctccctcgtgccggcctgctctcctcacgagaccgccctcccccccccgccgacaaaagtgaagaactgaaccacaatcaacagcaaaa

SEQ ID NO: 2462 - DNA, 3583 bp, Toxoplasma gondii
  source 1..3583: mol_type = genomic DNA
ggttagttggtctcacacggaatccgatgatggcgagagaattatttgcccacgtaataggcagagaacatgttggaaatcaaccgtatcacttctttccgtcagaacgacagctgtacagattcgttggattgcgtagtttgggacgggctttgcaatttcggcggtacaatgaggcgatggggaacgctggtgtgagggcacaagtcggaatcagtttgtggacagtctctttgctggcgttgacagcccttctcgcgatacggttgggtagaggtaccagacactttgttagaaatcggaaacgggtgtccaacataaagggggaattacaacgacgtccaattattcatgaagagcaagctcccgtgcccgagctggaggaagcggaagacgagtgttccaccgtggacgtaacttatctcagttttttgtattgattggtgaacgcgatgttgctgaggactgccaacactggcgcgattcgcagtcgctcaagaccccgacgtatttacgggaacgtccgcccgaacgcgaaagtgagatcgtttttcttttgtcgtggcctgaggtgtgcgtttcagtctctgtgccatcagtgcccgttttcctttctggttgtccgtagatagaggcaggatgcaatgatgccgttgcatattccgtggtcagtgttttttgttggcctcaccaccacaggcagctgttgaacataccaggcggatctccaaataaagccctgcagtgtcccctcggccgaatcctaaagccctgaaacctttcatttcacacggtgcaacgcatgcaatacctatcatacaccaactgaagttagactccttgtcactaaaaagccatgcttcccaggttcttataaatgacctcttgctcggcagcatttgcacggtggttttaatggttgtgatgtttttggtaaggcagctgaagcagacacgacggccccttcagctttgtaaagaaagtacagagtacatgttgcattactgttttagataaccctctacacaagtcactggttatggcccaagctccaccgtgctagcatggtttcgaacgccctcagtatttctgtgaatctcttctgggccccgctgaagagagtaatccaaatgacttttgtagagcagacagggtggacgttcaactgccggctttgtatcagaggaagacatgaacgagccacgagtcagctgagcagcgaggacatctccacacatctaaaattagcagttgtggagtggtaattcctgtttcggattccttaattgaatgtatcattatgcgcttgtagagcgtcctgcagtcaggtatccactagcctcgtggcgaatgagcctgtgctttcaagggcaaggtatctgcattcatagggaaaacaccttttctgcctatccacgaattgaaagacatgcgaataacacttggctggcagcgtgaaaacaacgcaatacacaaatagaacaaagtgcacaactgaacaccacgtattactaaaaatataattagggcaatcggggacccttttgcggacaacattgtgcaatgttgcaaccattacgtaatatctggacggcatattatgacgtttgatgttcaaatacacgctgggcaccactattcttcattcatttaacatacagtagtgaaaggcaatatacaacttggatgcctgccaggtttgtcagagaagttgctgtcgtctggcaggtgcacagtgaacgcaaccgctcatttgcgtggcttaccttcggcggcctagagaaaatctgcctccgtcgtagctgatctaagagcaacgggcaagtgaagacgaggttttacgcaaacatcgggagccgtctgacgcgtaatgctccgagcgtcctccgcgaaagattgcaggaaaggagtaagggcgaaagcagatttgactgttggtcgcgtcacttgcagagcgctgcagaggagatgtctctctccgttgggcagacgaccaaaaccgtcgacttgttcgaagacgtcttccccggtcgcacatgctgtacagatctcattcccttcggcagtttgcttcctgatgctcgttttgcccttaggtctatctttctatagtgacgataatggggacggcctttccactaatgtaccgtttaaaactgcccgtttaaaactgcccatctttactgggacttactgcgcgtttccgtgacgctcccttttctggagaagcctagtgttggcatcgaccggacactctgcgataggctttctcgactttgcaaatacaccaaaagcctcctcctctccttccgatactgtatcgttgattcgtctttagttcagagtgtgtgcgtgcccaaaaaattcaatattcccgtataaaaacgctgagagttttcaacgagaaccgccgacaacttaccctgctgctgcgccactgatagcgataatgaaaccatcttctgctctttttgatacatagagggcgtgggatcttcacagtttctttttgtcctcgccaccaagaattttgggttttccatgaaatctggaagaagaggcttgacagtactgccacaatgacgacaagtagccgtctcagcagtatgatctactcgccatttctcagtaacagtctcgttgttctacaacaagccttccggtgccaattataccaactcttttctgaaaaacgactagcgctcgcctcaaaaccacgataacgcttggcacaaagactatcgcatgtccgccgtacaacaccggcaacactacgtgcacaaaaagagcgtagccagatcgcgtactgtaatgaaagtaatgcgcgcatggtgagcacttctgcagtggccacactataagtagagattgtatctggacaaaagatccgcgatccagaactgtgtttttcaaatcgaaaatcgagacatgaacacaagacgccacagggtgtgtgcccgccgatgtgcgtgttgcctcggagcgactatgcgccgaaaagaaggagacaaagaatagaagtttcgccgaaggatttgtgaagtcgtgctttcccatttccacatagatctgaggatgccttggcttttttctactcaacggaaagatcttttttgcagccccagcgttccctaaggccgcaactggggggccttaccactcagcggctgtttgccgcacacaggaggggttaaagcaccttttacgttttttctctccactgctccttggttctgttttcctgcgcgtatccccgtttctgggaaccttcccagctaaatcttccttcattttgctgcgggaaatccttttcagctcgtgtccccaactagactcgcagatgtctcgagatgtcctgcgttttcccgcaaggcaagtgcgcaagtgtcttcttccaatgccaccgtcattcctactctgctcaggtgggttgactaaagcatctttcattgagcaaaagcaagaatttcctctgtcgactttcgcaagtgacatgtcgcgtttgggactccttccaagcggaaacgatgcggatttctgaaaagctacgcgggttattcgtacgcaacctgagaacccgcca

SEQ ID NO: 2463 - DNA, 2747 bp, Toxoplasma gondii
  source 1..2747: mol_type = genomic DNA
ccgcctgagaagaggaacagaggccacgacaccaagaagtaaaaaattgggtggcacgcctctcaagcttggaaggtcactgacaaaagattaggagtggaagccgtgtttcctgcgatgtccgggttcttggcatccgccatccctaggcagggcacgaacctctacagttgacatgcgaagctttctctgcagcggaagtgttggaacaaagggaaaatggtgtcgttttctgccgtggctgcggccttgagtctgccgcttgctcgttcagctgccagcgaggaagcgggcgcctggccccagtcgtgcttccctcacgaactgttcccctgtcactctcgcttcccagaaacgattcctccagtgtacggagggagacggaagcgacaaacagtgatgaacaacgggaaagagctccccagaagaaaacccaaacctggcagtgaagagggtcaggcgggtcgccttaccaatctcgtcgaattcttctagttcgtcgtcgggttcgtcgaaagtgtcttgctcctctgctccgttggaagcatgcaggagagtcgactgctgggaggccgcctgcttcacctcctcctgaccggccttggtgctgtccgccgccatttgttctctctggggcttctgcgagacgcgttgctctagtgctgtccgttccgcggtagtcgcagtggcctctacgtccgcaggaagcaaaactgctaagacctttttcgacaatcgctgctccagatgtcccctttttcgcagaggtaacctcggtcgcttgccttcggtgatgcggcactttttgccggaaatcctgttggtactgatcgacgggtctcctgctggagcgtttgttttccgagcaagcaacaaactcaacaaaatgcgggcagttgcgcagctaacactcgtttgggaccgtgtctgtcagtcgcctctaaaagagtgacagtgaggcgcaaacccagacggccctttctgttgccgaggtgcatgtgcaggagagccacgcacacaggcggattgtccatacaaaaacacgggagagaacagcagtgagatcagtgagatagaagaacatcagcaaatcaggtggctgagccaacaactgcagatgaaccgcacaaagacggaaaaaatagcggacgacaaaatgtcgggatcaaggtaggcagctgcgactgacactactcaaacgtccggtggacggcgtcgttttcggaaagaaacgaagatttgttcccacacataacgccccagtttctcaactttatgcaggtggatacgggtgattgtgtgacgtgtctttgtaggcgggacaacgctgcagcgggcgtgacaaagggaagaggaatcttgcaggctcgtagtaggagggacggtgcatgcgacaggcgacagtcaaagccaaaggcgtacatagtgagctcgtctttcctctattcatatctacgccgtgagacgaacgatacagaagatgatgctaattttaggtccaacaccagaacaatgccgtctcagtttgaaaaaaaggtggaaaccggtgacttccagaagcattttgctcactgaaaacagcggtggacggtggaacgtaggaagcaacgcgaaagaccgctcgaccttcagtataaggccgactctgtctcctgaccctgcaaagagtagaccggcagctgatacggaataattagaaacggcatgttgatcccactaaagtaaagaggacaaaaagtaatccacggccattagggacacgctttttggcgtgtcacccctcactctcgcatagagagcgcagaataccagccaccgcttcaacataaaatccacggcttattttcggcagagcccacgcccgttccctaatgagggacggatatctacactacggtggagttgctgtgtttctttgttggcgtgtgcagagaattcccggagttctgcaaataggggaaagcttaactacgtgaatcacttggtactatgcgaagtatagcacaagctccttcagtttttcttctgagggcactgcctgtaggatgcgctgccgtatgttacggtcaaaaaagagtgttttctgattgtttacatggtggaaaaacgtcattccatgaaagagtgacagtttcattgaagaaaagttaacgggcgcagtggcgtttttcctccagtgcatccaaaagaagtccccccattccccgcgatgcatacagaggaagactatggatgaagtcggcaaagaacagcggacgaccaacgacgtagttttcgcgtcccgtttatcttgtcagtcgaaagagtcctcgtagtctggagaagagttgtttgaaacgtcttgtgtcacattcgaacgcggtgctttgatgttcgattcctgcaccgttcggagcgtctttaacagctggggaaagatccaccctttcgcttggcgggttggctcgttgaaggctgaactggcttttgtatgctttcagtaggcgtctttttggtcacgcgacaccgtttttaaaaccctgtctctttttgtatggatggtaacgtttttgtcttatcatcggttcatggctttgttgctttttcttgattctctgggtgtgtggttgtatcccgactggattgtcttgcgcacttggtagtgtgtataattatatcttgcccttggtgaatctgctaaatacgtttgcgctgaatacgtttttattgttgaacacagtctgcgtcactgccttcgtcatccacga

SEQ ID NO: 2464 - DNA, 2311 bp, Toxoplasma gondii
  source 1..2311: mol_type = genomic DNA
ttgttccagcatggagctttatgtgagacagaaggttctgccgtgcgaagatatatatatttttatgtccttcgtactgctgtttttactctttcatatacatatatatatacctacatatatgtatctatgtatatacatactatatatatatatatgtatatacgcattcaggtgtatccaacattgtttctggagtgtcggagaggtctcgtgatgccagaccctcttcgcgcagattcgaatgcgagtgtctcggctcgccgaagaagatgcattctttgaaaatgaaaaattcaccgtcagaggcaatttgcaagttcgccaagagtatcgagacgcattcggcgagtgcagaggacttctccagaaagaaatcgcaggtcttgaaaaagtgactcttaaacttgcgtgcacatctggagctcctcgaactccaacaacactgcttggccgatactccagtaaaaaggacgaaaaagactgaaaggaatttcagaagccattttctggaaagaactggcagactgccgttgcggacaggagaacgcgcgtatccgacgcactcctgcagcgcgggaggaggtcttcgagaacgatcaagcgaaagcaacctttcagttcagaggcactcttccccctgcgagttatctgattctgtcacccatcgagcagaaaacttgtctctgtccccgattttcagccagaaaaacaaggtggaccatgtgccgttctagcaccacgacgaaagattttgtgtctttttacagacgagcttcaatccgaaagagcgcctgcaaacacacaccaaaaatcttcagtcccccggagcctgactaaagctgtaggagtgaaccataaacaagttcgcaatgatggtcgctgaaccgacgctctttcctttcttcttgagttttcgtgagatctcttgtgtgtttgaaaagatctccggcgacaagacagcttcttgcttttttcccttcgttccgaactcggcgaccggaaacgagtgctttgcgcttcgattatattcggacctacgccggcgcaagctgtgactacctatttaaaacagagacttcacgatacacgattgtcaaatggagagtcacggacgactgggaagaaaaacgcctgcgagatggcgcaaggcgagtacacatgtttttttgtaagtacgccttttttctgaataagaaaaggaattttgtcggaataaaagttttttcggagaaaacgtgtttcctcggatacgaacttttttttagagtttaatttttttccataataaggctatttttcggaacaaagacttttttcagaaaaaaccttttgtttaagacacacgtttttgccgtgatgaaagaatttttagggattaatggactttttcaggataaaagatgctttttggaataaaaaggcttttaggaatgaacgtttttttcagattaaaaagcttttctctcggaattttcataccaggcacagagacagctgtacacccgtgggcctcccctgcctccgtccttgaaggtgaagatcggcaagaggggaagactggaggaaaaaatgctgaagcaacgtgagagaaagaaaactgagggacggaaagaagacctcaaaagaagaagagagagaagaagacaagggaagggtgaccagcgagagcagagagagaaagaaagagacaaaatggagacatcccggagcgaaggactgctcgaaaaaccgcccttgtcacttttcggtcgcgatgaaaccgtttggaaagcttctgtggctcgcgctccctgagtcttcttttctctcttgagtcttttcttttcaattcttttccttggttttcctgagatcttctccttttttttcatccccttttctcgagctgggcgcgccgcttggatctgttgagtccattttgcactcgtcaaatgagcacagcgtgcacatgctgttcttgtgcgattttctcccttttctctttaccgtttctccctttttttcttttctcccttctctgctctctggctttctctctgcttgcgcctctctgcaaacgcaccgaacagcatcttgccaggtttttcttgagtctcgggagccggccttcttttctccagcagcgacgaggaaggagagctgctgctagagaactgcggaccgcactcacattcgactttctccgcttttccctgctcgccgcacccctcctcgtctcctcttctgccttctttccttccttggctcccagaagaccgaggggagaagcaggcgcccgtgggctgcgcgcggagatgccccagacgca

SEQ ID NO: 2465 - DNA, 1931 bp, Toxoplasma gondii
  source 1..1931: mol_type = genomic DNA
tatgtatatttatttggatgtatatgtgaagcgcgtgagaacgcagagacgtttgatgccggggagatgactggaggaagaggttcaagagtcgagttggtcgtaccgtatcccagtatttgcctccgacgcagtgcgtggacgtcgcctggccagcagatgcgaggcgtcgagggtggagtctggaatgcggagagaaaggggaagcgccaatgaggaaagggcgtttgactgcgccaggggcgagttttgtgttttcgtgtgaatgctctgaatcgagaaaaggccagaggcagaagtgctcccggcacagagagagaaacgcgacggccgagaccaccacgaaaatccccgtgagacggaaaaacagcggtttccgaggagaaagcgcgttcacccaaaacgtccaatttccttcgcctgcttggttcccgagcgtcccgcgatcgccttccgaaggccgagggaggacaggcgcgttcgccgtgctgcctcgacttcgaggctgactcagtggctttgtctgcgtctcccgggtgcaagctccttggtctttggctggactctgcccagcctcctcgttttgtgtccatgacggaagagacactgtgcctcgaggaagaaaagaccgagaagaggagaggcaggaaactcccctcgcctcggcgctgtgtctagacatctcagcgaccccgaggtaggagaaggaggaacacagcgagaaagagagacctagccatgtgtttgagaactgacgaagacacagttgcgtttgccgcctcctttgtctctctcctcactctctactaccaggtaccttgctcgcgccttgtgctcgtttgccgccttcctttccccctgagagttccccggaactcccgtcattcctcttttttgatcatgtgttcttgcgagccatacaacctaaattcttttgctctggtagactggcagaggcatcctctgtttctcgcgaccactctctttcctcccttcctagcgaaaatcctctctgtcgccgtcggcataagaaacttgcttcctgtcttgctctgggatgggtgcctctggagtaagcccttgttgaagcgaagcaactgaagaaaacggaaaggtcgagacagcaggagaaatgccaagagaagccaagcgcgattgtggagggaagctcgacgcgaagaggggagggaaccgcatggatcggtacgtgcacggagtacctggaatttagaagaacgagaagtcgacgggaaaaaaggtagacgagaacgcaagtgacttagcggaagaaaacggtgcgaacaagccagaccgcgaggcaatgtatcgctgggaattctccgctacgagaaagcaaagtcgatggtggtgtacgcgaaggaattctgctcaagtccgaatccgcctaactcctgtgaactactagtttccaacttcaaccagagatctatttaaacacaggaaaagccgactaactcgccagggacacacttcagcgatcgacggtgtacccccctggcgatagccagcgtttcgagcgtgactcctggcatgttttttctcgcgttgtggtcaggtccgaaaattcctgtgttacatcatgaaactggtctctctgggaagagtcagtctccggtggacagagattcacactttttgttaaattttgactgaagaggctatccttttgccgaccctcctcgccccttgggtgtgtcgcacgagacaccggaggaggctctctgctaagggcgcctgcaagccagacaaaggaacgacactcttgtggcaggtttccaaagctctgtggttagaaggcaatgcgtgcacacagaattgcgatgcgagctctcttgacttttgaccgtaaaggtctgcgaaaaagaatcaagagggaaaaggggcacaaaacgtagccagccgcgacggca

SEQ ID NO: 2466 - DNA, 2028 bp, Toxoplasma gondii
  source 1..2028: mol_type = genomic DNA
aggatgcagagagaaccatctaagccgaagaagagagacgaagaaaagaagacaggcagaaaggcgcacaccgaaacaaagagacattgttcattcatgcggcaattgtggtgtgtgaatcgcggatcgccctgctttttcctactgagtcacggcaggcgatacaagtcaaagaaccgctgcagatagggaggcgaaggggctctgtacagacagtgaaggaatgcgaaagaagcgagaagaacaggaggtgggaaacttcttgcggagacgcgctatccatctcttacactggggaggcatccgtttctcgatttctcgaactctcgagactcttccagagaaagtttccttggccgcgacaaatcgacgtctggaactctctcttgctcacgctcaatcttgaacgaaagagcgagaaacaaacggcagaccggggaaagagcgtagaggggtcacgcatctgcgggcgctcggtttttttggtgtatgtacaggtgcgacgctcgacacgaagggacaaacagaaagaaggtggactttgaaaaagcgaggagagagagcgaatgggagacagtgggggagatgacgctgaacgtggaggagagagagagacagaaatggagaagaagcgacatgcaaacgaggaacgcgcggccgaggacgcttgagaagcgggcgcaccgcgaggaaccttttacttcgcgggacagaggcgctttgaaaagccttgagaggggaagagaggcaagatgtgcggaaggacgcatgcaagccattacagagagaaacggcagaggctgaaacggaacgagacggtgagatccacatggacgactgcacagtagcgaagaaatgaacagcgagtgggaaaacgagagaaaaaaacgcgagaaagacgacagcgagatgccggtgaggcgtgtagcgacgtgaacgccctagctgacgaacggtctcatgttgggcttggagagacttctgccatagaggaactgatctgctttttgaggcgcgtcgatcggcaacaacagcgggggctagccgggtgaggaggacgctgcgagcgaaattctcgcgttcaggagggcgttttggcccagtttgaaattccctacatttctgaatgtctttgagaagaaggggacgcatccacgacttcggggaaattcctcagacctcgtaaaacttcagaagtttcccacggaccatgtcgcgacggcgcacgtcttgcagctgtcaagacaccccctatataaaacaagagccgccctcgagcaggttccctcagtcatctctccgcgagatggcaaggctcaaagaggtgcggcgaaacaagacagcttggctatttccacgagaaaattgacgcttcaacacggtctcaaaaatctgccttccttttcagacactcgtgagctgccagctgtccatacacctcgacacgcatgcctgcgggcaccgatcgtgacaccgcacgagtcggaaatcctcgagcagtgcaatccgctgctcaagcaaagaaagagaaacgatggtaggggagcgaaatgccttgaagcgagaaattcacttgcaagtgcaaagcgtcttccttgagtctggggcaagaacatctcttcagggaactgtgtgagtttttccccgttagaaaggagatcgagacgacgccacagcgagagggagttcagtgtctcttgggctgcttcgaactccctggggaacacctgggcagcgcgcgtttcactgcatgcgctgcggagtcgagagtcgaaatccaggtatgtccttcctttttttcacatgctgcgcgtcaatctaggctttgagtttttagaaaaaagacgaaaagagaaaacggaacgatttcgcgccttctcgcgttctcctcgcgagggctctccctgcagagagttgtgtgaatcactccctctcgcaggaggggaaatccctgcaaaggaagaagcaaattcgcgcgttttcacagcattttctcccaattgtttcgcacttcttcgaattcaaaaa

SEQ ID NO: 2467 - DNA, 2262 bp, Toxoplasma gondii
  source 1..2262: mol_type = genomic DNA
aaatgtgccaaatgtgtttacctacacgtgaagggaagaaccagaggtaaattcccggcgttccctcgaagagcgtctgagcaagggtcctggcggttcacctctacttgcgcaaacgaaagagatcatttacctgcctgagttgtaacaactgagggacccagcttgtaaccggatttccgtgggatgagtgggcctgcctcgtcaccgtctcttcccgagttctgctccctgaggaacattgggcacagcgacagccgaccacatgaaccccagcgccacataaatgattatcgccacggttaccttgacttgaatagctcaccaaaaaaattaagggttgcctatttgggattagccaacgggagttcatagcacgctatgactgtacttgcgaatcataattccccacgccaacagcagcagaacccatgcgacaacggttgcaaccaatggaggtgggacaatggcacctaagaaaaattcagcaagtcaagaaaatctccatagttgttgctgaagagagtgcttcaaagaaaagggcgatttcaccacaaaccaagagcggaacggaacatcggctgactagtccactgtgtttgacgcaagttcgagccggggtcctgctttggatcggtgaacttccttcaacgagccacgtgacggagttttacagttcccgaaacccgaaaaaggccgatgaaattcagcaatagaggcacggttatcgcgtacatcaccgctgtagattgcctggaaggaaacagcggaaccgggcagctaggctgccatctttttccttgtgtaaactggtgacgacggctatgcgaaggagtcacattttgaactcacgcctcgattgaagtcttcattgttgagaagcatctcggcgtttcaccgcagacaatatgaagtgcggttcggcccgactcaaaactccggtgcaaaaggcgacaagagcacagcagctcgtgatgattgctgaccgcgttcagatgaggagaagaaacatgatacacagagttttctaatgaagagctggactgtcaaatgcccagcgcgaaatggattgcagtttttacgagggattgaaaaaaacgggtcgtgtattcgagtcctagctgtcttgccagcaaccgcatggtagctagcaaagagttatcataatttcacgtgcccatatatgtagaaattcatgaacgagcaggtctgcgattaaaagcgaaagcggggaataccttggtcagttacttgctgtttgaccatgaattaccacggcattactgtgcggcggttccgcctcctcacccagacaccggatctgtcctactgccgcatatactcaatccgctggagagctgaagggtaggcgaccttgcgcggtctatctcctaactttatgcgaaagaatcgttgcggaaagcactaaagcaaattttgtggaagcggaagaaatagtcttggcatcaggagaggacgggtgcccggtttaagcgtcaccggatccggcgttagcgagaagacaaaccctgttacgccacacttgcatgcaagacgactgcaagctgggtaagaagatttgggaagacaaccaaggaagccttcacgcaatgcagttggggtgctgacgcagtggaatcgtgattccagcagccccctccctgcaaactccctgtcacaagtcaagtcatggcattcggggagaaaacggtaagccgtctacgagagataggtgtcgaaccgaaaacctgaatcgccagcgtgtcctctggttattgctactaaatttgcagaccactgggcatcggccttccctccagcgcgggcaccggcgtttacgctgtattttgcggaacgcattataagccgtgcattaatcggggactcagactcggtcgtcaccactccccggtaatgctggacgcagcctctgacacagtccggccgggcacagagggtgtgcgtcttcgacaaaaccctcccccacaaggcaacacggcacacaaaaactggcgcacatcggcatgtgcctgcgttgggacgcctgtcgcaaacgtcgaattaattgcataccactgtattgaaggccgaatgttgttgtatacagtcttagacaactttgtatccgctcgcttttctctttggctcctaggagcgcttcggccagaccgttgtgggtccccccggtactgacttctgttgtttttctgcggcgctgcagaagccccttgtttgttaaactgttttttttgtaactcaaaa

SEQ ID NO: 2468 - DNA, 545 bp, Toxoplasma gondii
  source 1..545: mol_type = genomic DNA
ggtacatacaggcggaggtcgtttttagagaccagaaatacgagggagagaaaagcagaccaccgacccagggggaaagagagagatggcgacaggaagagagaaaagcacaacccaaagagaaaatgagggagacgtagaagcaggaagacgaaacgtaacgcctccagggaaggggagaacttcgaagaactggcaaggacgctgaagctctgtcaacagaagcaacagaaagagagaacagagcagacagagcctcccgccagctacagaagagacacagtttggaaggaaagaaagagagaactcggcgagaattgagaaggcagcttctaccacactcgaagttggagcattgaggtgaggagaaaaaaaaaagcgatctgtcagagacaccaggaagaagagagagaagaactgcacccgaggttttcctccgagaattctcagagttcggaaagaaaaggcagcgctcaccattttggaggcaggataaggagaggagaaagcagtccgaggagaagagcaactgaggcgcgaaccga

SEQ ID NO: 2469 - DNA, 3264 bp, Toxoplasma gondii
  source 1..3264: mol_type = genomic DNA
attgtggaggcatgagcggcacgagagcgcagaacagtctagaaagcagtgcaaaccatgagcatgaattgcgacggtggggtattggctatggaaaggacgaagtctcctcgatccttttcgcgtcctgaatacactggatatccgtgtctttaccgctggatagagccgtgggggactgccttcacaggcaatttgctgtagatgcttccatagtcgtggacagacaattttgaaagtgtttttctggccttttcatcaaattcgaaacccgttttcctacctcctgttacactaaagtttccagaaaattgttacattcacagaaaccttggaggccacagtgtcgtgcaccttccccggggccaacacgactgtttgctccagttggatttttgttatggtgctctttgatcaacaacggcactttgctgttgcagtacgcagtgctgttcgccggaggtgatgctggtttttaccgtactttgttccccttcatcgttgtgccatgaatgggcgttatacccgtacgattaccactaggagtgacggcattgatgcagtaagggaagttttccagtactttgtttccccttcagcaactgtcgacatgccatctttcgaactgactgactgtaactccggatgttccaggacaggcagcagtcttccagtgggtcagtttccgaagtgaaagcgcgggaaatcctcacgcaagaagaaattgcaaaagtaaccaaaagaggtggcacgtcgcgtggaagggtcgccacagtttagtggcttgtggaagcaaacactgtcgtcgtgtacgctgattcccgttgttatacaactgcatggtccgaacggttccacttctccaatcactgccatccttactgtgctctgccctctcggctgcacgatgcgtacgagggcgagatacattgttgacatgcagatcgacggtgaacaataatttgccgcgctgaaaaactgtcaagcctgcgacgctgggcctcatgatttgttagaagctacctcgtcagaatgtcagaaatttacacgagggaaaaccggaaggtttgtctatccggcttcggaaggacacggtttgcttttggagacaaaacagtggtatgtgtcatggtcatgaatgcctcggttagattcgcagctatcacgatgcttccccaacctttgcaggcattttcgactggaccatttccctctgacagctcgaatgaataggcggttacacaaacatgtggatcgagagatggtagtctacgacagacacgcacgctcttgtcctctactttttcaacagccctcccctgtaagcagagccactcccaattgctctcgagcatcttacttgagtggattctgtttattttattggaaaacgctcagcgagtaaaacgatatcgagattcaactggtttctatgtccgggcggcccatcgaggtagtttcgccaatggaacaaccgttccgattgtttaggaagaagaattagtcttttaaaacaaaaaaaacagagccagagactcgattttcattgctaagctgaattttactaaccaacctggtaggcttaacaccccgacagtcttgtgccgtgatacatgatgcagcctgggcttggcgatagtagcgcaggctgttccgtatccatcagccatgagtgcggattctccgaatccccattactacggtacggcaccatcagataaacgtctcgtaccatatatattacttctgtgatcccagacatttcaataagtcaagagttagccgggaaggtggcgtctaacaaatctaagcgcgcatcaaaatggatacacacagaagcaaccatgactattcgttggacacccggtaatcaaagcattctacactactccagaatacagaagtttctgtagtttttctaatcgtttgctggcgctcctagatgtgactactctctcccaccattatctcgacacgaggcagatctcttcggggcacatcgtttccgcatctctggagacaaaccttgcggtctggtttcgccgtcggttgaagggaccaaaggcttcgactgcaattcaagatacaaacaactgcgaccaaaagcccgagggttcgacacatcttcacaattggcttccatgaaacagtcctttcttcgcgatgcctgcacgatgcccttttatccgggcatgctatgtcacctgtcagtccacccggaagaaggttcccccgcgggagcatgagtgcgccagagtcacttctccagcagagaagaacgagttgttcttccccataacgcgtaacctcttgttattcccggaggatttccagagtcaatactgaaagagaaaaacaggaaggccgctcccagtgcagataactgtggggtcgataagcagcgactctggtgaatgtggtgggaggggacgaatttcgagggtgcggggctcaaaggggggaacaacttctgcgttttcgttgcatgtttccgaaactccttcacgctttacgagcgctgcacatctcagaaatcctcagaaagccttcttttcgtttcgcctgggcgccgggagacgtcggcgaggactcgcgagaatcccgtcgtgcatgtcgcgaggcgggggacaggacagcgtgtgttttgatcgcatctgaatgccgacgctgtgctgtccaacggatgggtttcttccgagaaaaacgcagcagttgacgtcatttcttttcagcgcgcctgtatttgcagtgggcctctttcgatatattctttagtctgtcaagagtcctccacagtctgcgtttccctgtctcttcgcggggctgcggagacactgcggagacccacctgagacaagccgtcggttctttgttttgtgtgtgattttcctccaaaacgtgttggtaaacgcgcgcaaacgcgcctcgcctgccgccatgcgcctgcacggagaatctcggtggcgctcatcctggcagttgtgggcggtcaggatctagagaagaaaccgttcgcagtctcaccctgcttctcttggctcacgaaaaagttcatcgagatcctggggctcgcctcgactcccggggccagcgaatcgactgttctttttgcggacgcgttctttctcttcccacttcgcgcgactctcttcgggtctgtcctgtcctgaagcagccgcaagccgaaactgtttgtcactcttcttcctggacgagacgactgtctttttcctttgtcacttgactgagcttttgaaaacgaga

SEQ ID NO: 2470 - DNA, 4328 bp, Toxoplasma gondii
  source 1..4328: mol_type = genomic DNA
aattcacttgagttttcatgacaggtacacacaggcctgggctctgctgttctttttgtcccatgcaggcgctgccgctggcactgtcgcggctcgaggtccctacgctggctgcagcggtgttggacagtctgctcagtgaccaggcgccagcagctgtcagtcagttgtcgattcacgaactgtcaaaccttgcttatgcaatcgcatgcgtctccaccaattcccaagttactgtagacacgcatccgtcctctgcggactcaggctcttgtcatgagcagaggccggagcgtttcgaggttggttcatcggaaaaggagtgtcagtctgggatgaagatgcaactgcatccggagcatagaagcgtacgcgagcaatataatgcatctgaagttgatccgggagaaaacagcgccacgggtggaggagttggagacccttttctcggaaacaagagggagaataatacttcatttaaggttcttgaatcccggtctgtatgcacacccgaggaattgaggcgtcggtcgactctgttaacgaccatcttacgcactctgtctcgcagttccctgaggcgccatccacttaactcgccgttcgaacgcgcgtggagacagctgaaaattatcgacctgtatcttcagttcaatgtaggacctctgcgtgtagatgatgaggaagcgcttcagtttctgtctcttgctcggacgaagaagctattgaacctggttcatgtgtcccaggtacagaagcgtgttgggcgcttgcttttcgatgaaggactgatgtctgaaatagacgttgagtacccactggggccttacgtcttagactttgcaataccgtctcgcaagcttgttgtagaagttgatggggaagcccatttcttctttggtacaacggtgccaactgctcagacgcgaatgaagcgcgaactgcttgccgctatggggtggcgcgtggtcgtcgttccgcaggaactttggagaaataaaaggaaagggaaaattaaagaattcgtggcgagaaaggtgcgagagggactcgagatcgacaacagtgacagatagaagccatgggagaaagacggtttgaagcagaaggaaaacgcggggtgtcatgcatttccagaagaccacaatgaagttttaggggaaacaaagtttcttgcacatgtacattttgtattgtctggtggagcgggtaggctcagtcggggaagggagaataaaacagattgtgtttccactctaaggtgcttgtattctttttcctggagagacccgtacagttgtgaaaactcgacaaaccaccgtcccttgcgcttcaccggcaccgatacatttatcaggccctgcagagctgcttttctaagttgttcatggaagctcttcaaagaaaaagatagaccatatgacagtttgctgcagcaagttccagccacagaattttgctttaccgtgagtagaagtgcatcaaacagaactgctgaatgagactcgcagtacatccttggtcatgtcaattagcaggttggacttcaatcaggagcaagcgaccttgttaaacgctggaattcagtaaggtcaatcctttgaagaccgattttaggtgcagtcctcgttcctccttcccatttgaggacgttctggctttatacgcctggggactctttaatgaatatcagttcgggtttcgtgactcgccagaatcccgccagaagtctggatgtacagatagatcgaggcattcaggtggtggacaagtattttcgaaggttttcctcggtgaacgcttcaacaacaaaccgactatcgaaggcagaacatcggacctgctgcggagcaacatgcgtcgttgcaacaggggggaaagccataagtaaagcaactcctgccgtaaactccaaaggaaacacacaccatttgagcgattcatttatcccatctacgagaatcctgtagaacatttcggatggtctcgtactacaagcaccgtagctcagtgggagagtggggggctcataacccccaggtccatggatcgaaaccatgcggtgctactcttcttttccatccgcttttgagcattattcgctttcagtggaccgttcatcaaatcggattgattgacaatatttgcggattttacatatctgtgtcagtttcgtttttaccacctttttggcgctttggggtttatcacaaagtcacagtcactagtgcaccctcctggcgggtacattcgtagtcggtgctgcacggcttttatggcatgccactgtgtgaaaagttgcctatcaagatgaattcataattcttcaggtataaagtccaattcctcacgaaggcaattcatcctcatttcctggaaccctgccttcgcccatggcgtaaggtcgccagccgcagcccctcttcaattttcagtgcttactgagatgctgtgacacatggcagttccctgttattagtttcccgtgtaagccggacgacagcacaacacaccttctaatctatgacagtggacaactcctgaggctgggaatttctggcaggcagggtctagtacagcgtgcaatcagcgtgcaatggtactccgtcctgaggttgcttcagacaccagaagtagcagcccttattgcgtcgctcatgaactcccacgatccaatcacattccccttaggttttacattaccaaaacaaaatagagtgctgctgttcgctggcaagcaaaaatgaggccttgtttctccaaccactctcattgacaccggtgccggttcctgtaggcacctagccctcttcagcagttgtccggttggaatttctgggataaaacgcacagatttgtcacgtggacagtaaacattctctcaaatgagaaaagaacgcattagaagagaaaaagggactggggaatttttttatcccatacggcgttattgccactggttatatgaaagagttgaccatgcaacgggcctatggcgcaatggtagcgcgtctgactccagatcagaaggctgggcgttcgagtcgctctgggctcaactgctcttttgggggaaagaaagcctttcttaggactttccctacttgttctccatgctcttcgtttttcttagtatttgtttcgctacgggttagactgaaagtaaggcgtcaggctttctggttttgtcttctatcgcgacgtggaattgacgcttacatctacgggcgccacactctgacgtggtaacaccacttgacagactcggactttctctcgctgtaatacaacaggtaagagtgatcaatatattgcttctagagtgtagccgatgcggaataacattaatattttagaatattagaattcaacacttgcagccaaacctgtgaacccccacccggccacagaactgcgatctcttcgagtgtaggcccgagaccagagcagtgtgcaaacgggaaataggcgttgttcgagcgcattcgtggacaactatacttaagactctatgaatcttgtgttctcacatcacagccatgcgcggtgtgcgatcgggcatcgttctcttcgttttctgccggcgatttgaaaccctcgaagcacacgcatgcatgtcccggtcggtcaacacaacaggcaatcgggcaggacgagcgctttttcgttgttccgcttttctgtagtgctacgcagaccgtgtaaccgtcggtttctcctttcgtttgtgtcatttcaagagacgcctgaggttcggagcaggttggcagtagcgtttttcgcggcttctgcccccgtgtccagagatccagccaagagagacgcagtaaatatcgactaaagacattctctctgcttcccgtttcgtggccgaaacacagttgtcgcctgaaaggatcgaacttcagtcaaaaggacagaaacacgttcgtgaggtggatggggaagacgaaacccgacgcattaagtctttcgccgccgcgggtcaatgccctcaaaagggggctttgtctctctcaagcatcgtgacgaacgtgatctagacacaaagggcgacacgccgttttttcctgtgtgtgctctctggatatctcccggtgaacgccgtgtctcttttcacgggtttctcgcggctgtgttctttcctttaaaaaacatattgccggccctcttcacgccggcattttaaactctctgttctcccaggcggcaccgaaacttttttcgtgtctgcttaagagtctcttggttttggcgttgaatatttttttctcaggcgttgtcctttggctcctccgtttcaccagagtcactttccgtttgcagca

SEQ ID NO: 2471 - DNA, 3062 bp, Toxoplasma gondii
  source 1..3062: mol_type = genomic DNA
ctgtcgcggaaggtagaattttccgtatccctcgctatgaatgatttctctgctaccgcctcgtgccagcagagagagaaacaccgcatcctcttacccaggactccgcctccagcccccatgacggctgcccgcgccagacagccctccgtgaagaaccgttcgactttgttttgtagcagaatctgttgctgtatctgtttctgttcgtcagtcagagtcgtcgcgtcgggcgtcaagttcaaggttcggtatctgtcgcccaagaaaatgtccatgggcttctccaccggacgctcggagggagaaaagggaaccgcaaagtcagagatagaagaatgggtcgacgggttttgctgaaccgctgcgggcgacggagcgggtgaagtgggggacaaagccaggggggaggggggctctcctctggaagactgaaacatcttgtgaaggatcgaacaaatggagttaaagtgtgccagcgagaacggatcagaaaggaaaacaacgcggaaacgcagccgagcaagaaccgcgaggatctgcccgtaggtgaggacggaagagctgtgcagctacagcggtagatgtaggggcagagtcacaggcagggcgaatgaggtcttcgtgggtctttcaggtgatgtggaggtgtcggagtgtgggtggcctggtgtctggaacccgcttcgcatatagaatgcgtcgcaggaaaaggttcagcacacgggacaacgaggggaagaagccagtggtaatccagacgaagaaaactaggaggtacagagggagaagggagacaatcgaagatagcggagtcagacaatcggacaaacaatcagacagccgcggaaacgggaaatgaagtcacagattcctgaatgtcctgtcggagaacatgggggagagaaactggtttttctgtgtctttggctcttagcttcgtggaattgcggtagggcgcagagagcgtctcgggcggagacacggggaaaaaaaggtgctgaataatcacgaaaattgtcaacagcttcccctcgctaacaatccacaggaaaatagctgtgttgggtttgacagacctcaggataatgcagattctgttgttaagtgtactcaaagggtaagctacaccttttcacacgcggcgaagttgagtaaagaagcgttctctactgtgaaaagtacctgtagctgtcgatggcagaaggctttgccagcgcgcaaggcatacaccgcgaaaaaaacgcgaaatgcctacgctgcgtaaatctacaaaaaataattgtcttctcgcaaattgtcctctaaaaggtgtaggtactttctggtgaagaatccggtagttctttgtcccgcacacaagacgtgtcgagaattgcgtgtccctgccagtcccgttccgtcaatggtgtccctagggtgtggcctgtggcaggtaagcgtcgttttccgactgcttcctgatacacagactaatccacgaacctcaagaaacatcttccagtgaagaacacccttgtccaggcatcctcctctgttgtcttgtatgtgcccgcggtcaaatcgagaaaggcagtcctgtcttccggaatgagcttttgaagagggtggttacgctgttgggcgcccggtatgcagaaacagcagcggtggcactcagcgaaagagcgcgtctgtgtatccagatagttgacgctcgcaactgcatgagttcttctaaattatagattgtgcgacactgtctatctatagtaactggacaagcgtgtttattatccctgtgtgcttcgtatgcctccgtggaccgtagtcaggcgcgtgtgtcaccatgatccacgattcctctcctgcgcagacaacggaagcgactgagaaactagaggagttttcgcgtgcacatggccgaggggagtgtatgaggaatccagggcttgcacgcagtgagaggagacttcgtgcagcacgttgagaaggaattgctgttacccaagtgatcccctcgctagctagtttgtggcggaagggtcgtgctgagtaccgaagctgcgcagacctgcctagctgtcgatgcttgcctgtttgtccgtgcgcgcgggtttgccctggaccatggataaggtgacggaaaattcagggtttctacaaggtcttgtgtttgctgagaccttttttcgccttactctcagcagacgacaatcggtaacccaaaacacttgcgccaccttatatactttccgcgatagacactggcgtgcactgatcgcgctgccagtccaccgaaccacgcgatgcaacggtcgctgccgtcctggcacctttttctctgtttccattgcagagttttgtcgatactatgtgtctgtactgcgtgtactgggaatatttgtcccagtattttgttggaaaagccacggtcgtcttggtattcctttgtcgcggcattttcgtgagataattttcgccgttgtcgtaacgcctctgtcacgcctacaaccgacagtcttgtcaaaactgaagccaactagcggagcgccggtgcgtgtcggaattcaccagtttggagacttgttgcttcgcaccctgttctttcaggcatctggcttcttccttccgaaatcatctagcttcctttgctcgtccagaggtcccggattctggtctcctcagtcgtaacgctacaccggctacgcgagtgtgtcgctgtcacaagtcttgtgtaggttcttgatgcctccttttgccctcggggattgctggtcaagaacggatatctccagtttttccagttttgggacaatggtggagtgtgcgtgcaagggacggaacttagcgtgaaacttatttctgccaatgctcaccgatcaaccttcctttttgtctcgataccctccactgttgcttgctagctggcgcgttgacgggagcttctaccccgagaggtgctccttctgacggggtgtctgtagatcggttgttttaccttgtggacgccgatcctcgtcctcaagtctcgggggaggaagaccacaactgcatctcgttcaacggtttgcccaccaaga

SEQ ID NO: 2472 - DNA, 1747 bp, Toxoplasma gondii
  source 1..1747: mol_type = genomic DNA
tctctgaacaagacagaccgctgaaagagaacatagatggttccaccgtctcagcgtcacggttcgcttctcctctctttccttcttgtccagacagtggctccatcttctcttgctcctcgctacttagtgcatccgcagttccagcctctccctcgttcccgtcgccggcttcctcggtcttttcttcgtttgttgcttctcctctcgctttttgttcgcctgcattccagtgccgttccaaatgcggcgcgcgagtcccagcagcttcagcagaagaacctcctgctctctcttcaagaggagccaggtcacctgaggaggccaggaccttcggcagaagaagcagcttgcggaggatcgcgagcaggcgctggcggtcctcaagagacagctcttcttcctcgtctcctgcctctctctcttctgctgtggtgtctgcaggatctaccgggtcgccgcctgcctcaggattttctttttcgtctgctgtctcttcgtttccctccgaccggcgaccgtcatctgcgaaagtcaaagcttgcctgtctagagaagaaatgtctgcttcgttcgagcccccaggtcgccgagtaaactctcgcacaacaggagcctcctcttcgcaggtttggtcgcgagatgttgtggatgacagtccagtggcggccttcatgttgttgagagagcaacggagaaacggacacagcaagagcgctttgatttgtggtttctccaagcagctcggggaaaaagccgctgagtttgtttcaggtctcttcctgcttcctcagagtccttttcagcgaacgctttggaacgaacaccgcttcagctgctgtcgcgcgtccagggcgcctctgacgccagcatttgcgcgacaagagcgttgctttgccggaggaaacaatttaaaagaagagagcaggaaaacaggcgaagttctcgaggaaaaacgaactttgtcccggccccgtgagaagacaccgagaaaagtctcgcgcaccacagagggatccctttctccctttcgcatctaagacgacgatgccaagactcgagaaaaacagtcgacaacaacaagcaacaggaatccgagaaagtggagagacggaggagaacaggaaggactctcaactcactcgacgagacgagacacggacgctgtgtgctatatccgaggagagagtgctcacgaaaagaagaccttgtgtgctgcgtcgaaagacagtctatctttggtcgagaagaagagaaaaaatgactgttttttcgagtctcttgagttccttgtcttcgctgctttctgatcctcctattgtttttcttctacctcgtttccctagaagatgtaaccgcggcgctgtgcgacaaagcgaacgcttttcgcatggactttctcttctgcgtcggcttcgttgtgtgtaccactctgacttcgttctctctttttctcccgagttcttctcgatctctgcgtccttcagttttcttcttccttccaaagatttcctctcccaactccacgacgtctgttctcctccgtctccccaggggtattctcttccttagttcctcgtctctcctcgctctgttcttctctctttgcctctcctctgattctctcgtctgattctctcctctgactctctcctctccctccctcttctctcggcttccgtctgtgctgccctcgttctgtcccccttttctctcatctgcgcgtctgcatttttttctctgaaga

SEQ ID NO: 2473 - DNA, 600 bp, Toxoplasma gondii
  source 1..600: mol_type = genomic DNA
catcaggtggagtgctggaaaggagacgtctacgaatttcgagaaggcggagaacccgatttttcacacagcgttttcgtctgtcgcgtgtacacggtaggctactaagtacttcctctgctcgatgtacttttcggtgggtgtcaccggcagtcacagccatctaactgcagaactcgaacagtcgtgagtgaatatgtacggcaatgttattcagagtgcgacggttctgcaagaaatcgaaaaatatctgtgttcttttcaggacacagccactaccaaggaggcgtacaacgggtgcttgctagtacatgtttgtgctcgctcatccttgagccaaagaacgagtttgtcggatcttcggcaggcagcagctcgtatgacgaagtgcctgctcaaagttcgcgaaactcttcgaccgtgcgtgaagctgaaaaggcgccactctctaagcataggcgaatcaagtcttgccaagtcacctggagtcttccccattccgggagacggccgtagaatgtaaagcgactcaagtatgttaggagcacccaggggtcttcggatgccttgagctcgcgcgtttacttccgtgccttggca

SEQ ID NO: 2474 - DNA, 4902 bp, Toxoplasma gondii
  source 1..4902: mol_type = genomic DNA
ggttgccgcctgaggtatttgcttcgctggcgcaaagtattgctagcgcctattgatctagctatatacatgcacactaatacgcctgaactgtactgactggagttgtgaaggggtagtcgttggcttggtcaactatcgatccagaaatttgctaaaccggagaatttttggcaaagtgggagaaaattcacaccctgtaaaagacaaggtgtgcccggaatagactcatagatatcctgagtgctggtacacaggaaggtatacaccagtgcataatgcaaatgcatgtccgttaaaggaagaaggagagattgctgttcttgcgtctttctcgacatacgcagtgggcgaaacaacccttaaacacagacagaagagtgaagcgcagacacagcgtgatgtccttgcctcccaagctgctacacggagtaacgcgacgcagcgcgaggattgactctccagagaggaaatctgctctcacagccatgtgccgacgccggaaatggtgcgacagaaaagcaatgtatatacaagcagattcccagtgtgacgtgggatgtgagcggaaataacccacagatgctaaagcggtggaactggcacgcatggggttattatggaacagtttttcttaaagcgcgcaggggctgcagcgactgcgggagtgagcaacgaagaaattggggagctggaacacgcacgatggtagacgaaaatggaacatgggggtgcctgacagtggggacagacgagaaaccccagagtcctcagaacgcgggtaacgggcgactcccgagagcgcttcacgccaaggaatgtgccacgaaaccatgtcactgcggagaggtgaatgcccctgcaagtgtgacggtgagtcgcctttctgtcttgactcttcggaacctctcctggactcgaaacgccgcactcacgtgacgcaagatcaccgaacacgcacgaaagacacttacaaccacatgacgcgaatacacatacacatcattgcaaacacgcaaacacgcaaacatcgacaaaaatggattcgcctagaaacatcaccacacacagaggacgcattcacaaaactggaggcgatggcgcggcagacaggccgacggacgacaacgtcacttctcagattcagcggagaggcggattgactgcaacgggcttgtcttttttcaacgggcgaaacacgaagcacgaggtacgggaaaagagtgaacgtgttgagaagcgagagccgacaggtcgaataagagtggcttctggatgttttgcgggaccaggcgctggcatggggcatctacgtgaatgttggcagcgaaaagatgtgtatgaaaaaagcggaaaagaagggacacagatggttccggcaattgctgcttgcttccacgtcctcaacacaataatatgccttttttttgtttttttgacctctctcaacttctccaaagctggccccagctcactaccaccacagagattccctgcatactgagagaaaatgctagacatcaccatcccctgctttttcgtccgctgcacaaaaacactacgctaccaggcttatatacgacacaacgtacggctgaatacacatacttctacacatttacacttttgtcttttacttaatattgcctttttcccatcgaaaccagcattctttttctttttggtcttgggaaactcgacggagaccagcgtaatagataccgtttttcgtttccccgcgcgaaaaccttcacacgcctagggtgtcgactagctctcaggtgtccattgcagaccggacgattgttccgtcgtttacacaccgacatagttctcttaccagcacaaaatcaatcagttccatactggaggagggcatgagcttcagaaaaacgtgacagctgttgcagttaactaaagtggctaccgcgaagcgttctgcggcctcgtgctcgaccagcatctcgttgactcgcttcctacgacgactacagatttccaagcggtagatgaagtctctaattacagtctttttatgttcgcgagtcatgttatgcgtgatgacaattacataatcagagttctcgtggaaggaaaacaagaaaatgtggtccgacgtaggccgccagatccttagcagacttggaccccccctatttcttagcgaacgcggacagcacctagcaacttctacgatactttttgtaagactcagaaaacttccactatgctcgtatgggagatcgctgtacacgagagatggtctgcgacaagcactgccacaccgcttcgtttttttgcctgctttgcaccttccactgtgcgcgaatgcggtattcgtcgggggaggttgacatctaaagacattcccaaattcatcgcttcccgctccattgagagacgggttttgtctatttcattactttgctcaccgcaaatggtctccagcgaagatatctgtttgatagcgcagtggttcctcacatgtgcacacgtcagcagaagtaccaaagacacgcgacggtcgctggaccgattctcatggacattgaaaatccgggagacgtggatcgtgcgggaagtggagctcggcactcgagaagaatgaagctggtcttcgatactaggttctttgcacgcttctccgagtgggaatacacgaacgtcacaccaagaataactctcgataccgcctgctcgtatttcaatttgcgttatacgtgctcttcgtgtcgtcaacttcattgttttgatatccttacaaaaaaggcacgagaaatgtatatattatcgacatgcacgtatgtgtgctcccagcagcgcaagttcccaacaggcctttcaaaggggtctttccgacccggggtacggtcgcacacgacgccaccctatgcaggcttcactaggctgattatgtgctgagagatttgcagtatgaactagtccgaaaaaaaattcatcattccatgcacccaaaaattcattggttgaccatattgtttttttgaacaactgacgacaaacctccacggcaatggaatgctgcagtcaccaaagaacttcaggacctacgccacggcgctcgttgagtgtttttcgattctaaacagtttcctttgtttccacaaaaagagaacattgcttctctctttacagaaaagccccaccataccactaaatcccccagtatcttatgtcgttcgaacagcatgagaaggtgggagatgcgtagagtccgtacgccagcaggacctaatatccccggtactccttaaaatgtgacacccaccctttctcttctgcataccatctggcgtgcgacaaacaaatcgcctccagtctcacgtcataatatccttcgagtctacatgtaactcttgttgcaaaggcttacctaccaggtgcgcgttgaccctcattccctgtatgaattattctgtgaagatgcatccgttggtttagacacacatacacaggcgcataagcatacatgaataggaatcgttcatgcgcatgtgcgccccttgcctcccttcagtctctcgttctctgtttgtgccgcggtcacgtgtctcgtctcttgctggacactgctttcgcggggcaggtaaacaggacaacgagaaacatgaaccacagactcatctgcttatgagaacggacactgcagaagcctccacaggaaagtctgcattcgatttgatggggactttcttcaaacgagaaaaatttccaagggaggccgctgcgagaccttctcgcgaagccgagacgtccaggttccttacagcttgaagaggcaagcgcgctttctggacgctgaaaagatgcaacacagcggccgaatcgttcagcatacttctctacacttgatacaccctcccagtagggagacaatcaaacaagaacaccgaactcgcgcgtttctctatgtcaccgcttgtccatctcaggaacctttgcggcgggcagccgacgcatgcatgcatgcaggggttttcggctctgccgatgtccaacaccttcatcccgtccctctgtgatgagatgttctttagggaatcaaaacagagagagaatgccgaaatggcgaagagacgaaggtcgttacgtaactcgtgctccacagtcctgctgtagaattgcattacatgggttgcctcccgtgtgccgctcctcttcttcggccgtgttccgctagaactgaaaagcagaagccaggcggttgtgagtctctcggttctcttttctgtttttcgatttacctggagtcattgtgtcaggaaaccaggtcaagttgcttcatgcgcactcgaggagcgcaacttgcggcagtctctgcgttgagcacttctttctcgcattgcacatcgacgttgtgcctgcgaattcggactttgaagctgcatgctgccacatggagacgattttttacgctcggcgtaccacgaggttctcttgtttaggcggggcaaccttctgacgcttttttttccggaggtgcgacgtctcagttgtttcagcagacgtttcgaatttccttgtcttccgatggcgaaaaagtttcggagaaccccttagcgactggatgtgcatctgtgcgcaaacgacttcttaaaacccaagtcaacacctgtgttcgtattcaagcatatacctacctgcgcatgtgtaggtactacccttgtggaagattcttcgtaacggtacatgcactgaaccactgctgagacggtcgacagacagttgtagggctctctcctgtgaaaaaagatgagtctctgcggtggcatgctcagtgtctgatacgcctggaacctgtttgctgctgccgcgtccagaggttccccctcgtctcgtttctccctttcggcacatcgctccctgccccgctcgtcacca

SEQ ID NO: 2475 - DNA, 3695 bp, Toxoplasma gondii
  source 1..3695: mol_type = genomic DNA
aaagcaggtctgcaagcctcgtttgtggagctacatcgtttccttactctttctcgacgcgttccatggcagcgccgtcgtctccagaatccggcaggtgccgatcgccagatgcaaacaactgcggcaggtgttctcctcctctccctgcgtgcgttccgtgtcgtccaaggacttgtgcacccgaggggagaaaaacagactccacgacagaaatccctcttggttccagcggaacaccggaccaggctacctgagagagaggtgcgagatacgggattcttccgtctgcacgagctccgataggggtcgtgccgatgagcgggaaccacaaggcagcggcggaaaacccgcatctctggaaaggaggttggccctcgggaaggcgacgccccagcgagagaacaggcggcaagaccgcagagcggcatgcgcgacttggagcagatgcatcttctctggctctaccgcggacaggggggataaaagaaaaggaaagagggctagctcttctcgtagaagtcgggaacacaaaggcctgcctgcatttccgcttgtaactagagaccaccctggaggcgcatgctacaggcgcaaagcagcgaagagtgaaatttcgagagtgagtgaaatgcgaagttttcgggcctgtgatcccgtcacatgagtcaggaggctgcaagcaaagcgcgaccagtggtgaagagaggaagaacaacgagagaagaaagacagagaagcttctcagccccatggtctttcactcgtgggacgactcccagacgccgtgcgatattgaggccagtcatcacgcgcaggatcaggaaagtcacgacagccaaaaggggggggcaaactgaccacggcaaggaatggaacgcgaggcataatccgtgaaccgccggacgcacagacgtgcagaacaaacacagagaatttactgcatccttattgatgcgtacaaggcatccactggcatgatagcaccgtcattcctcctgaaaaacgtgacaagaaaagagcattcaccccctatccagggagtggtgtcggctaggcaagggggacttcagtcgacggagttccctgcacatcgggggggtacaggattgcttgcacttgtcactctgcttatacccgtcagccaaaatggaacacagacaaagaaacaagccgatcagatttctccaaagtcaatctgcgttcctgtacggatgcgttcctgtacggatgcgttcctcgcatcgttccactggcgacaggctgtcacagaggaggcagacacaacgcggacgtggcgtctttatatttttgaagcgattctacaaacgagaggcagcagcaatgcccgaacaattcggtgggaaatttagcgcgtgttccaagcataaaaaagcgtctcgcatgcgaagcaacttcgcgcttctttttttaccgacagcgaacgtccgaacacaccggttacgcacgccgcccgtagctccccataaagggagggcggcaaagaggcaagtggccaacacgtttgaagtgaaaacaagacccggcacgttcatgggttcagatgcacctcggtgacttggtacagcatacaaaagccccacccggcatttttaaaaagagacgtactaccaaaatcgaatgtgtctccctctgtcttgtgccatagacgctcaccgttttgctccactcccttatattatctaactcgaatcgctaggcatcgcgtgtcgttttgtctcgctagcttcttctttgacatcataaggtgggggctccgagcacctcccgtcacggcatcgcagcggttgtcacagaacgcatcaatctttcgccttttactaaagattgccgtgtgacatccgcatcaaatgcgaatcaagaatttttgacggcgtctcgacgccaacagttcctattctggactccatatttcaaatgtctgaggtcgattaagcagcgcctctacattttgggtttcatattaccttttattcctgttagaaacacagacctggagcagatatccaacatttacgattcactttcacaccactttcgaatataagttttaagcatagctaaatatctttccattggcaggccttgtaaccacgctactacccctttctccataacgtggactcgtcccttaaatactacaaagccatcttcggcgtctcgacagttgcttagcttcaaacagtctactaccttgcaatcgccctcttttggacctctgccgagaagtttacaactcagctgaccagctcctccgtcgccagagaagcgtctgtcaggaacgtcagccataattgagactctccctttacgagatgccacgtacaaatcataatcaaccggtaaaatgttggcaattaccccgattgagggccttatcgtgaggatgattgtcgttagccccggggggccccagaaattgccgccgaccctttcgggtcggcgaacgggaattggagtagttttcaactagcaatcatcgcgcatccgctaggcgtcacttgcagcgacattgcccctaccgcaaggatggtattttttcttccactgagcccccacgtgagcaggttgtctctggagcataagcgtgaaaagcatatgtcgttatgtctccctgccattgcgatgcgccatttacagatgatgtcctcgagtggactccagaagtattagcgtaatttttgcgggttttctttcccggcgtttggtatggtgttgctgaattgctgtgtctttctcaggggtgggaacgcagggatcatctttggtgtgtgtagcaaccctactattgtggagctctgtagttaccctgtagatgaagcgtagtgtgtgcaacaacgagcatgagcaccaagcagctatcctggccaaccttaccatcggtggatacggtcttcaatgatctggctgcgcgttaaattgattcttttccgttaccgccctaaaagaagttgacaacatagcttctatcgctcccggcgttccttgagcggaaactgtagtctagacctacgacgcacatggggtgcctctccggttaagcgttgaaacagacactgtctttccgccttcctctaatatcttcgtgcttagaaaacatccttttaacgagacatagcgaggcaagcctcgcgcccaacgccccgttgttagtgcggctgcgaacggcgatgtgcctttagctccatttccccggtcgtttttagacagttcgtctaccatttcgacgcgttgaagtggagaagaagaagcgctctgtgttcattaatttttgtgacctgcctgcggcggttttcggacgtattcgtcccgccttcaaaaactcatcacacgttttagtgcagtgccgaccaccacagactcgcagtttataaggttttccatcggggtctcgcggttgtctagttcgcatgtattaaagtggacgtaggtgcgtatactgttttatctccccgtgttgagccatgacagccttccgcaatgcccctctcgccgctgtgttgtcatcttcgccccattaagttaacacagccagtatcccgtatcacggctacgttttccaagggttttcttccccctgtgctgccagacggacccgaagagtgtcagtcacaccgaatgaccttgcctttcgacacgttagccctaaatcctgttctgtcattttttaaaaa

SEQ ID NO: 2476 - DNA, 871 bp, Toxoplasma gondii
  source 1..871: mol_type = genomic DNA
caactgcacaacttggctggcacactccctcaaaacaaagacggtggacagtctccagatttgcacaagtggatggccgaaatcccacagctcaccgtgaacggcgaatcggaccgcagacttgactacggcgacgaattctgcagggcattgctgaatttgcgactggtgacaccgttctagaaagttcaccgttgcatcgaaggcgaagttgtcggtgccctgcagcagtcacgactggtacacgaactcaagtgagacatatgcacacgagcatgttaacgagtaaaaaccgtagggccgactatcacaaagtggagtatgcagaagagagacagagttttagaaaaccagcgtcgtcgctgtactcaacgccagtaccgagccgccgatgtctgctgcacccagtggagtgtgaagccggtgctgctgcagagcatggcctacctctcctttgcagtcccacaacagggccaagagatggcatacaccaagggaacattcttcgaacgaaaggctcgatatgctttttttaagctcgttgggagtcctcgccagagtggatgcccgagcttgcaagagttgatgaagtgtcagcaggccaccgcctgccaggctagatgcagaaagccgagtaatggctacgtggatgggctcgtccatttccagtggaaaggtgtacaagtaaaagcctaccgcacagacggctagccgaaaaactttggaaccgcagttagagggaatttcgtactgtggtgtaaggaaaaactctagaagtagcattgaaaacgtggcccgagggaggactgtaagatgttcatggtcaccactggatgcaataggtcattgtgaccgcaagatagcgtccgta

SEQ ID NO: 2477 - DNA, 3988 bp, Toxoplasma gondii
  source 1..3988: mol_type = genomic DNA
taagactcgcgtaccgcacggtcttcgactttgtcgtcgaagctttcttgacggcagtgggcggctgcgccgaggaagcagcacgagggcgcggcctgcgggggcgtgaagaggtcgaggaagagactggcggtgaggacttccgggtgtttccatagggtgtctcgcgagacaggcaacgagcctctggcgcaaggcacgagcagttttctcgcctccgcgtctgaacgcgtcgtcgctcccagcccactcaagaggctcgcatcgtccgcctcactgggtgtcactacagacggcggctgctcgcggctgaagctgagagccttcgcagcgattgggtcgtcttcctcgacagccaccggcagcgacttctcgcgacgaatctgctgaatcaactcggcctcgttctctgtctccgaacctcgccccttcctctcgcctttctctgcgccctcgcctcggtcgactcgctctcccctttcctcgtcttctcggagggagagccggccgtcgacggaggctggaggcgacgagtggagactccgggagaaagatccttggcgcacaagcgtcgagagagagacggcctcctcgcgtcgctccacgagtcctgcgccgttcactgactgcccaggtgtacgcgcaccgccggcaccggggatggcgtccacgcgctggctgatggtcgaccgcgaggccgcgagacgcgcggcgacttccacagggcgtttgaagcggtcggcgagcgacgcgtgctgcggacctgcggccgaatcggcttcctccgtcttctcctctggggctctcaagaccgtcaggcgccgtcggcggaggtcgccgactgtctcgacacctggcgaacctggcgcgtccacaggtcctgccttccctcgttcaccagtctcgccgtccgcagtcggtgcccccgaggaagaggagaaggaggtcgagcagcaactgtcgcgctgtgtcgcctttgcagccttcagagggagttgttttgcctcgccagttggcggcgtctcgctgtcgacaggcgcgtcgctcttctgcggggaggcggagagttcctggggctccgctcctctccccccgcgcaaagcctccgcctcatcgcgagtcggcttcgctgccttgctcttgcatgcacccatctcgcggaggaaggacgcgaagatgagggagaagagacaggaagaggggcagcaaagaggcgacgcacgaacaacagtcggcagaaagggagcttccaacgggcgcgaagaagcagaaaagagaagaaagagaagagagaaagagaggagagaaagataggagagaaagaggggagagaagcgcgggaagagtcggggaagaaggaaggattggcaaaagagactcctgaagaagagagagcggtcgactcggaagaagtctcgctgcctcagctcggcggccaggttccgcgccgacggaacagacacagggaggctgagagaagaaaggcgaaaggagtgaacactgcaaagtctcgagggcgcttcagccgaccggcgccacccccaaggcctcggcgagctgtgtcaggagccgagcaacgcgcggagctcttggcgcccctgcctggcagcgacgaggcggagagttgaaaaggcttaccgcgtggaagacgcaaagtccgaactccgggaacctgggaggaaacggcagagaagccagtcacttcacggcgaaacggggagctttgacgacacgacgcgaacgccgcgaagagtcgtcgactgcatgtcccgttcacgtgtacatacacctgaaaaagtgacggtgcggagaccggaaaagaactccgaaggccgtggacggcgaaagaagcctcgcgcgttctctgctgtttctctcccgtcctcgcatcctcgcgttccggtcaactgtcgcatctctcgctgcgagagaagcgcgggcgggaagagggcgcgcgaagcacggagaattggcggcaagacgcggagatttacgtattgaaaaacggggaagaggagcagaaacgacgcgaaaaaggcccgacgccgcgttctgaaagcctcgcgcgtccggcgcgcagtgcgacatgcagctcgcgcacccactcagctgccagcgacgttcgtcaggatttcttggaaaaagagcatgtagctccactccttttgaggaaggagaacaagacttcgcctccaaagcgcgaacgaaacgcaatcaaactctccccgaaagaaactctgccgtgagcgacagactctcaggcgtccatctacaccttgacgtctcccgcggcaccccgcgaggcgcccccgcttgctctgccagccccaagagcagccccgagggagcttcccgcaaagaaaaacttttggaggcgcccggacaaacttttcgacaacgaatcaactttcgaaaacctgactctgagaaaggcctttctgaaacccaagtctcctccccagttctcgacttgaaagaaagcatcatccacgcagctagcgtgtctcgcgaagaaccgcgtttacacacctacatacatacgtacatacatacatgaatacagatatgcatatgaatgtatgtctgtatacatgcacatatatacaggcctatacacacatgcacgcacaaacatatatatatatatatatgtatatgtgaaatacatgcatggttttatggggcattgtgtgtcctgcagagacagccgtgaacagctttcagaaggatgcaggaaggtttttttcgcgaggcacagtctggggtgtgcagaggtccgtcggactattttgcgaactgagagcgggtcccgcttttcatgttggccttcgattttctctccttttctgtctcgtcccgagggctttcgaaggaagcagatgcagcgttttacggcgctcacgagcagcgtaaccgagagtaccggcctcacacaccatggagaaagaagcatgcgtgtatgtacgggagcacataagcgtttccatctttacatacacgtatatgcatagaagtatgtgtgagcagtcgtgacacctttccagccactaaagaattccgacgcaaaaaaatgacttccctctgcgggacaaggcgtacacggtaggtcctcggcatcgacacaggcaagcgggggatgtttgcaccctttatctcaaaaggatgatgacccatgcattatatacgcatctatctagatgtgtggcactgaagaagattgaatatatacatatatatatatatatgtttataggtttatagatgcatatatttatgaagagcaagaaacgttttctttcaagcacttggatttcttgtgacgaggcgcgcaccctcctccacccgagttgggtgcttcgtttttttctctccttggctcgagcagcatcgcggcttccctagtcgaaagtcaagaactgattcttctgttcaggcacgaatccttctgccgtacgcaaacgtgagacgcgtggggtgtacagacagtcccggaggcagctcgtagaacagcagatacacggacccaccaccatttccaccttttcctctctccgttcgaaatacatcttcgcttccgcgtccttcgttcttcatgaacacacattgttacgagtgccacaacacagatactctacttccgaagttacgtacttgtgcatgcaaccgtgtgtgcgtcaagcactcggaggctctttgcctcagatgacgacggcgaccgacagagactttcctcttgctttgttttcctttctgtgagtttcgcttcctctgacactggctagaaaggaacagagaagagcatgcacccagagaaaaaaggacaacgagggaccaaggcctgtcgactgtgctcccgagttcttcagggtcgctgattccgccaccgcagtcgactctgctctaagagtagcgttcggcgctgcgtctcaaagattcagtctaagccgacgtttctccaagaatgggcgcgacctccgatgtcgtgaaa

SEQ ID NO: 2478 - DNA, 2803 bp, Toxoplasma gondii
  source 1..2803: mol_type = genomic DNA
gccgacagctctcaaaatgccatgtttccaggaaagtttctccgcagctgcgactgtgtgacctcgtcagtagaagcgcatgtctatatgagggaccagttgtgtcgcaacgtggttgctggataacgggagttacatcgctcggatgctgccattccaagatctaactcgatctcttcccttgttattctagagtgactgcccgagaatcgcggtcctttcaacgtcacaggtatctgttcctatcgtgcctgaatgacaggtctagcacattgtgcagggttaagagtaattcaacccgcgctccgttctgagagccatcgatctgctttcttcaaactaaagcactgctgaccacttgcacacctccgcgcaggtgctggctgttttgtatgtgcgtaggagcacctagagcacgcgggcagacttgcgttccctcgtgctctgaccttttctgagatgctggtgagaacatacgcagatcatctagttttatcgttctcgaaacgaacctggcgatgcctgaacgctgtgtaaagggtgctgcagcgctaaattcggaattggttcggcttgaacattctctccatcttgatggttctaagtcctgcggaccttcgagaactcatgctcctgcctctatcttagtactatgcgattccgctttctcagagtatctgttcctaattcgcgagcagtctgagcttgacgatgaaccctccattaaggacataatggctgttagacctgaggccagcagaccagagagttggcagttggcgttttcgggtcgccgttggcacgcacaaggccaggtgtttctcaagctacactcaacataattgtgtgtctgatcgatttgcttggaggtccgttgtttatctaaagaatggcgaagaaggcgcagcacaatgtacagcaaacgtacaaaaattggttgtctttaaagttatgcaaggaaggatcccggatgcccttgattgtcttcgtcatagtgctgcattgcgttcaggttctatggacacatccacctttacttccttgtcttctctgccttcaaaacacagggaactctgagctggtacgcagtctcagctacgctaggcttcctgtttactctgctataccgcagcttaaccgtggctttcctgtttcgtaacctagtccgtttgggcttggcgtttcagaagacgtgataggtggaaagctgctgacacacaaagtccttggtgaaatgctctcacattcggtccctgcgctggctcgcatgcatcgagaaacgcaaaaaaagaggcatttcaggtccgataatcccgcgtgcgcgacatgcgggaatgtgtgccgcgcacagctattcgcgactgcccgccaacaagctcgcaaccgacgcgtttttcgtcgattttcacagtggaacgctgcgtttttcgcgtccgcatagtttggtatttcgcaagggccgtgtgtagaaatgctgtcgaatttccaataacgaatgtgcgagtctcgcgggtttgcttgtgctcctagtcctcgtgtctccagcgcgtttgcctgctggacgtgcaggctggaaaagtgcctcagcgcggctgccgttctctttgtttttctctgcagccggcgattacgaagcgcactctcgcttctcactttgtttgccccgggatgcgtgtgagaaccgccctttttttcattcgatttcgtccaaatactcccacttccgaatagcgcattcgcacttcaccgtggcggcctgcacacgagctgtcggtacacccgaaactgtcgtggacctcttagacaaagcgcttgtgcacgaatcactcttcacttttcaattttttttcacgcggagtgaccgctgtataactaaggaaacgaagctactgagacgcggtctgccgacatcccctccactgtgtcttccgttcccggtgtcgctcctgtttccgaactctgcctatacgttcgctaacggcagacgctcacaaattttctcaagttacccgtcgatctgtcgaattttctgcggcggatcgggctctttcccccgctgtttactctcaactgtccgagcgggaggtcgatcttgatgctgggaacgcaccgggggacgtgatggtacgttttctgctttaggctgagcggcgtcgttctgcagcccagtggtcttttctttgtcggcatctcagtccgttccacgcgaagaatcatgcctgcctcggaaccggccgcatcacccgcagctgtaccttcgttgaacgccgtcttgtccacgccacccgtctcgtctcccgcttcgccccctggagcgccgtacttcctggccgtcgcgggggcggtttcctcctggttgatgcttctgtgtgtcgcgcaagagctgccgtacgacctcggcgagactctcggcgttcgctttcgtcgctggctccacgcacatccggttctcttcgctccgtggactgctttccttcgctggctaggtcgcagaaggcgcctcgtaggtctcggcgacttcattctcagagaacatcttcgcctcagtggctgattcgaaacggaaaacaacggagttctccgaccccctcttcgtcgccgttgtttcgattcgccggtcgtctgcgttgcttcctcgcgcggagaaagcagagaaaaagcctgagcaaactactagacggatgtgtcttcgtctaagcccagcagcctggcgacctgtggggctttcgttcgcgtgatctgtggtttcctgattctcggtctgttctgttgagaatcagaaaacgcgtgcacgctcacaaga

SEQ ID NO: 2479 - DNA, 3366 bp, Toxoplasma gondii
  source 1..3366: mol_type = genomic DNA
aagaagaatatgaaggattggaacctgagcctgcgtaggcgtgatggggaaacgcgtccgttgctgagaacaggtcaaagtgtaaagagaaacttcgttgcgtccgtgatagagccacaatgctggcgtgcatgctgcagcgggcaggcaactcaagacatgatgcaaaagcaagcgaactgttcaagcgtgtttgacagtgccggcaggaaaagtgcatcttgctatgacggtaccggggacttccgcctacggccgtcgaaggcgtctctctatccttcggataaaacaaacaaataataccgggagcagaagaggtccatgccgacactgccaatttgcattaaaacagtctctccgaatttgtttccttttcactgtaccccctgggcaagacgaatcagaggaagatgtgttctgagccgagggttcttttcgttgtactcgccagcggggaatatctctgaatcagtatttctgctgacagtacacgccgcaccttcagttcgtgtgcggcagtttctggagcagcttatccggaaactccaatttaagaagctccacgcattttcttggcatttccacatttgcacgtttaacacggcacacgtgctctgagaggcgaccaccttacgcatcttgttaaggcacgcgcgttactctcaacgcaacgcacttgtttcgccagagcaatttgtcgctaccttcacgaagactgctgatgacgtgctactgtcgatcagcgtccctctatttgtgtgatgagcgaaatttctgctgccgcggtcgtcggtatctcagcctcacgagcgaagtacatggcaacgtgtaattcatgcggccagacaccggtagggaaactttaaatgcattgagagacgcgactacccgtgtagcgtgcacgtttctaccgtcaactccaagacagaaacaggagaggtgaccgaataaagtcgctcacaggatgtgggagtctgtcacacgggtactgtaaaagcggatttgtgacggacaggatcaccccctcagtcacgaaacgtgaagaaacgaagagaccggattcaagctctatggcgttagcagagcgtagttatacgagcggtaacagtaatccttacattatgcgtaaaacctagagcatatccgatgtgtctcaagctgtccagcgaggtggtggttcacagaaataaaaagaaacttggttgttcatatctattaagtgaagtcatattcagaataacctgggtactatatgtccatgcgatggtaataatagtagacatcaaatcagctaggtaatccgggatcctgctttttaagacttttgccatacaacacagtctctacccagcactagaaactatggtcactagtttaaattgatatcatttgtgctcaagcggtttgccctttttgcgtctccagatatttagacaggcaaataaactccggatacccgtgttccagtgattgttcctctccttttctatgcatctgcaaatctccttcacagaaggggagtggccattgtcacctcaaatagcaaaattcatgagtatgtgtagtgtgtctcatcagccttgtcctaaccagcgtattatagcttcgctttcttgtgtgctttagaggttcttctgtgttttaaagtgtctgcctctgttgagcagttgtggtcggacagctgacgcggttccagcgtgccaaatcagagctctgagaaacactagacatgtttttgagtgcaaaatgtggatctttgtgcaggcgactgtacttggtggtgtgaaaagttcgggcatcgcttgtgccgcacgaccgccggagagattactgaaggttacttattaaagtgaacccttttgttatggatcagagaggcagaaacacgactctcgagtggcacggagataactttcttggctttctcttccgatttgaaacgaatctgaaaaggtcatgataggacacttgaacgctgaatgcggccggaatgacacacacacgcctgacttgattgacagaggttgatacagaaagcccttgttgtgagcgcacatagggggataccgaagagtaaagagtaggacttgccggagaaaaagcgaggaaagacagtggaaaggagagagatacgatcccgaaaaaaagagtcgatgcacactggaaaaacagtgctgcacttcttagtcaagcgcacgaaatctcgaggttgggtcctttggtggcaagcttgcaaagctgggcgaagcctttgttcatttgcaagattgtcggtaggcgaagtcctcgacttgccatgtgaaaaaacgtcgtttttaagtgtcattctgcgttttttccggttctagaggtgaccgcgccgtcgtctagcgatgctcgcactgcagagcaggtgtactgccgttctgcagcgtccaaagtgcatttgcttttctccgattgtttcgcttcccctgtctggctgtacgaggactaagttgcggtgcgcttaaacattacactgcacgcatttgaatgttaaaatactaccgaccatgggagctggggggatctagcatgcaactctcttcatgtcactaggagaagctttcagattgactggcggagaccgctcgacatgaatgcatcggtcgaattcgaaatactttatcgaaatcaattgtactcggcagaggtacttgtggaggtctgaaaccagaagagatgttgatgtttcgtcttttcagcgtcgttcttcccaagatttcctcaccagctcgggacgccaacctccaatgaaaacagatcgagggaaactgcagacgggctgacgggccatcgtcgtcaccctcagtcagtctcagccactctcaccctccgccaaaatgaacttggtttgttgttttctctgttgctttctcattctgacttggtgttcgtctcttcgcataacgctcacttacgctagagaggctgtaccaagtgcgagttcccaggaaaacgaacgaagcagagtgagtgtcgacgagaaagagaaggcaccaataccggcagaccgtagacagagcgaggacgtgtctttgaagcctcaacagaatctcgcacaagagcagacagagcagatccggcaaaaaaagcctacccgtcgccgccacaggaaagggcgaaagcgaacggtgcagctcttagagtcttctccccgcaaaagaaagaagcgcgcttggcttatggagagcactttgatattttccggtgcggctgctgtgtttttgcttctccatttcatcaaaggtaacgccacggagagacgtgcgagacacagaaccctcgatacccctgaattgtttgtgccgttggagattctttcagacattcccttgcccttca

SEQ ID NO: 2480 - DNA, 1758 bp, Toxoplasma gondii
  source 1..1758: mol_type = genomic DNA
gaatttcgaaaacactgccgcttccgaagaatactttgcgagatgcagaggaaaggttatgccactggcaaaagcactttttcagagccagaagcgatgcggatgtcatggcaacgtctcgcgcagaaaacgggatgtacctcaccagccaccgcagattgctaatgtgtattgagactggatagcgaggtggggggaacgctctctcttgtgccttctccagttctcgtttatcaacactgtggcgatcgtgcagactgaggatactttgatttgtaggtttatcgtagggataaagaaggtatcggagaaatctctttccacgtagcggatcttgcgtttacccgcgcatgaccatcaacccacactggaataaaacaatgttcctaccagtttcgttgctgtagtgtgtgaacgagtttattcgctgtgtgttaaagcattacccaattgccttccgatgacggatgtccttgcaaaccgctgacccaaatgacccactacgattaggtagacctgtaccagcctggaaatgtgtaacatcaaagaaatgtattccagtctctgtttagaagaaatcatcgcacagaataaaacacttggacgggtggctgtcggcttttctgaaaactacgtgcgggatgtacggttgcggatcgacgcaacttccgccactctcaagacgaagaaggcagatctgcaagcccttgttcgcatttctggaagattcacatattacgcctccatagttgttctgcaatgcagaaaaaaaagcggggaaatggaaggcgcaccactaatcaaatcatgtcgtacaaaggaactgcttatctttcctttacggactgtgtaaaaatacctgcccccccctccccgagaaatcacctccggaatttctctacaatgatatgcctgtcagtctgttcttgaatatatacagtttggcatagccagaaaacactagaagatatcaacatctcaattcaattgttatctacgccttgtagtcgcgtccggatgtgcacagggcgagacaatcgacccgcgtttgctgggacatccacgcttgtcttgtattttggtctctcctgttgctttgcttgcctttctcccacatgcccgacggcgagatgtctggagtcaactgtgtgtttttcaattatccttccgtggttaatttctctgtctcggcagccgcctctcgcgcatgcagaccttatccagtctagtgtgctggcccgttttttctcgcggtcagccaccgatctggaaaaaacgcggagagaaacacaccccccaagcaggagggtctccccccagacatgcgtttcgtttttctgtcttttcctgcattttctcggaagcttgcttttccgtcttggcgagctttcgctctcttgtctgcacacagttctcaaacgaaatgacaagcagcgaaaagcattgccgccgacacacacgggtgcgcgcgagacgccgccagcttgctgtgaatccgagctgaagggtgccggtcccttgaacattttctgtttctttccagtcccgttcttgtcctcaggccatgttctttccccttgtctgtcggcatctctgcatgcgacccttcgtctactcctcaggctccgccgcttcctttccagcttagactccggactcgaacattgttctccgtccagagcttttccgttcttcctcctgtttctctcctttccatttttctccttttcccggcgccgcgtccttctctcggcacca

SEQ ID NO: 2481 - DNA, 2194 bp, Toxoplasma gondii
  source 1..2194: mol_type = genomic DNA
gataagacgtggtattgggacgccagtcggcccactttttcgtttagaaaaacccggaaacacgtagaaggcagtgaacgtagacctgtatgcgaaaagagtcgtcttctccaagtgcagggagaaggtggaacaagttcggggtacgaccacacgcgtgtgtggttcgagtgaaaaacactgcgggaagagaagggaattcccgcagcgcaaaaagtatgtttgtgcctgctttgcaaagaggtgccagacactgaagtttcggcttttccctgcgcgaccaaggaaagcggcagttcgtctcgaggagcccactgcctacttgtgataatccgaccagtccagtaattgtttcttctcaaaaagaagaaacttggtcaacgaaaagattatctcaccggctgacttcctggtgcgcaggatcagaccaaagagttcgtcgctggtcctgggaagcacagatcgcgttagggcggtttaaaggctatttatttgggtggtgtccgtaactaacactggcgcggaggcagttgaaacaagggagttgtacgggaagctctaggcgaaccgagttctgaaacacggcgttggaaacccggttaacgcgaaaacgtggagctggactgcacctgtgttattcacagatcgctcttgaattgtatactagcgacgaatggcactcaaaaaaagccagggtacctcagatttcgattcccaagactctgagccaaacgggcgctgcctcacatctaggtttgtgcaggaacggtcagacgcgttccctttttccggtggtgccagcagcttagtttctcttctaaagatgtgacgaaacaacaaaggggtttcccgaggcatgtgtcggtgtggctctcatacttttgcctgcgttttcttttctcttttgctgcgtttcatggagacggcgctctctcagtaggctgcgtctgatgaagatctgagaaaccctgtttctctacacccctctccattttgtctcaggactgccaatggcgttgccacgggtgtcctaacacccactgaaagagaaagtctagttttccactttttctcgattacggggttttgatactcgtggaaacgtagctgtaggcaggttggctccctcagtgctaacttcgctttcgatttgagacacgccaatgtaacttattgggatcggatccgacggtgtgctcttcaatgtgacactatgagttgtaaacgaaggacttcgtaacgcgaaatgcgactggccgcaacacattccggtaacgaagggaagatttccctcataaaaggaaagtgttcaaaaccaagcaaagcgtgtgataccagaagtcgtttgcatttcccgtttccttacgagagaaacggcgtcgatcggaaacagctttcgacagcgctgtgcatgcttgcgtcccgagcgagagacaagcgaacaaaagcaatttctcttccgtcgaaacttccaagtagttccgagagtggcgggtttccttctatcatgtggagaaagggactccggaagaaacgacttttctgtcttcttttgctcgagtttctgtgcagcgcaccacctgcgctgtgcgacgaggaaccttgggaagtgttcatgcctccaatgcatgctgttctttctcttagagttgcttcctctctttcttctctctttctcctctctttctcccctcgtttctttctgcatttctcgtcgagtctttccactggctccgtccctttctgagctacaggaaggcgccttcgtcttgtcatttgcccaagcgggtcgttggcagtttcggtcaggtttgtggagccagtctgccctggaaagagttcccttaaaacattgtcctcgagaaaccaaggcactccgcttgtggctccacctttgtttcaactccatctcaacgcgtccgtccggttcgctgtccgtcggtgtgcctttgccagcgacacccttcgcgttcaccactcttttccagatcgcgttgtctgctctttcgctcgcgactcactcttgcggcatccttcgcggtcgtctctcagcgtgtctcatattgctctgcacgcgggtctgctgcctcgattcccttgacagcggactttcgcagcgactcccccattttgaggagaggctctcgccacggcttctttgtttttctgctgtttccccgggcggctgcaagca

SEQ ID NO: 2482 - DNA, 3053 bp, Toxoplasma gondii
  source 1..3053: mol_type = genomic DNA
ttacaaaacactcaataaactatcaaacggctgcgtgcgtcgagaaagctaaaatttcccaggcaggcaaacctcccagcccctaaatgttgtgccagtaagagaaacaagaaaccaaagactcccacacagggctttctggttctgctccctctgctctctgagagaagcgaccgcaacctggcaagagtatcgcgagcacacgaaggacttttcgggaaaatttccgagtttcttggaatccccgcatgcaaacaaagaaaatctcgaggtcgtcacagtttaaacaccacatacacagttactgaatcaaccttagcagaccgtctgaagtccgttttccccggtacaccgacgtgcagttagttacacctctggaccatgagaacttagccgcacgaacccacgaaccacgcctcattcaagtgtctcaacaccaaataaaaaagagaaaatagtggccgtctcggtttctgtgctgggaagtctgaccgtgtccactacgactcgccagatcgctgcggcagcgctcgcggatttcctgtgggcgtggaactcgaactgaaagttcgactcccgaggaagagcctttttctcagaacctactgccaacttgtcgctgaagcgtcaccatcatgttgttgtcgctttcggcgacactccacccggaggtttgcaggaacttcttgaggtcggcgtcctgttcgtaggtggactgttcgtgctggatctcgctctgaatcgttttcaggaggtccttggaagcagcttctaccgagctgtcggcttcggaagagaaagctcttttttcagccgcaaaagcggagctctgggtgcccgtgagcggggagaagaagcgactgtttgtggctgccgccgcgagacccgcgggggctttgaaagggaccgctccgagtctcccctcgcgcagcaccgcagagcagaaggaagaagagaggaacatgcgctcgcgggagctcgaaagaaccccaggaaggcccagtggggttttggaagaaaagagacgaaaaacagaggcagaagtcgccatggtgatgaggcggggagacagcaaaaacgcacgggaaaggcgggaaggcgagaagcagacgacaggcaagaagaacaaaactcgagcggaaaaaacgacggcgcgagaagaaagggactcctgcgactcggcgaccggagagatttctcccgcacaagcagctctatgaagaaagcgcgaaacaggggcggtgaaacgctgagagagaccccgcaactttacgacgagaaaagtggaagcacaggcggcgtgtgcgtgcaagaagacttccggaattacgggaaaaagagcgagggaaagaggagacaaacacgatgtcggccaggcaccaacaagaaaaattcctattgcccgttaacagtggtgtcgtagcgaaccccacagtcgtgtctctcgagagacacgccaaaggcacactcgagacctgccaacttgttgtcccccagactccagccccgtttcgacggaagctggattgcagatgtctttaaatgtgcacagaaaaggagacgacaccaacatggagaccgtcgcatttgcacagctggtaggtacctgttcagggtttccaatagacgccttctgccgctcgatacagttaatgtgacggtcgtgtgtagaacacaatcgaacgcggatccggtaaacaccgaccttcaaaatctaaaccagcaatcggatacaagaagcaggaggtgtgtatcttactgcagagtcaaaaaaaacgtttttgcaggaaccaagagaggaagagcgggactgccggaaccacggaggcagctgagctcagggcgagcgcagagacacagatacgggagcgaggaaaaaagcacatgaatgaaggaagatttttcgagcgcacatcttaggcgaggcgtatatgccagctaacatcatatactccgcattcttgtgtctgatctgtgtcgtcggtgacgagagaggtgtgtgcacaggaacacggctagatttggagcatatccatacgcggaactacggacgcttatgtgtagatgtaaagaggcagatccggaaactgttctggagcaatggtcgtcagaagaaaagagatatctttggcagcatttcaagctaagcatgaagtgtgcgagctttccacgtgaacgccggtatgtattgcgtgtgtccgtgtacaacaacccgtggggatgtaatcatagagatacaggtatacgtaggttacagtaagccttttgtagtttgtgttgacggaatttcgtttcaaagctgaagagctgcggaaacgagagaaaaggagaaaatgtcttcctcatgcccccccccccagccgcctttcagtggagccgcgcgaagagccagagcgctacaaacgcgcagcggcggggacggcgggggcggggcgagagcggaaaggtactggcagagaaggaagatccacgatatcacaaaaggggcatttattttcgacttccccatgcaagattcggtagaaagagtctgatctgcaggcgggattagacgcgagagaaacctgggctcagcgttaatttcggctgtatatggagctgagacaaaacgacaagagcgcattgaggagtcgcttttttcaggcattttctgtggatttttcacgttccacgcacgattaagtgcaactgatgagatgggaacagaaaagtgtccacgttttgtttccggtgaaacacctcggaaatctgcttcgtcttgacaccgtctacacggcacacgctcctgccgcctgctgctagcacctgcaacgttgcattcctcaacgccattgcgtcttcatgaaacgtctcccttttctcaacgcgtgcatttcaccctgttattttctcgttgagtttttttgaaagctcttgatactctgagggaaatcgtcgtgctagagaagcggcttgtctttctgtcggaaggcagggaacaggactgcgtttcagggttccacggatccgaggccgcattcggagaccacattcgtgcacacctgttcaggcga

SEQ ID NO: 2483 - DNA, 2430 bp, Toxoplasma gondii
  source 1..2430: mol_type = genomic DNA
aactgctatgctgctaccataaactctaatggtgcactgattcaacttccgcacattagcagcaaagtttctcagcagcttttttctgttgtagtgtcttcattggctgattaacaggaatacacgtgtgttaaaaatactgcctggtatttgatcgattgcatccctgatttacagctggtaccagctgactgtgccagtacatccagcacgcccctgatgtactggtggtgttcgacattcgcagtttgcacctgtatcgcaggagggtgagctttgtcagacaagaggcgatatctgaaggatgccgacttttagtacacgtgtctctagcataacagtcccagcgcggcttagagtgcctcagaccttcacttctctgcaaacagccctccacaacatccgtcacaacccactgctgtacttcccacttcaacagttggtaacgaaagatctctaactctcctcaaccaccgaactaggacgagcaggtgacaggaaatgaaccgttgcgcacagtgcgagtgaagttcggccacctgtgcaaaaaacttgcgaaggctttctaccacgtgtccgtcctcataataacatgcgtgctcgttgggaaaactgcggaactgtattatgtgtgacggcgttgccgaccttgatgatgtgggacgaaagcggcagctcacccatgtagtccaaatgaatgagactcagccgtctcacaagactgtgcgcattggcgattaaactgttcaaggctgtggaagtgcattgctctgccaccccagttacagaacaaagaaagcaacggtttcctggtgcgcccgatcgaatccgttcgctttcaatctgacgcgtttcagcatcagcggtggacgcttggtcttgcaagcaggccttgcttcgagctagatcgcatggtacaggaaagtggatcgtaccatgaattcagataccctaggacatgccaatggtacagaagaggatattgcttcaagtgacaggaagtcaaaatgaacggaaatatgggcaactgtaagggaagcgactacgggcactggcgtgcccggtagctgtagaactgtagggtaggaaaaaccatcgagcgtcgaagagagttgtcccgcgttgcgccacgtcggactcagcgagccagacctcgaggctcttgcttggaaacgttgctttccattagtcttctacagtacgtgacttcccgcaaacgtttcttttccctcattggaggccgccgcattttgtgccttcggtatttttttctccccaaatagtgtaaatgcgatggactcaacagctgaatccctctcctagcctgtagtttcaccagatgtgaccgatgattctcgcgaagctgtgggtccggaaggcttgccgtcattcgtcttcgtagtgccatttaaaacactttgagggatcaattctcgtgtgtctgttgtttgtaaagacattttattggttactattcgactaaagagcaagggaaagccggctcatctgtacaacgacacaactctttgtatgtggcaacgctgttacgtatctccccctctaagagttgtggcatccttctgctgttataggacacaaaatattcgcccctgcacagattacaccattccccgtgcttacagcatggctgccttctgcttcgctaccgtcgccgcccctttcttcgttcttctttggaatgaccccgccggtacgacccagcatgtggggggataaggataagatttgaagtcgatcctgaagcagacaaaggcggaatgacgatatccgttttattgtggcacacgccactagaacagacgctgaaagtgtgtctgtgtgcagagcggtcagggtgtcatgtgcgtctgcgccagtaccgtacttgcaaccgttaccgaattcttggattcgactcactgctagtcagtgacacttgaggcttgtgtatgcttttacggcagaatatgatacgaactgctgaattcggattcagatttgaaacctgggcaactggggcctcttaagctgaccgagcgaaggtagaacattacgatgtcgcgtgccgttgtgacacgaagttccgtccccgtgtccagctgccgtgtaccaaatgaccagcatgccagcgataataacgaagcggatagccgggagggacgtcttacatggcttccgcatgctcagatattttaacggtgaacactgtgcgtatcaaaaaccctgcttttgcagttgcaacgggtgtaacacgttttggttcgaaggcctcttcacacctcgataaccggcgaggagcgctagaacctgatgtgatcgcgacacacgtgaatgacatacaagtgcacgagaagccccagagtctcgttgagcgtaaatcctgcgaactggatgatctcaggcagtcaggtgtaagccctggagcccaga

SEQ ID NO: 2484 - DNA, 2448 bp, Toxoplasma gondii
  source 1..2448: mol_type = genomic DNA
gaccatcgccaacagggcatcgcagtaattcaccgatgtgaaataaccttaacgtcgtaggtattgaaattcaacacttttacctgcatgcagcaatccagtggggtggcagtgttgtgtactcttgaaaaactcggctgtccatatctcatagccacactttctgcgtggtgaggaaccatgaaaaatgcctagacgattacctgactgccgcggatgtagacttgctcgagggacacgacgcgtccatctctgtgtgtgacggtgacggtctggagcaaacagttcatgttgtcttcagcattttcaagaactccccgatacacctcgcctgaatataaaaaatatgtgcaacaatggaattcttggaaattcacttcgaatatcaccgactctggggagaaatcacggcgttccttcacatggggagacgtgcatcacctcaagaaataaacacacacagaaagatacaaatgtggacgcggttgttcccgcctgacatacgcaaggcagggagctatctgcatcgttttccatccagaacacataaccaccgacgtggcacctttcctcgagaccacgcgtgtttcaacgcgacaaagacatccccatgcgctgccatcctcagtgaggtcactgacatcaggactgtttgcgttctgaagcaattttgtcgattttctcggctttcccctggtgcccgggagagccacgacgaggagtcacgggattgacggcacgttacactacagaggaaacgtgcgcggtaaatccgtctgagcaagcatttggaaagaaaacgctatgaaagcgcaaaccgtgtttctacttcagaacgccgtaacacgcagcaagcgggaatccaggacgcagcaacccgtgttggcgccggagacctggttcttctcaaagtccacaagggctaaacgaatcactcccgaagagacagtgtttttccgcacctgacttgatttccaccgtcacagtgtggccgagaccttcgtagagaagcttgacaggagttccgacggttgccatgttgtcaggtccggggtactgaatggggcagtctgcgaaatctatgagacttgatgaagccgagaagacgttctgagacgaagcacaaagaaaaaactgaaagactaaacggaaaacgaggaaaacaaaacacaagaagcgtctgggcgcttctgcgcgcgcggtagaggaccggcaccacccacgcaaaggatgtgctgtcggagacaaacggggcggaaacggggacagagtcacaggcgcagagagtcgcaagaacccgatactggtttctaagtttcactttacgatttgacgctggacacacgctcgctttgagtcggaggcggataaaacagacaccagttacagggtgcagacgcgcgcggcgaccaaagcccagaagcacattcaccgcagaaatgaaaagctccgaactggaagcgacaaaaaatacgcggcgattttcccgttttctcggcgttttctcgagcttgcctcatgcgtaatcgcgcgaactgctgccaccccacttttccttgttcgtttcttctgttctgtgtcgtctgtaggggtttctctgcatgcgctcctcatccccaataaaaaccgacggcgctgcgcggccgccaagcgactctcaaacacgacgccggtatgcgtgtgtttctgaagttacgcctatctttcttggcattttggtttcgcatctacctcagatctcggccctgttgaagcaaaaagtgtccttttcctgcgggtcggcgtttccgcagaccgagaatagccctcagcccctcgtggtcgtgtaccttgttccacaaccgcctgttgagtctcgattgcgcgaggcccccctcagcagaaggtaagcggctctcctctccaacgagacaaaggggcgaaaactatttttgctcagtcgctcgctattctgtggagaggtctgtctggaagcaagagctctgtagccagcacacagacttcccaagtgtccctgatctggttgtaccggcgcttggactctgttgtctcggccccttttctacgcgcactttcatcgcatctttgagtgagtgagtctttttcatgcctccacctattagccgcgaaaacgaagtgtttgctggtgagagtgttgctgtgaagccccgatttcgctcgttcgtagcctccacggctaccacgcgcacaaacatacaggtcgctctcagcgtgccgcacgcgggtacgcacatacaacatacatgctcctgtgtgtccgtctcgaggggtcgactgttctcagagagcctgctgccgttgggtgacactttttttcgtgtctcgcggtcgttttttttcgttctcgtttctcgagtctcctccactttccccccgtcgtctctcttctcccatttcgtctttttcggtcgctgcaccctctcacaa

SEQ ID NO: 2485 - DNA, 4887 bp, Toxoplasma gondii
  source 1..4887: mol_type = genomic DNA
catggaggcgctgtcttacaatagaagtcgcatgatgtctgctttcacatatctgaagggtggaataaggacccacacatcttgatccaagtcgccctgttgtatacgggaagaatggcgttgtggcacgagatactgtagccgtcccccaaaaatgtgttgacgctgaggaacgctctcactatctccaagagcgttaacgagctaatcacactcggcaacaagcagcagcattccgttgctgcagatgcaataaaaacaggacgccttatgtcggcatctgtgtaccagagcttgatatacgggagcgagttttgtccggaaacagaaatgttcgcggcgatgtatttggcgagctcatatcttaccaagatgtggaacagattcaagtggagaaacagaggacagattagtctccagatttcgccgacacgaatgagctcgggaatgtttgcgccgaacatcaccagggtttgcctggatggtgtatgcacacagtgacaacgcgaaaggatgagacccaatagaaagcgtgcagaaagcacccgacagacccatcgggtggctggcactccacagttccccgcgtaactgcttgaggcctcgaaatcgatgtgtaaccaccgcagaagactcgaatcgaatacacagtgaaggggaccatccagtgctcattaacgacactgcacgacaagaagggcatagtcatgtcctaataccacagctagtcggcggactgcactacacagcactgtatggtcttggtactattgtgaagacacgtgatgaaaaggatatccagaacacaaattagcacgtattgccgccaccgaattccttcggcagaaaacggaaaaaactgttctttttgctgtcgatacatcccctcagatgcccctcaatcctggcgaatcgggaacagcttttccagcttaatttccccttctgggagccctgccattcgatgagtccacgaacgctgcaccgcgaacgtaaggcgttctaatccttgctgcactgacagcccgtcaaaagcaggatgcatcgacggcatcagcgcctccctggtttgttgcagattggaggcagcgggggcaaagccggtcattttcttacggagttggtgccaggatttcattgggtgccaggccggcagcgagcgacgcgatgtagactgcgatttgtacgaaggaaatgatgatgattgggctcttcaggtgtattcccgggcacagccattgaatccaactgacgttttcgccagattgagttccagaggggaaaaagagtggcaacggacttcctccctgtcgtccttccccttcaagtgcagaagagccgcgtggaggcgacgacgcataatccgacaacgtccgaatgttggccatcgtgttcccgctgtgcagcgcgtagcagcagcgtcggcctttgaaccgctagaaagaagacaaaaatcgttccttccgacaaagaagaagggaaagggaagtgcgtttctggttcgttccatgggaaaacgcaacagcccaggatggacagcttgcgatatcccatgcgaaaggcagggaatggcactgctgaatcaaacaaaacgggaaacggcgactaggcggtcccaggttgaaagacacacgggtggcagagcgggtacaacaggcgttttgcgaaagccgttgaaaaccagatcgatacatgcgaaaactatgtccgattcttttttcttgaaccagcttctaacgatggacctgctttcttgcctggaaatgtcgcgcttggcagcgccaagtgctagtcggtcatggatgcgcaggggaaagaaagaagacagcttcccagcacaggttttccaagtcagttttgttgcctagctgtctccggcatgcatttcgttgtgtatgggttttcgagaacgggaaacacaaatttgccgttcttgtggttatccacgggttcacgcgatctaggacaagaaccaaacaaaatcgattgagtgtctgtgcatcgagcgacgcgtgcatgcgcgagaagaccccaggaactgtcatcctcggcggcggtttaacttctacacgaaccgctaccggaaattaagaagacgaaagctcactgccacaggagtggagaaggaatcccctcaactatttgaatcctgacacctgtaaccgatacatggcatctcctctccacctgcaggctgcacagcttgggatggagctgacaccggtgtgtgaagaagacgagcaagaaaggacaagagcacgtagccactccggggtcttaaatgtgtcgcaaaagcgtcgaatacgtgagccggacagcgctccaacgtcacatcttcgaggagagcttcgagcctctctccctagtgttgtttctcagctgaagggttctggcattaaacgcggaacgtaaggcgctaccgaattacgggaagctcataagagtcactacacagtcctttcgcctctgctattagtaaaagattcagtatgttggacgtattcgacagtcgacagagcgtgatacaacaccgactgtgtcctcgccagcagtaaatgagttgctagaggctaaggcaacgtggacaacgatgcgaacgacagaataacaatgcagtggacgggaacaggaccgtaattgcatttctaataatactttttgtgcttcctttttcgagatccactggactcaaagataaagcacagtgaaatattcttccgtgataaggtgggcgaatagtagtgccatcttcaatcgcgagcaacccttcaaaatgctgaaacaaaagacgccacagaaaaggtaaacgtattcatttctcgaatttccttctatttgtgccagcattctgaggcgccactcgttagcatgacgctgtccggatccacgaaatgccaggcgtccctcctagtggttgacgcagacggtcgtagtgaagcaagtgccagcgtcttttggtcgctccaggtgcgctcaagaagagattcaagcgtacaaagtgtaacatacgatcgaatttaaggaagaagaaaagttgatttcgaagacaagtctctcgcgtacgtgcaaaaagggtgcgcataactacgtagaagccttcctctgattacggtccgaagtcacacactggtaaacgcaaatgagtaaacgaagaggagaggccgcggtgctttgggataaatttgtgatagataacaggaaaaacctatttgttgcgcttgctgtcttacgtagctctccgacgacccccaccccattctgcacgttccccacatgtcgtgtcagccttttcaaaaggcttacgctgctacacagaaccaggcttgagcggcgtacatagcgatggtatgtcagccacactgcttctacatcaggaaacggcgttcctttgatttgcttgtcaggagagtgtcaaagatagaactccgagttcttgtttcgcaatcagaaccttcgtgcaaaggcagtatgcaaaccacgcgcctttgagctcccagtgatcctcctttcaatgtcaaactacaaggacaccggccatcaagctttgctcttcttctctctgccggtgctgtcagctgtgggactcatctttaagtatcatgccccgacttaagtgaacatatgtgatcggaactttcggtccatctcgatccttatcttcagatcttaccctctatagaacgcatgtcggcttgcccatacagtgtgtttgccctgacctcaactatacgtgactgaaactgcttttctcggaacggatctacatcgtcaatacgttaggaaaccattcagttgcccaacatggtttgatcagtacgacgggtttagagccgaacgtgatgtgcctcgtcagcggcctgttaacataatgaggggagggacgcaggcagttgtagcacgctttagaattgtctgaaagcagcgaaaacaaaaacaagacaggctcatcactatcaccacatctgcacactttccgatacgaactgtccgtgtggaactaggtattaaaagcacccgcgtatgaacagtgatcgcgaggcgggagaacgcatgcacgaaaacatgctcgaagaatccccaaacacacaaaaacactccaatatgcttgtcttcctgcccccgttttcactgcatttcgctacggcacgctcaggtttgcctcagccctttctctagctgattcgttaacttttgggatgccttcgtggctactcgagtctagctgctgcaacgcatgcaaagctgccttttcttcgcggcgggtcacgacagagatacgctgaaacgaaatccaaccaactacgaattgtgaattttgtaaattgaatgaaggccggcaataaaggtgttgcataccagccgtctgcatcttctcaaacgtttctattacttatgttcccagatcgtatgtcaccgtctgtttgggcagtcaggtcgttcttgcagccagctcgtttgttggagcacacgggggtcggtacctcacattgatgtgaagatcttccagagggaagcagcctccaccatctctgagacggagggaattctccttcacatttgcaacctaccgactgcacagggtaacccctatcgactcctcagtttagttcttttggcatgccgcaacgtgtgttgattcgtgtccctggacaccgacggattattttcctcactttttggtccgctgtgccgagggtaaagcacttggtccgtctttgaagctgagttttttgtcggcattcgaggacgaagctttgcaactcttcaacggggaaattcagagcctcatgcgctgcctgcttcgacgaattcgtctccaaacacatcccgggcactgattgttttcggaactcgagcagctgctcttctgccttcttttcggcgtga

SEQ ID NO: 2486 - DNA, 2646 bp, Toxoplasma gondii
  source 1..2646: mol_type = genomic DNA
gccttgcaatcactggcgagatcatccgctcagaaaaaggcagcgtgcacttgtccgacaagcgaaaacacccagggtgaaacctcgccagcgaaacaacacaagaagagacagtccgctgagggaaaaaagaaagggaacgccttgccggaagggaagcgaaaacgcaagcagacattcgccgggtgcggcagccagagctctcaggagtcgccccccgcttccgttactaaaaacgagcaagcggcattcgtgacagacaagccgagcgactcgccgcgaaaccgtggtggagtatctgagatccgagaggaatcgcaatggagcctgactctgatagaactgccgccggtgaatcctcttgcagaaggtccacaggtggcggcaatcgcgccagatgttccatcgtgcgacacagaaatctccggtatacgtacacctcagaaaattcagtctgcagagccggatgagcggagcagcaagcgtccaattagctcagtcacgccgcgatcgagcgacagtagtggaggtgcgaggccagcgcgcaaacagcggcagaaaaagcatcagccgagacacagaaaaactgctgcgcagctctgaagactcgcgtgagcagctgtagcacagatccgtcgagacagactggaagaaaggaaaatgacacccgatgcatacacgctatggcggtgcagcacggaacctagactcggggaagcagaaagcagttttgcgggcaggcgtttcggggaaaaagaccggagaaaactccgcgttccgcacgacatggcgacacgattatgtctgttcttgttaagctcgcgtctttgtgtggtgcacggtgcttgttttgtgtgtggaacggtttccgctcgcgtctcgcttgcgtgagtgccgagaaatggctgtgtcagcgtgcacctcaggatgtaaagtgacaggtgcgatgccgagcattggcaagcaacgacagagtcgtccgaggcggtcagtgcgcagaaagtatgtcgtgtttctgtccttgtctttgggtggcgatacggatcactccagtgttctaggcatttcatgtttttatcggaatggaacagttgacagcagtaatgcgtgtgtgttcgtgctacgattgcggattccccctttccgaatgtcttgcgagacattctcgaagatcaacaaatgtacagctctatttgcgtgttcaagctcatatgagttcctgcacgtcacgcggtagcttagagacacagagacttttctagatatttcgcgcgtttgaagtcaagaaagtcaggctagagagcttcttgtatcgtgggttcttatttgaatgctcatcgataacaacaaacaagtcaggcttctgtcgcgtcggcctgtaatgctgacaacgagctgctgcatgtgcttgcttgcacatgactggcacgctgtcaggtgtcacttttcgctgcatgcgagtgaaaaaaacgggaagaaatttccatcctcaagaaatccgcttcagaacagaaaggtccactttatggtgacaaaccagacaaaagcttcagaaacacccagatggctttcaattagcgcgttgttccccttgatgcaagagcgaggtagacaaatcacatgtttcttgggcaatttctcagattttttcctgctctccgattccatagatctgagcgaatccttccttctttgtttcttctttaaaagcaaaaacccagggcaatcgcatcgctaactcctttcaagtgtctgttcaacaggattgtgagtgttttcgtgttttgagtgaaaccggcacactttgcgccgcgctgagctcagcatttacttttccttggtactctctaactcttagagaaagcaagaggaaagcaaactcgaaaactttgaatctcgcacagatatgcatgcccttgaagcgtgctgcccacgtttcaagcgttgggctgcgttgttcgagctcaacttcttaccttacgtccgcgcgaaacaagccccgttggttaatcagtggcagtgcgtttctctgtcctgtatctgtctctaaaaagtcgtgtatcccgtcactaacaatcaattacagagatttttccacagagatataggattcctttctctggatatccccgccaggctgcagtttcttttttttcgaagaaaccgacaagatttgcttttttcggtgcatgcgcgagcctcttttccggaagtatctggaggggcgatggatggcctcccgacacaacaggagataataaggaaatgtcagaagcacttcaacgaaaaatgtaagcgttcaaggcagacgcttccttttcgcttcgtttctgtttcttcgccttcttcaacatcttcctctccctctcaatctcgtgcgcttctctgctgtgtttttttccttcttgcagtcctcggttgcttctcccccttcgcctcgtttgcactcccttccttaaagtgtttgccaggcctatgtcgaaattcccctcttgtcacgggtattccgcgccgccctccccttgtcttttttatctcttcgctttttccggcggtttctgttgcttgtgaagagagccagcaccgccggggaacaaaacgtcttggttgttcgaattcctcctctctcttcatcgagaattgaga

SEQ ID NO: 2487 - DNA, 2099 bp, Toxoplasma gondii
  source 1..2099: mol_type = genomic DNA
gcgttcctcggttccatgtgcaccgaaacacctgcccatcagtccccacacatatatgttctcccgaccttatgcatacctctctctctctctctctatatatatatatatatgtttagtagcttatctatgtatctatctatgtatctatctatgtatctatctatctatgtatctatctatgtatctatctatgtatatatatatatatatatatataggtacttgtgtatccatgtgcaacgactatagatacatgcatacatgcatatacacacatctatgtagattgatgtaggacgagtaacgtgcactgaagagaggaagtctgtgaggcgaactgcatgctgttgcgccagtgtggagcgcagatgcagggagagttgtcctcacgacttcgttgtgtttctgtcgatctcgttctgcgcatgcgttctcacctgcgtggtggatgcttgtcaggtagagcgagttcagattcgcgactctccaggaaaaccactcttcggcgcaggagagcttgtgcgaagaatcagcgagctcgacaaaagaaggcactcgcccgtaccaggcaggaaagtaggcaaaatcctccggcaacgccggcgtgcgaagactcatgcttaggaccgaacaacgaagaaaaaaatcgcgaaggaaaaggaggatgcagaagataaagagatggaagaccgctcttcatcgtgcattcgacaagacgatacaacgtagacacgtacagctttgtggctgtatgcacaggtggatgcctggctctacacagatgttagaaaacagagaagaacgagagacgcgagcaaagtccttctcgaccttagatcaaagatgaagagtgggaaggccaagaaggtacaagaagaggagcccaaatattcgcgttcattgcgagggttgcttctggaacgaagcatttagagaatcgagaactcagccgcaaagacgcagaacgaaggagtaagaagaagaggaaccctcggccaagactggcagagatgcgaatgacggttcaaaggaaaaagtcacgctttcgttgtgtctctccgttcggctggcgccgtccgcctgctgcccctccggcacacatcgcggcgcgcggcactggggaaaccggagaggcagtaggagaagcttggcgccccccgtctctttcgaatcaaacgcgtcgaatgacactttaaagactgaaacaaaaccacgtttcagcgcttgaagcgacttgtttcgtgtgtctgcccgcttggggctttgacctcggcggcttccgcatgcaaccgcgcgttttttcgcgaacctagccgcgaacagacgacagcgtcgagtgtaagtcacatctcactggagaagccaagacggtgtgcgggaacctttcgaacttctcttcctttcttggtcactctgaattcgttgtgcccctcttcgacagcctgggggtggagggctcctactgtaggacccagggcgtaggttccccaaaatgcctcctctccggttcggtttgcgaacctctgccccacagaatccccgctcgagggtcgagtgtttcacattgacttttctcgagagagaattcaaacggaactgaccgttttctttttctctgcaattctgcgcgagtgtcggttcagctggtcgaggccttcaaaaccccctttcctcgcccctctcccgcgcttggtcgggcaccgcaactctccgattgctccgcaatctgtccagaagtctctcttcttctttctcgttcgtttattttcttacctccttcgtcgcacttcccgctcttgtcttccaagcactggcccaagacgcgccacagcaactcccttttttgcccatcgttgctcttcatctcaactgtcagcgcggccttcaagactcaagcaagaagaaaagactctctctctctatatatatatatatatttccccgtcttgtcgtttcctccttcattctcttctctcttccctccagccttcgtatttttgtcttcgatatcttgtcttcttcactgctcttgcttttgggttcttctcttcgtgtttcttgtcttctcgcgtccttttgtctctttcttcgcggca

SEQ ID NO: 2488 - DNA, 2846 bp, Toxoplasma gondii
  source 1..2846: mol_type = genomic DNA
caatgatcgcggaaatgccctgttgtaccagatccggcatttcgcttgagcgtctccggacagccagtccagcaggtggcgagcttgttgtcagcgagtggcgtatgcttttgaggttgacgttgcatgcggcctgggcggtccagtctgtggttttctggaaactaccaagttgcaaagcgttgtgttttgaagcgccaacgccttgacaccttgtgttggacctgtttcgttctggctcgctaggccgtccaccgtgggagcggcgaggggctgtaactgcactttttcccgctcacacagcgtcgtatttatcttcgcactttaagcagtgtgctcactgaagcgcgggtgcgtgaaataactctcgcgcgcgcaggcgaacgaatggtcgcgcgagacatcaagacaccttccacccacaccactcctctgagaaatcgggcagggtagcgtttaaaaaaccacagaacagttgagtactgtccgcactcaccaggcctaaaaagcgttcatccagttcctcaacaggtgtcaggcgaacaagaatccgacctgtagattccggtcagaccagcactggaacacaaggaaagagcatgtcgctgttcacacgtcaacagcattctgtctccctgtccacatgcatcgagaaactgactcgtccacatgccagaaccaaacaggcgtctgatgtacgaaagtctggtttctaagtgggaacctctggaagatgcgaccttccttgtggcgtctgctattcagggacacttggatgtacatcgagtgtcgtctccgcattcgccagttttcttgttgtagtttttcatcgttcggatgaaaggcttctttttcctcattcgggggcctcagcatcgctgaggaacacccctggctgggttcgcgtccaacagatggaaggcacctgcatcttgctgttctaaaagggtcgccgagccagacctccccaactagagggaaagatgaggtccttagacggtcagtttgtggttcgacacatggtggagggtaactggagatcactcacttactcaccactctcggaacaacagctgcgcttgcgtttgaggaaaattgcctaacgtttgtcgatttctcgtagcagcagccaagtggccaggggacccgttgccagacggaggacggtcgactacagaagtgggggtcacatacctgttgcagaactctatattgataccgcctccgcttaactcgtgaagcagtaatcgcttccgtttgcacggaactcaagtccacgtggcgtactaccaccgaaatcggcataccacgggttgaacgtaaacacactgcaagtcccgcgcactgcgaggcgttaccgtcaaaagattcctttcctttttctgtgatttgccgctgtaggagattgagcagttggcactcagcattcgtgagagtttactgacagaaagacccaacctcttgatttgatgaggccataagatctaacgcgtgtggcaatttcgcgtagctgatctctgggactggacggcggcgccgagtggagtgccacaaagttgtccattaacagagacagccgcgcgcactccaagcacattttcttgcagagagcggttctgtcgtaatactgctcagctgcaacgtacctaacgaggcgctatgaaccgggactgtcttcctgaaagaatacgtaattaaattagttcgctctcggttctatggtgtagcggttagcactgcggactctgaatccgccgacctgggttcaaatcccagtaggacctctcttggcgactggttgcatgcaaatcgcgttacttctgcatacgccgaccgcggctgaacactacagttgaaactcttggatgctacaactcagttgattctgtggctaccgccagctggtgcacttatcgtcgtcttccgctacgttcttctacggtggccttagcacagaccactggtccatctgcagtccgttctgtacgttctggaaggtgctttgcgtatacaatcctcagaacaggtcgatattgaaaattttcgatgacacacagtcgacaccgaggtagcgttgtcacgaagaatgaaacatgctaccacacggatacatctcaacgggagcgcacagggcgtgtgactcttgtattttcaccggcgaaagcgagacctcagaaagccagaggcagcgtggtcaagctagagcgaaggaaaagtgagtttgcatctgtttgtcactaagaaacattcgtcaaccggggggcagaccgagaccgtgtaaccatggcgcttattcgatgtcccaggaaagcggggattacacgcccgtggcctagacgaatttatcgcacgctacgttggcctgagactaatcgatggcaagatagaagaacatcggaagactctttgcgcttcaaagccggacggcgttgttgcctctcgtgaatcgtagcggcgggcggtagagcccaagaagccatggtgcacatatatatcgatgtgtagccagcaccgcagtcccgagcagcgatgactacgtacccaagtgagaaaacgggctattgacactccctggtagtcgagcaggtgaaaaggaaccgattttgtgtttctttcgggagcttgctgaagctggaagcgatatgtgtgactatgatgcgcggagccatctgacaccagtaggggcagtagagagacgccatctgcctgagacaatcaatcagggagaaagagaatagtgagacgcaaccctggcccccaaaatcagttttcgctagggactgagcgaacagaaaaggacattccccctctgagacgcaaagctcgatgtctgctaaaggctgtca

SEQ ID NO: 2489 - DNA, 2760 bp, Toxoplasma gondii
  source 1..2760: mol_type = genomic DNA
gctaaaacgttttcgattagaagggaaagcatgcgcttcacccgggactgctgtccattagttgacggcgtcactccatcgtaccataaacggggttttaggaagagatcatttcagaaaacttttccactgacagtgcctcattgaaatgccgcgcaaagcaaaggaagagatcatacagaaatgcgactttcttccgacagaaaatctgaagcgtttgctgtgtctgtgtcacgcatggcctacagagtcgcagatccagtgatgaggttcgtgataaaaactggaacttgttccccagtttagaacataacttccccactagcgccacaagatggaaaccatggaaccagcattgtcgaccgcgacagcaaatgacgcgttggaacacggctagactttcttttctacagcatttgcagggcagttccagattgagcgcaagcagcaaccctggctgttattttcgctctaaaggtaccaaaggtaaagcacctacaaagccacttgagagcaaacgactccgccttccagcttctagaaaacctacgaaagaaactagcggcgtgcacactacttagcaatttcagttgagagcagggaaacaacgtcacgtcgcatcttgcactgactctaatatagatagaagtgtcgaccttgactctctttttcaacagtttagcgttttttgaagaaacgaatgtgcgggctctgtaccattccagcaaggcctcaacgaacgactcagcctttctctcatttcgtattaccggatcatgcacgcaaaagcagcgtggaaaacagtgggtctcggttcaccgcatgcacgctctcttgtgtttttctcgaccatcgtgttaaatgcgtcaggtgaaatggtgtcccgcgtatctttgagagaccagcagttgcatgcaagctgtacacatatcgcgatattcgtttcggcaggttcctgtctcgtgattgtctgtgcggaaaatgcccgtcggtcgctttttgcctcttaacagctttcattgcagcagccgagacagggtatttctctgtcaactctctatttctctccaactccgctctgaagtgtggcgacaccgtggaaccttgaaccgctgaacacacagacagtccgaatctaggcgaaaaaagagctctgttgcatcagtccatggtgttaagtggttctacttcctcaactctcatcttaactccgctggcactggcgaattgggaccgtcacacatccttcgaacacacccgacactaataacatagagaccagagctacaccatgtagtgtaattgtcacagtattatagcaaatgctgtctctgtacagatgctccgcaagtcagaactatatatctcaaaccgaataaacagagacattatagtatctgcgatcctgaatagggtagtcatcgtctatttgagaagccaacatttacacacaagctgtaaaagtatcacgatattcactgtggtactctttcctaatgtttgtctgtacggaactcttaggtctatctctttatatattttcaagcctcttcttatgggatgttgaaaataacattggaaaccgacgggtcattggctgtttcgtcgtctcggcgtaatggctatcaacaacttcttgcagccaagttccgtatctgagggggcataatgtctcggattgctgagggtgtcgatctaaacttttcgcttttgaagtgagttccgtctttgcccgaacatgaagaaaacgctcgaagagcacagcaaaacccagccacttaaacagtgtagagcgcctccaaaccgagtttttgcggaagagacgacctccaaacctagttggggagaacgctccaacgaacaatatcaaatgaagcaaggaaaagattttgagctgcgtcgtagaaacgattcgctttccactctcgagctcaacgcagcggccgcgtcttttcagtttgtacagcacaaaaacgttcaaccacgaacgcgcgcgcacccctccattgccgccatttgtgtgactgttcgacgcttgcgaaaaggcgttttctctcgactcgcagttcggcgtttctccgctttctcttcttctttttcttgcatccttctgtctttttttccctccccgcttcttcctctcttccgtcaaatcacacgcgccttctcaagacagcttgtttcgtgtcttgcagaaagcctcgtgtgccttgtcgctgccgccgagaagactccgactggctagcttgaccttttcttgtttgcgtttccctttcgaatctgtggctttgcagaattctcgctgagaaactggcgaaactgccgggtaaagcgaggaaatccctgaggtgtatgtttcagttcgctcgcgacacagcggcggatgaatcgtcggcggcacagagcttgtctcaccaccctcccgtttgcgactttttacagggacgcctttggtatttttcgttgctccttccttccactctctctgacgaacggcagaaaattccctccaaaaactatcgcactgtgatccttccacctcgcctcctcttggccgctcgcggctccttccttcgagccttcctgccgttcccccggctccgaggcggtcttcacgacagttagccggaaaaggcaaaaagaggcaagaccgacgctctccacctttttctgtcgccaaggttgaccgttgcccgtcggattttccccctcagctcgctcgcctgcccgggcgcggcgccgagccacaagttgccgaga

SEQ ID NO: 2490 - DNA, 4424 bp, Toxoplasma gondii
  source 1..4424: mol_type = genomic DNA
tatcggtaacggattcagcagtaagtgtagtagtggtctcagcgttcccggccaaagaccctgcgcggtgatactccagagtaaggaggtgtcgcccagcaaaatcgtgaattttgtccacaagaaccgacgcgctttcgaattctgtgacagcgaagataaccacagtcccaattgggatagaagactatgatgtaagccaattcaatgactaaggtcatcagttgcgtccgacgatgtgctctacgtggcgacgataggtccttgcatggaaaaaacacgatgcagacagatttggaggcatcagcaagtcgacacagaaacctgaatatccgccaagcggctacaacctgaggctcacgcacagaggcgtttgataggcaaactcttatactatgcttcgtgtggcagcggcggccgctagtcaaagaggacccgaaccccctgcggtcacttacctctgaggcaaaggccgtcgttattcaacaaaagacgagagtgatccgataccttgacatattctatgattgggaagctgagcaatgccaaacaggaatcccattttgccatctcagctgggtctataacagcggccatgtccgggaccgtgagaactggccttcgagcatgcaaaccttcgatagttccatctttaggcatctggcccagatctgttctcgtcagaagtccagaagttgtggttgttaccataatgtaagaaggcgcgacctcaccgtccacgggtggatcatgcgatgaattcttcacctgtgatgagtcaacacatggcgccatgagtgtgggcgaatctggtagagcgaagccttcataattgaggaaaaagccagtgaaaatggaacatagcagaagtagtacgacgagctgctggctgggccgcttgctgtttctgaaacgcgcacgcatcgtggagcgcaatcaactactggagtaggaataactggaacatctgaggccccactcctgtctgccgcctccctcaactcgctcccgtaccgcttaaacctgaactggaagaagcgataatcattcagctacggaaaagtgggaggtcgatgcattccacttatgccttcgcgcgtttgtgtgacacccttatgagccgcagaaatacacggtgtttgttaacaattgagcgtcagttcgatgcccacgaagttcgttacttgatagtcgaacacgaatatgaacaagcatcagcgacttctcagctcgcatccatacgtcgaaaaaaaagaaaaatcagtcagcagacacactatccggcagaagtgtgcctcgttcgaattgctctacgcgcacagtagcgatattgcaatgcgacggctcgttgtctaactaacgtcagcaacacagcaatcagatgcagtcgcctcctgctccggcgtcactattctcgttctgtaaaggccgtttttttttgctgggtgtgaagttgctttgattcgccattctgctgatggcaaacagttaacgtcgctacaatcattgacatgcttccttgtctttccgtagttcctcactttcgacgcccttggagcatgcagaagaggtggaactgaattcgatcagacgacgagtggcgcacgagtttttcccctcgtgatctgcacactcacttcatgctcaaagccatcccgacccgcacttgcgtttcgctgtgagttttgatcgaagaaaggtgggttcgaattcctgaaagtccagttttatgtttgtgtaatcaattacaactgtgccaactgcatttggagtaaaaaacgacatacggtcgtttcgaatgagctagtcttggtctttttacagtgggacagacaaaaaccggacagcttcattcagctgcgagacatgctacgttcaataagtggcaggtatgtagcgatgtagaaaaaatgccactacttgttccactttattttagtgctacctgcagcctgcgacgccataacgttgttagttagctgataatgagagctcatactgtgcacagagaaggtggttcgttgaaacgtggcttgtaggtgtagctgtacgtgtacctgtctcctgtgggtagtgcaccagcgcacccgtgtctggctttgcacgttcaacagcagcaataagacatccggattttttccaggttggtaaacagtaatacacaacattgtgccagacgccttcagcattctttctgccgagttatatggcgccactctcttcgaggaagccggggactgtactttgcttccagtcccccccatcccctgtggagaacgcttttaccgaaagcataaggcacggcctgtcatgggaagcaaaccctgacgcttgctgtggcatggtctggtaccttggatcgtgccgcaactgtttttcgtgcatgcgcctgtgacactgcttgtgccttcttactgaagcctacacgcagatgttcttcgaccctcgaggggcgtgcaactgtcctgcataagcatgagcccacctcagcggcgcaaaatgtaaaggaatttgcattcgcgagaatgcgcttaccttgtacgtatcacgaatggcgtgtcgctccttccttctggttgtatatggattttgttttaacacctctcatagctcacatgggggggggggcgttatacacgtttattgggaccaggttttgcacacttgattggtttggtcaaatgaactgccgaggtgtcgagtatcacgtaccatgtgctttggtgctctgggcattaaactgtgcttatgacgcctgtctggagaacgtggaatgaaatttacttcctagtagtaatgttccgaagagaatccgttggccattgcctccacttatataagcaaccgtagagtcaggaggcgcatgcatgtagtgacggctttgcatttaagtagtgtagtcgtaggctttcctctacagtctggcaagtgttttcctctccgctggtgaagacacagcaggcgccttttagtgttgatatagcggaccgaacagttccctagagattctacgcggccgcttgtctgtgaaacagcatttgtgctgtctctcgcttcttcgtcaaccacctcaagcaagtcctgtacaggtcttcctggtcgttcgctgcccagcgtcttgttgcgataccactgtcgaattatgatagttactcattcacgtactggtatttctctgacgtgaacaaccaccttcgcgaagactgtctgaaaaacgcccaaactcacaccatcaatacggaacgagctcttgggcacatcttcgcgactgttttcccaatcaccacagataagcatggtcatcgtggggccttccattccgctggcaaatatagccaactgatttcaccatgtaaaaagccacccacggcgcaaagagtcacccgtgagagggggcggggaggaggtggggttgctgaaaagtatcagaagaaattatgtgtgttcataggaatatgcgcattttcctgacttagttcgcgtgcaaacatctgcatctcgcatggaataatcgctgggagccaaagcttccctgtttttttagtacccgttgtttaacggacagatacccccgaatgtcttgagaatattcgcaggaggggaacctcaatgggagggtgtagaccgtggtggtaccaccgagacaccgcgcaaagaaacgctcactcgcggaaagaatggaccgtctcccttgtcttgaccgtggcgagtccccttttctctattttatcgatgacaaacaacatggaagaaaccttaggatcgcttcgctcccaattttagtgcacggcacaccaagtcgccacgtcagcacgcgacgtagagggcagtcggcgacaccatatcgcacgacctcccccctctgtttgtcattcttctttgtgatttttccctgttgtttatgcaaactggattcgatatgaaggtattccatccttgttttggaaccgtttccgtggtagtgaactggaaggccactgctttcgggtgagtatgagtatccttatacgctggtgctcggctgtgtccgagccatcagtgtgacgggccgttgtcgcggcttctatcctagacatgaacttcctactgcgatacattgcatccttctttctgtaaaactcccacggtgagcctgcatcaacgagtaggcctgacttggtgctgttttgtctccacttcactttcgtggctcctcacgttctcccgctgtccaatacccagcgtaggcacgttgcgtcagaaagaagctcgttttttctgtagagaaaggtgtcggacttttttcctttcatatcacggggcgcattcttgctggctcccaggcgaagagagggacaacctgagagggagaagcacagtgagccgtctacgcgggctgcttctttggttcgtcacgcctcaccttcatttccttgttgacacaa

SEQ ID NO: 2491 - DNA, 1643 bp, Toxoplasma gondii
  source 1..1643: mol_type = genomic DNA
ggtatatgcattcatgtgcctacccgttatgctacacagcaatatatatccctatacacatatgcatatgtgtctttatctatatgtctgtttatatgatgcatgtctatgtgtatgtatgtgtgtgaatatgcaggtgggcatctgtgcatggaagtgtgaattcacttacagaggggaatttccattcttctaagcaaatatagctaaccattttctcgcatagttagatgcttgtgcaggcgtttttgcttgcatgaacttgcgtgcatgcgcctctccagaaaaatggcgtctttcgcagaacgtttgtgtcgggaaaggaacatggcagagaaactgctgtgagaagaggcgaagctttctttcttcaagaaactgtcacggacttctttctctggaaaaggagctcgtgtcatgcaccctgcgcatactggacgcgtttgacaaagacgttcttgatgggtgtacaccgatggaaagcagacgaacataattgcgaacgcgctcgtgagtgtgatgtcactggggtacacaggctctcatttcgtcgccaagagtcacaaactgatgtccctatgtaggtgtacacttctacgttcacccatttccaaatatgtatgtgtctctgcatattttacgtccacttacactttgttctgactaggcaatggatgaagagaagtgagcgtggatgtccaaacaaagttccgcgtcagtggagagtttcgcgtcgggcattgtctccttctctcgcgaattgacgtcccccgcctttgtgcctgttccactgaatgtgaagcgacgcctctcctccggtctcgccttctttttcttcgctgttcgtctttcgctttgaagtcactcttcttcgcactttgcctccaactctttgctcgcagtccgccgccaggcagcgagttctgcttccgctgcctcgtgctctttggtctggcagacgagggaagaggcgaaggaaaccgagaagaaattcctttccccgaaataaaacgagcctgtcctgcgttactctgccaaggagaaaaaatacgcggaagccgagtcttggtgcgagaacgcggaaggcagtggattttttcgctttaccccaacgtcacgcctgacgagcatgtcgctcatttgcctgactccgcgtcgggtgtagagtgtttgcgagttgtgttggacaccgttttgtttttttctttttctattcgtttcttttccgcgaactctgctcttcgctgtggtgagctttcagcgtctttgcagtgtcttcttcgctagctcccagggacggtcttcaaacgctgttccgcgaaagtcgactgacgcgtcgttttccccgaaccgtttctctcttttctttctcctctttctcttctctctcctctctttcctctctctcctcaattctctgttttctcgttctcgcgaaaaatcgcgacttctccccggtcgagactgagacggaagtcctgtcttctccaagttcgagagaagtcgaggcggcacccgggtctctgcctcgagagacagcgcacagagcgagggagagaaagcgagtgcgaaagagagacttttcctaggaaaacggaaaacatctcttttcttcaaagtctccacctcaacgcaactcaaaa

SEQ ID NO: 2492 - DNA, 2309 bp, Toxoplasma gondii
  source 1..2309: mol_type = genomic DNA
tctaaaaaggtacgaatgcattcaaaatgggcatcttcttcttcgcaaagagatccagcggggggggggcgtccgaggtctggggagttccttggggcgcgtgtctttacggcggcttgcgcaggaggagaaacgctctcccgcacagatttggtcgctcggctgtacaccgcgtttactgacaagtcgaacagaacttttcttgtgcgagttgacccgctcgctcagaggaagtaagcgcgggtggaaaagatggcaccccaaagagttcagtggtagtttcacactgggaagaagagtgcaaacaaagcggagcaagtgccccgagcgagaagtggaaagacagtgaaacatccgttccaacagccaccaaagggcagagagcgcactgcaagttttcatcgaaatctcaccacaagcgtcaagtatcatcccctcgcccccactaccgacatgtgtaatgctgaaacaacaatcggctatcaaaagctcgaccttcagattgataacttctacgttacaccggggtgacaccgctcgcctgcagtgcacgcaaatcaaagttgaacactcaacaacagatgtctctctgtttcgttctttcctcacgaccccttctcacacagaggtatctctctttgctctttctcacgttgttcttttctccgtaaggccttgctgcggaactctgcacatcaccgctctcaagcaaaagggtcgtttgtcggcaatttgcatgcgctgcggcatctgatacgcacaaatatgtgctcgtctgctgcatgaacacagaggctctgtgtttctgtgacagccgccattgctcgagctcggcccatgtacgagatgcgcatcagtgtccacctaattcgcatgaggcttccgaaggtttgacttctcttctgtaccacccttattctcctggactgcgcgacagagctgacattgtctgcggagacaagctagtggagaaagaaagctatcaatgtgacaatagtgctttattgtggaagatgtgtgtccaggtggtgtaggaatgcttgttgctcaagtcacattgaaaggttattcaagtgtcgcgcgaatcttaccgtcttttccaccaccgtatgcactcggaacagcagcgtcgacgggggagattcacttcttcaaactttcacagaaaggaggctacacgaaggttctgtctcgtctgcacagaggcaaaccagccagctgtacggctgctccgttcgacctccctggaacgggggtttcagcagcatttctcgctatttttctcttgaggaaagatgcacagatgcactgggaagcgcagctcgaattgagagttttacttctgtgaatttccagacacagaggccgccgtcacgtctggagaaaaaagcgcatttttgcgcgggtgcggtgagcacagtaggtgcaggtcaccgtgtgtcagcgagggtctcgtaaactggtgtttttcccgtcgatttttcgtgacgaagtgcttctttttttctctgtccacgcaggctttgcgtcttcgaccttgttccctttcaccaaccaaaagccgcaacttttcgtgttcgggcaaaagctgcgagagtctgtcgaaaacgagaagctcgccggtgaccgcgggaaaagttctcgcgtgtgttctgctgcggatgcaagcatccacgtacccggcttgctcttttctctccagcttttttcaaaacattctgcggtagcaaagggtgctccttctgtcgttgtcagtggaagccgagaaagtcgagaggcagcgaaagtgtgcgactgcagatgcgcgagtcaagggaaacagcgaggaagcgaaaccgcagagccgcgcgtctccaacgattgctggcgtgatctcattcaagacacagagcgtcaaaaagaaaccgcgaaaaagcgttagcgcgtctacacaaaaaccgagtcaaaaagctctcggttccgtgtgcacactcggtcagtgcacttgcttcttttccgttccctttccaaaccttctgcttccgctcgaaaaacgctggagagaaaagagcaagaggtgggtacgtggatgccagctcctcccgtcttccgcggcaagcttctttgctctgacgtcttcttccttctctcctttcacctgcactctccgaacgcagtgtcggccgatcgcggcgcgcactggctgtcggttgtctgtttcgccgccgcagcgacatccacgttttctccactgtttttgtcacaggttttcgagtttctttgactccttccgctgcgcgaaactttccagactttgctccgccgaaaga

SEQ ID NO: 2493 - DNA, 2011 bp, Toxoplasma gondii
  source 1..2011: mol_type = genomic DNA
agtttttcggcaggaacagtttcgatagagatttcgctcttgcatgagagttcgggaacagcgacggccatggctgcgtgactacgggtagacatgtcaggagcagagtcgttgcacccttgacgtcaaggtacagagacctactgcagtacatttgcatcgtgcacgcacgtcgtggaagattcaacttagatagttcgtggtaggaaaaccttctgcatgtaaccatcggcaagcagctacctttttcagtaggcaaactcacccgtccatgcttgagcatcttcaacagtgcgagggacgaaatgtacacctgctcggaggtatcggccatcggttggtcgcggttagggggaccaactcccattcccccaaactgctgaaggagtccacgaaggttcgaaggcaggcccgccattttgcttcgtcttatggaagagcacagcgagagctgccagtgtgtcaggtaagatgcaaattcgcggcaagcgtgccgaagagacaaaagggataccaatcaacttccactttatccacagagaacggcacactactgcaggacagccgacaaaattgccacggggagagtcggcgcaaatggcagcacggcagagacaccactccttccccgggaaccgcagaaagacgactttgcaaagagcaaggaaaagtcacggcccacctaaagcacgagcatggaagaaagtggcttacttcgatgaccaagacgaggggaaacccgaccggaggttgcaaatggacgcaaataactgtggaaaaaacaggattaccggggtgtacacacaaacgcgacgctacaggcgctgcagagtctcctgcgtttgcggaaaagacaacgccaactgacgtcgaagaagcacaggaaagaaaagcgccgtcagcacagcggaggactaggagaaaaagtagggaaaaacgagaaggctcagaagaaaaaaagtggattgcctgcacgtgcagcagtgtgtctacacaaagcacagctgacaggaatggcagacgtgacgagccgtttgccacccgccaaaaccgcttcaagtcctcaagaaacttgttcttttcccgatttccccacacagtagcgcaacgccggtgaatttccatcaaatatgctgaaacgaccctctctccgaggaaaaaactgcagtccttcacgagagcccgaacacgcgcacgcttctgtgcggcggtggtgatgcatgcagacgcaatcgtaaaggtgctcgaactcaattctctctcgcgaatgctcagcctctagaactcctgacttatgtgccttagcttgcgtcctcgttcatttgatcggatcatttctcatctatgcagcacccttaggctgtccatcgcaccacgtggcctcacgaaaggcacacaagggggaaagtgattccagtcaaatctgtactctgctgctcgctctttgccgctcgctcttttcaggacttcctggtcaccagctctgccgcacgcgcagtttttgcattatttcttcatgagggacgtgccgggtctcactggctggtttttgcgggtgaatgctgccgctcaaggccattcgcaacgacgcgctagagaaatattagcttttaccttgcctactgggactgcctccttacaacaacgaccccgagagcacaccgctttccgttctgcggtccgtgtttgcctctttcatgttctgtcggagcaaagaagtccgttcaccagggtagcaagagaagtgtgtggaaagcccctctggcttgtgccgcccgaaccgagggggaaggcgaagaccgaactgagaacggctgtggccgggggctgaagcgagagcatgcagaaagtataaatacaactcaatgcatgtaaatcgccacatgaaagcgaaatccaaatctctgtgcatggaagtgtccatggctgttgccagaggactgacaagggggagaccggaaacagtgccgtgcgccgtctacctcgcgtggaagcgaagcaagcgcgacaa

SEQ ID NO: 2494 - DNA, 1743 bp, Toxoplasma gondii
  source 1..1743: mol_type = genomic DNA
aaccgtgaaaacgaagcgccctggtgtgtcgcgtttaatagcttacgtggacattgccttttgaagcggctcgcagggttgcacctgtatgtagacgcaggttagagcacagcttggcagtgcgtaaatgtcagttctgtttcacaacggttcgctaggtttccgagtccgtgggtctccgaatagcagtggtagaaatccatgactatcctgaaaggcgtggaacctgtaccggcagatgatagtgctgacgttagctgaattgggtagcggcggatgttcgaagatgagacgcttaccaactaccattcttgggaatgcctccttcccagttaacagtgtggaggtgaggggtttagacgccaaatgtatctttggcaaatttggaacgacagaaaggttcgcggacggtcttccgtgcgctggagtcacagtgacgttgccacgtgtcaaatgacatgcgaaacgcaagggaagctaaatctttggaagaacagcagtaggttacctcggtcgttgagtttttgtgcgaaattgaggatttctgggccgcggctatcgaatttcgtttgagccacgggactgcaattgacgaccgacgcagcgtgctgcacgccggcacgaatcgcttgcttcagaaaggtcacatcgcctaaatagtggagagagtgaggcatcgatttgtttttcacgcactcaactgccccacgcacaaatatgaggaccccttataaatcctaaagcgatttccaacaaccggtttcgttgaaaacgggcgaagagcggacgcgtcagacttcgcagttttgttcaggtctcctcacactcgaaaaaagagaagtcctctccaagcgagggcagctgaacaaagaaacgaggcttctctgtaataagaccgcaattgtcgaacgtgttcgattcgccaagtgcaaaccaggagggaaacgtggcggttacagaggcactggaagtcgtaacgcctttttctctgggttgaacggaccaaaaggccggtgaccaggctgccactgcatgcaaagaatctcgatttttagactctctctcttttctatcagcaggacgccctcagttttgtttgctggagcatgcacctttcgtctgatcgggggttcgcccgcaaatcatacagcaatcgctttgcttgtgacacacacgcaattttattaaggccgcgcaaatgaatcagactgcactttttcgcgggtttccggtctctacatgctgtctgcaaaaggcatttccttcaacttgtagacaaggtaccagaacacgtgatttctggagcaacgctctaactcaactatgtagcagacgcaggctcttgttggaatcgacacagttatgtgcacccgaaatttgatttcccgaaaatcaagccttacccttgctttatttgaagacggtcgaatgttttcgagaactctacataaacacgggccagcgtggccaacggagcagctgccccattttcctttgacaccaaacaccccgggtacatcgagacgacacgcatgaaagcatcacacaagcgagacttacttttcggctttcattctccgaaggcacaaagaaactccatagacaggaaaaagaaagatcgtcgcaatttccctgccaagctgttcttggggccaatctgaatcgagacagagcagcgtgcagagcatctagttgtttagcttctcttccacgactgtgaaaccgacgctttgtctcacaaga

SEQ ID NO: 2495 - DNA, 2009 bp, Toxoplasma gondii
  source 1..2009: mol_type = genomic DNA
tacaaatctctgaatccatgcagaagcttcggcatcaatgctgtcaagctccttatagtgcctgttcgttctctgagggtcttttaccctgtttgagctctctgggtacgcacgaagtcacgacagaactgttgtgggagcagacaaggaaacaaatgcagtatacggagcaatgggtgatcagttctccacgtccgtgaaacaacagtcaaagcagcgagtcagcccttttcatttttccgtacgcgccaccctgcagcgagcatgggagtatctggagagaagaaagttagtcgtgaatccggagaatgtgatcgctgcacaggcaaaactggtttctggtgcaaatagaattcacggagttgtctctcgtggcccacctcaggcctgctagggaggcagcgggaatgtcaatcgtatgccatgtttcgtctgtatcaaagagaagaatcgaaacgaaactcgtcctgtttaaacaccccacggtaactgaacatttacgcgtgcgcaaataaaattggtgcgagctcagtgttgagaaaagtaatcatgtgtcaacacagtagcgatcactgctgtttatatgtgtttttaacaaagagcctttggagagagccagggtgtatgtgcttgtccaagatttcgtattcgcctcatctatatactccgcctcagcgattgaatcctgacagtacttgaacacagaaacggtaccagtgtggtaggccagaaagcccgtaaacgaccgatgacatcgtcactgtcgcaggtccccctgtcacaattctccttttttaacgtgtttatcctccaggatcccaaaacaacaagtataccgttttcgtcgcctattcaacgccaccgcaccgtaaaagtgagaaacagtctggggaacggtctaaacattgaaagaaaaaacaacgtatttagctgaactgtagtctcttctatggccactactcagcgtctatcaaacgtacgttcgtttcctgatctcctgtatatcccagttttttgcctcttcataggggcagtgtctgtcaaacccacaatcttggacgtggtcaccacacgttactggtttgatccctttctttccgggccgaaacaaaacgggtctgttgcagcttaaagacagtgaggagcaaaacacgccctccggtagcagtgactcatttctcgagacggaacccacaagccaataaagatgtcagactcccttgaatgagagagaaacgctgcaccatttgtctaccggagagctcccccaaggtttcttgccgctgccctctttgtatatgtgcgtaatggaaggaccagggtatcgcacatgtttcctgagcgaaacacactattcttggtagataccgccatgacgaaccggcacagaatactcgagtgcaaatctctgtggtacgtggtagccgtaaaacttatgggagtgagctagacggtcacagtctttcgcttacagcagctacgtcaagtacactgctgctttttggctgtcggcagtagttcgctccgccttctgccgaaaagattgcactccggggaccagcggagttttgcgtcacctgaaatctatttcctttcggcatccgcaggtttgctcagttcaacgaagcggaggtatctacatttactcgtagttggctgtccggagcgtaaacacttgaagccggtatttctgaaaaaaacatcgctgttatcttacccgtttcaagcagagcgggctcctctccgaagtcgaggcacggcacgcgtttccccggaccctcccatatctctgatagtaatggcagttggtgaattgcctatccttattgattttctgtgcacatcagaaattccatcctcaccgataaataccacttcagtatcgtgctgtcttctatgtcgtgtggtgtgagactaggttgtcttgtgcttttgcggtgtagcaatcctcgtccgccgatgttacgcgaactaattcaccacttcgtcccgctttaggattgacagga

SEQ ID NO: 2496 - DNA, 3505 bp, Toxoplasma gondii
  source 1..3505: mol_type = genomic DNA
tccatcaaacgggctgtcttccctcgatttcagaagtggcgattttcggtggggatgtctccaatcggtacactggactgcggaagcaaacttcagctggtgaacaggcttgctcgatttgttcctgacagaaacagaggcgccagtctttcgcgcggcccagtgtcaagccaggaagacggcgacaagtatatattcactgcacagcaacaaaaaaagctttgctcggaaagtgtgctgcctgtacacgatctgccctaggcgtgcttggtcaccgaaagcctatacgaactcagttgccaggctactgtagcgcatacctagtcttggcgaaaaatgtcagttgatggcaacacttctccataacgtagttccggactaagactctgattttcaacctgccttaacggaatgaccgtatgggtgtttatcagctccacacccgtatgcgaactgaggctacatatttctacgctgtaaaaaagctaatcacatgccttaagcaaccacagtaccaacatactggagacgcacatccttgaagctcatttgcaggtgtcgtaaaatagctgcgcccgccacacgtgacgatgacatgcgtatcaagatgacttgtttccttggttttttaaagtagttctctctggatttagatagctctttaaaaattggtagatttgccgacatgctcaagagctctgactctacgtaacagccaacattacggaagcgaccccactattgcgaacgcaaccacatgccgtacctggctttaaccgacaggaagacacaaaacattggaaccagcaggcataaaaaactcgtcgtcctcccagttactcgggggatatgatgtccggttcgtggataaatccgacttagacctagaccgcaatcttggcctgaccagtatcgattcttttatcacgatgaactcttctgtgtccggccaacagccacgggcatccgaaccaccttttggggatgtggcgtttctctgcttgaactcatcttcttcctgatgactggaaggagaggtttggatcaatcgcttccatcacactctattctcgaaaataccgttcaggtactttgggaagtgatgttacggtccggtggactgagattatgctatctgggtattctggtaccaccaaacaaaagccgctcggcagaagagtgatccagttaattatgatcgacaattaaaatccgcagtagggtaacgactccacgtgtctgcgccgtaaactttgttagtacacacaccgtacaattttgcagaatgatagactctccaaggtacaaaaaccgttgagggcaacgattcggtgacagattttgcactcaccaacacccgcctctccccttccgccttgagagtctctccctccttcgacgttcgaccacactcagtgaggaagtgacagcaagtcacttcggttttcccgaaggcaccgacttcgaagatcagcgagtgctttctgggtccgtgttacccagctactctatcactggcgtgagtcaacacaaaaggtagtttgtaaggcaaactgtcgctgaccagaagctttgccgtccccgttccaagttccggctacgatatgcctgatgcggtaaaaacccgtgtgcactggcgactatgggaaaggaccttgggtcccgaaaacaaagaccttcaaacttaaccagttgtccaattcgcagtggaagaagcacatcaacaattctgtctcggaggtgattactcccagagggtaccagaaatcagtgatcatcctagcatctgaagagtagttttctctccatgttaacattcgagcgccactattcgtccatagatacgacaagtgaccaaatgggaaccttcacgaagatcggtagagattccagaagacagtgtcgacgcttgttgcctacgaggatgggaaggcggagacactccacgtatccctttcgaaaagcaaacggttgcgctttgtgcccaggaagtgcgtctgatcgtggaggcatagcagtgggcattgtccgtgactttcttacccgtgcacacgcacaatttcaggagtccccagcgttgggtctcgcggccaacgcacccggcagaattgcggaatctctaggcactgtgcgtttctcgccagcttttcttcgtctcatcagcgtcgccccacgggggtagctccggaatcgaacacaccgcgccgcgccagagggggatctttttgccttggtgtccaggagtacgccctaggagtgttacgtccaagacttgcgtgaaacacgttaaaccatcgtttttttgtcgcttctggggaccacagaaagcgggaaaagaccggggagagaaggcggcacctacgcgacggcctcgcagcgggagtctcttcgtcggatccatcgggatcagaatggagagaaacgatagagtgtcttagctgcttcctcgtgctttctactttttgttctctacctttcttcgccgtcgcgcttcccgtcttctttttcgcgtctgcggtctagactgccacgcttgtctgaggcgcgaaaccagctcgcagggtgagctaggcgctctgcctatccgcgagaaccgttcttctccgttcagcgcagcactgtcttcgccgcgtcccccagcctttttccgctcgctttttgtccactcccgcatcttcactcgtcactttgtgcgccctaccttttctgtgactacctgaaggtgagacgctgtaccccagctctccccgtggtttgcgaggttcgaaggagcccctgttgcggggaatttcccttgaaactggcggacgagaaaccagagggtttctttgtctcgcttttagacggcagctgcttctcgttccttttaccacatgttttcctgactttttgcctctctggaagacttcaccaggcgccctaggggtgagttgctccccagggcgtcactggaccgagggatcttgtccccctcgagtctcgccttttctacttcatttagttttggacaccaaaaaactcctgtgtctgccatgaggtagttcgtgtgccacccaggggaaccttgcaacctctgccttcggagtgtctcgtttgatgtcgaaggcgggtgagtatccggaaacctttttgttttaagatttgctcgttgcagaaacctgatttccctggttgacctctggcctccatagcagctgctccacggttcactgcttcgctcggtagcccctgctgcccgcattttttttcgtttctcgactctgcacatttgcaccactatctctgtcgatataccgtctttccagagttttttcttcgccaccgatccccttcccgttcgtctgcggctctcggttccgttggttcccctgtgtgtctctgtttccgtgtctgcgttgccttttcggcgacctgtctcagcttcgagaggggcggttctttcgtccctgcctgggggtttctgcggacgagacccccgcaacttctcaggtggaaatcgacgcga

SEQ ID NO: 2497 - DNA, 2963 bp, Toxoplasma gondii
  source 1..2963: mol_type = genomic DNA
aaaagacgagcctgcggacgcagggagaggccgtagaattttctcgagtgcctcacgttcctgttttctctttgcctctgcagatacaccacagtgcggtgtgatgtcgcctgcgagagcctcggcaaggtcgtggacgagggccatcttgatacatctgtgaggccggggagacagcacagaaaccgcaaagcgaaggataacacacattcaagacttctgtctctctcccttcctctcctttctccgacttcttcttgttcttcttggctggctctggcctctctccgtgactctctctgtttctcggcctcgggcacagtgcactcgacagttgtacacggcttttgaaccctatgcgtgaacccctacaggtaagcatttgtccttttcgttattcttccagaaaaaatgcagatctacacctttgagtgggagggcaacgtcccccgtctcgctccctcacttgtttctgtccagcttgttttcgcgaatcaatttggaagattgcggatcagttccaatcaggaaggcgcagattcccgcgcgaaacgagtgctcggcgacgctctctggaccgcgaactccagagagcttccagccagtcctcttcagtttcttcagctctccgaccatgagcagaaaattcaacagcgagcagtagcaagtctctccgccctttgcgtcccccgaagaagcctcagagtgcgagccggggccagcaggcgcagccgaagagctggccatcttgattctctgaaggggataaggaagaattcacacgagaaggaacgaaaaagacgagaggttgacggtggacgcttgtgtcaggagaggcggcggccgcgagactccgacgaagtcgacgtggtgctcggacttctctgagaagcggactctgcgaggaaagacaagccacagctctgtgttcacattagtataactcaaatcaaataaacagagacattatagttcaaagggcttcaaaggtcacctaggtcgctctctcctacctgcgcgtttgcgccaaggcagcgactttcctgctccctcccccgaccactggcttttcatctggcatggattgattcaaagatggccacactgcgaagacactggatctgtcgaccgagctacttttctactctatccacccagtgttctccaaaaaaagaaacctctcctcgtctcgtttgcccgccccccccctcccccgaggaggccggcagtcgagggagcacaccggaaaggacgtccggaaatggtcaactttgacctgtgtttccagtatttgaagtggtctcgtacacagcttagcctccgatctcagaatttgcgaaatcctcgccttttcaaccgttggaaacccaagtttcggccctttcaagagagacgacacaacgacgcatgcaaagacctacggattgcttgacttcggcggagttgtttgcccgagaaccaacaaggaaacctgaaagtcccgctttcttgcgttagcgcaactgccctcgcgcaaaaacgctttcctttcctgctttcctcggaaaacaaaagtgcgtatgtgcgtgtgcccgacgtatttccgcgacacacaggagcgttagcagacagtccaatacgaaccttgacagttttgtgattcccatcaactagaaactctcagcgtcgcggcgacttgttgtgtcgcaataaggaacctaggcccttgtgtaacaacgaggaacctggacaaagcagttctggttcgcggatcatttgtacatgtgccctttttactacgacgggaacagtcagcgagattcctcccgaccgttctctgtttaagttgcgatatcttccgttccgtattccgtaccagcgccacttgagggggaaacgacgtggaatttgaagttcctttgtccatcgatcttcagtcgcagtggctcccgtgtacaacacaaattatgaaccgaattactccactctcgtacagcgccagtctccgcgcagcgcgtgcaaaaacgccttctgtctggtcacttgcctgctggagctcgaggctcgacggaattctaggatctttcctcgactgcatgtcggcttccgctttgcctttcgagcttcttttcttcgtaaaaggcatctcgagtgaatcaacctgcaagttatgtctctctgcggttctcgcctgtgtgaatttgtcgcgcgaagttgccgcgctgtcagacgaccgacagcgaagcccttgcatgaggcgggaaagagagtttttctagaagttgacctctaagcagcataaggtaaaaactttcttaggcagcaaagtggtaccaacgaaaaagagggccttgccagagaccggccgcctcggttgccgctacgtggtctggcaaaagaggttctccatgtctccgcaagacccaaacgagctatgtttcgagactcaagcggctaactttttttccgtgcttgtcgaggctccgtttgacggatctcttccttcctcgtcggcccccataaaaagcgcgactggtgcgttcgcgcctggttcggctcgcgtgtctcgtcgccaccgtcctctctcagaggaagaaataccgttttccaccacaagtgattttgtcggaaggggaaaaatactgttccgtgaccctattgagggacgttgggaaaggacagggaaagcgagagtgcgtccacactgcgatgctgatcgcagctcacgctccaagtgtacacacactcgacggcgctgcgtaaaaggcgacaccggcggacacgggagggtccacttttctttctttgtgtttttcacgttctttgcatttgcagattggcgcgcggtttttgctaactttctcttcctctcggagtgcgtttaaaccggtttccccctcgttttctcccattctctctcaacttcccctgctgtgcttctgtccatttcccccgtcctcagcgttcgctcaagtgaggcatca

SEQ ID NO: 2498 - DNA, 3706 bp, Toxoplasma gondii
  source 1..3706: mol_type = genomic DNA
tgtgtcttcttcatcggagatttgtttccttggttgaggaagagtggcatgcgtcttgatgacgtttctggaggagagaggggcgcctgggcggctgtcgttgagctcggatttctcttgatttttgtgacgaactgtttacatcgaaacagtctccgtcgtgtgacagcgagggtgcgcgaggcggagacgggaacctggcggcggtttgaagaggtttgtcgtttaggcgggggcgggttgctgtgctgaagcgatattctttcatgtgattgtaattatcacattataagcagacccccggactcagaaaacttcagaaacctagcggctagcgtgatggatgtaactgattcctcttcaccgctacttcactttttctgctccgtttttctgatgtgtgtattcgttcaggggaacaacggcatgacgaaacggaagatgcggcacttacaaaagcagatactcaagggtcgacggccggtgtcttaacgcacctgtgcgtttggtgcatattctggttgttttatctcgttttgtctttctgaaggctgaaacgtggttgacgacgtccttttctcatagaagcggggtcggatacgagagacgcatccctgttgcggtgaccgaaggcaagctgcttgctgtgctggtgtgaaaataccggaactcagaaacagtttcacggttcgtcgagaaaaacgctccggtgttctctgctggcggtgggccttcggctgtcacatggcagagtcgctcacaaattctcctctgcagataatacgttgtgttgtcgtcggtcgcgagatcttttaactccctgtcaggaaaacagagataattacgcaggaaaagctcgagccgttccccgacacggttatttgttccacagatcgcatgaatgactatgcacgtggtcgccttcgatgaaacgaaatacatcatcaagtcagaccgtcacacaagggggaaactttcgttgcgtgtcattggcaaagattcctttcaggtgctgctcgatttagccggggattctaacgttagccacgaactcctgagaaatgtgcgtaaatctcctgagtcttcttgaaaaactacgggttttgaactttccttatctagggaccgtaccgtgcgtgttacgcaactcatcagccgtactgcgacacaagtttcacagaaagagacagtggtacacgagaaaatccccgcaggcgggaggagagtctggtgaaaactttatccacaggtgaggagcaattaactcgtttgttttacctcaaaagctgacgcctcaaatgagaggcgcagagaaaggcgcgaccgctgtgccggcgtatgcagttgggttcttagcgtttcctgtgaagggtggaagtcacttgctcactgatatttccatttctcttagcaattttacaacagaaatttctctgacacctcagagctccgaccggtgttactgtcaaaatcccaggacctgccgttttgtttgaagagacgccaagagtgacgtcaggccgttagggaagaaacaaatttgcttttttccgcgaacattgcgaagtagcgggttttcaccttggagtgtagcatcgaattctatcggatttctgggttcaaatttctcgcctgaaatgcactacaccgtttggcgaagtttcgtcgaagaccagggacgcagaacaggcggtcgtttccctcgcaacgaaaagctcaaccccccctccctccctcacaaagttagaacgcacaggtctgagaagtcacagcatcacttttaattgattgcagaaggttgtagagcaggtgagcatcagcaatttattactgcactgttgcgccacgatcgggcggatgttgccagtctcgttcagattgcatgcccttgcagaatcaggggtgctttgactgaaaacgcgcaaaacggagaaaaaactctaaagacgcttagtgtatacaaacagtagcgctttctcaatttgtcaagtgccgcttttgccgacaacggcaggattcgaacctgcgcgggcagaacccaatggcttagcaggccaccgccttaaccgctcggccacgttgtctcccgtcctcctcctcctttagaacagaatcagatcccagccgccgtgatgtgcaagacaactgcacgcagaaagcaaaatctcggccataaaagctccattattggtcgattcagatgtagctatagtacctcactcacctgattatttactctgtctccagcggcgctactcgagctgattgaggccgagaagtttaacactcccttttactatgtcccagactccatatcaaagaaggaagtaaacattagtacaagtatataccagaaacagcaacaacgaatgtgaatcacttcgagcagcaagcgtggacggaccggggatcgatcccgggacctcctgaatgcaaatcaggcgtgataccactacaccatccgcccggcagtgactcgggattttctgtgcaatagcgtgtgtgaggaacgaaagctgcctgtcgtcatactcggttttgatatgtggcatgtacacatccgttgattctttcatcttttgagggagatgttgaggcatgaggagatgtcagggcagacgatgttcttcaaaatgctggctgctccagcgcccagcttgtcggtggcgtgtgtcgtcaaatcgtgaccgctccttttcggtcacagccatgaaaactatggctagtcgtcaagtctctcgaaatgaatttagtaaagtgtcgagccacatcctaaaattgtctgcaacacaaaggtcggcggcaattcccaagtctgtgtcatacgtgcgagcaaggatcaacagtcaggcaagcgcatgtatagtcaaggccatatgtaactaagtccctatttcggttatgtacagagtctcggtcccctgttgctctgttccatgcagcatcgctctagagatcgggaacagcgtcaggagaataggtgtcaagcaacagggagcttcgttcttccatacacccatgctactgcttgccggagaatactgtagaaacagaggcatcgtgaacttcacgttttgcgtggacgctcgtgagggatattcattcaacaactgttttctcttatcgtttgggaaatcggtagtagcacctctctgtggtcgcactgttgctaaaaaaggcttgttgagccactcatccttacttgagacaaatctgctaccacacacagcaaatcaggacatcgctgtaatgtgtctcacaggtgagtcaatgaacgaccacagcgacatcaatttctgcataaaatggcacggtcacagagttttgcgatccctggacgaaagttgagagcgagggaggtcaagatgtttgggggattctgtctcgtgccgatgagccacaaacgatatatttgcacgaataagtgcgggtgccacattcgttttgtagctgttccgcatgtctgtggttctccaagggagaactgtattaccgcactcaatccgatatgacagtgaccgggacgtagaacacctcctacccgtgcactgaagaaaattgaagtgaagcgtctttttcattgcgaaagtggtgatcaaactggggacgtctgggctgtattagttgtgcgatggcggaaagcagatgtctccggtgactgggacatagaaatcgattacaacgctaactggcactttaaacaatg

SEQ ID NO: 2499 - DNA, 2606 bp, Toxoplasma gondii
  source 1..2606: mol_type = genomic DNA
ggccgatatgcattcgtcagaagggaggcaagcatctaatctgttttttttttcggagaagggaactagcaatgcaaaaggagcaaagcgtgtaattcagtgaatcgataagaggtcgtgggcacggctcgtcgcttgcgttgtttcgccgtttctgttccagctcgccctgagctgagaagcaggcacaccggtcctttgatacccaactatgtaaagttcacagatgctgttttctacgttccgatacaatacgtcggctgaggagcgggattccttgctttgtaagcattggcttttgtggcaacccgtccaagaactgattcgctggtgggttcagtgtccatgactacctggggcctataagcattccctcttcggagtgcagctgacgacaactgcgtgcgcatcatggtcgtagggatcagcataaagccatgtcgacgtttgttttgtttcgttccgttctaacaagcaagacttcgcgacggggctagtattcagttggactgcgacatgacttctttcatggaacgaggactgattggacacgcgacttggtggcctactcccaccaggaaaaagtggctcgttctctgtggtattcttttagagttcgatcaaaacgaaagcgagaactttagcattttcaggaggggagtcttgctttgattctccatacaaatagagagatgtggcgttaggtagcacacgaaagctagctatcttgatttgtacttgatataattaccgcggacaagcattcagccacttattgaggaacacccatgagcccaaaaccataacttcggaatttcagtggtttgtgactccaaatccattatcgttattatagatggatggacctaagtattcctgacagattaaaatcaggaaagagactaccaaagggaatgctgtgacatttgtacagttagatgctagtatgatcagtactgtcgttctggcagtatcatcaagatagccagtgttgtagcccgtaacagagatcctgcctatccagctccagactggaggtttgacgtggaattcaagcagagtgaaataaaggtaaagttcacaacaacgggaaagaacagtccatgttattacagcgtccaatgtcgggtcaccctgaaccacatccaacttggagcaaccgaccgagttttcctccccacggtctccctctgtgtggccacgaatgtggcaggaaaaactcaagctgtgaataagaccacgtggagaggctaattgaaatctctagcgaaaatgtgcacgtttcatttcccaaaagagcgcactacatctgggaacaggaggagatgcagccgcgtgcccagcaactggagtcggtgattatcctgtcgcagaaagctgtgacacaactgccttcacaaaagtggagtttcgcctaaaagtccgtctcaaaactctgtaactagcatggagtaaagaaggcaccgaatgagggaccacccgtcctgacctcagtcaaagaagagccgattccgcccttcagatggcgaccgtttcgcaggccaactcttctcaacagtgcatgcaagaaaaaaaggaattcgacccgcttgttaaattccgacgtgctggtgaaacaccggtgagagcaatgcgttttttcatccattccgcatatgcattttgataaagaactgcttgcggcttctggcgtggggtggcgagaacatttactcgggcttaatttgcgttagtgcgctggaggctagacacagtcccattgactatcaagaggccggagacgaaacggattcttcccgttcctcagagcattgttcattcagactgtagtcctagaagaatatgtgttttctactcccgaatcgctgtcgaatcccaaaggagcactctaccccagcgattgtccaaaatttcttgactgaaactgtcgcttgcgtcgtgtttcgtctgggtacgtcgtgagcattgatcctcagttcgtccgccccacacgtggcctacggtcgaaatttattcgcttgatgaagaaccgagatgtttcctctctatccttcttgcaaaacgctgtccgagtcacttctgtgactgcatgcttctctgattggctcgtcaaagagctcgatactgtagtcgcccaatcagtccgtggttctcgctggcgcgtaccgttttcgtggtcacattttttcatggagaaaagggatccgttttgtcctccgtaatttgaatcagtctctaacatcctatacttttggaagaggtgtcgccccggccggttcccactcaacgagagcactgcccaactggaaagtcccgtttcctgggcaagctcgcgggtgtttctgtccagtaccgttttcggtgtacatacacccatctctacacagcaaaaccccggccagtgaaatagcgtccggcaatatccgtgattctcgcgtttctttttactgtttagcctccgagcattgttcgcctcacttctgctgtttctgttcctttttcggaaagcttcggttttttcccgtgtgtctcaagcggcttgtccccgccgtccgttcagacttaccagttgccgtgtttgtccgtccaagcgtcgtccctcggaa

SEQ ID NO: 2500 - DNA, 4578 bp, Toxoplasma gondii
  source 1..4578: mol_type = genomic DNA
gctgttagggcgtgtactttctggtaagtgccagtgttgatcaccccgaaacctagtgtcgttgtgaacatgtcatagtgggatcatgattcacatatatgtcatgctgttttgcattgcgtgtcttctgcgctgtgtgtagggcgagcaagcacaggtggcgctgaatatccaggcagacctgaccagttgcttcaattggaacacgcagcagcttttcgtttacgtcattgtcaggtacgagacgccgaagaacccgcgcaacgaagtgattgtctgggatcgcatcatcaccgaccccgatgatgccataatagatttcgagggcgttataaacaagtaccctctgagagacaacggccgcagtctccgaaaccgcacggtcactgtcgctctcgagtacgcgtatcacccggttgtcggggtcatcaaaagtggccacgtcgcctcttccacgtacactctgccgtcctcgtattttcggtatgccaaaggcaactaaagcacaggaaacagaacaggccggctactgagttcggtaaagagactagtaggtctccaaacagacggtcgcgaaaagacaccgcacggcggaacaggctttcccgctcgctgtaaaaaaaattcggataaacgcatggaacaacaaagcactttgagggagcaaccatggaagggcataaacaaggaaaacagagggcggagcctctcatgtaacgggaaccactggcctgaccgtgaaggcaagcgtctgtcaccgcactgtacggcgcaacaaaaaaaagttcattttggggtttcagtggtatgccaacgttcttcaagcattgtggaggtaaacacaccagtttcggacaaatgtcgaatttctgctgttctgcccgagcttatcttctggatgcagaggttattctgcatccgtccctgcgccgtctacgtgcctcggtaaacgattgagtgtaaggcaactctgtgatttttcgaagacgaaatccggacactgttcaagcgaaacggtaatcacaaagaaaccctcctcttcagtatgcccgccacccaaattctcacatcagtccgctgcggcctaggagcggaagtcccatcacaccctgccttagtgctgcgagcaaactcgcccccgatccactgcgaagcacagaacagaaatggataacaactctgtaattgtatttaccgagtccggaagtggtattgagcgtaacaacatgcacatacgcgtggaccaatcatggtggtgatagaaatgcggtggtcgttgcgatagtctgaggagagtggatcagagggtcacataagtcgagccggtcgtacccgaacgtgggaagcgcttctcgttggtgacgattagcgaaatctagatgtcccttccatgatgagtgctctgcgtttcttaagcatcgttcaatggtagtaaaaactttctattgctggtcgccgaatactctcttctcacttaccacacctgcctgctgcatcgggaccttctgctacctaccaacctccgtgtaaacctcgggtagcgttctcgctcacacttccactgaaagcactttttgcacgttcattggtttcccgacaaagatacgaatgtagctggtgaagatacaacgacagccgtcctaaatcaaactgacgccatagataacttgcgacttcttgcatgcaggctcgctgttgctgccgtcaaacgatcaactgtgacaggtgctgtggtcagtggtgtagagggctgattcacagtaattttcttttttacattctgcgcgacgtcttgtagcgtaacgacttaagtagagtcgcatctgtagtctgcaaactgcgatatgggacagaacatgaatcgaggaagaatctacatgatttcacgtgctgacgcgacgtgcgaacaccgtgagaatgggtgttttgtttcacgtgttgcgtaagcgaagtcaagcgggggagcattatcatctcggttacttatggtagtgccataatcgcgttctaaaagccccaaagtttccgcctgaccactgtcaaaaagctactgaattgttgctatgcttgtgctgccgccgcagtccagcttcataattcagagaatcatcgggaaagacacggtacttcttcgcaagttcggggcggtccgcacttgctgatagggtcggtcaaatttgatacggcaccagaggctttttcctgagaaggcctcctcggacacactcacgtgaagccactgaagattagagatatgcagttgcgcccggggcaccgggaggctcgggggtattgcatacaagaagaagcaagcgaatttgctcgaatttcgagagggaggacggcatgacacagtcaatgaggcactttttgaagatggagagatacggccagaagagaaggctgaagccataggggctgatgcagtttatctgtggaagtggcgcggaagtcacactttcgatcatatccgcgtggcgcttcagagcagttgacacatactctgcttcagcaggtgacatggaaagagtgttggtaagcaatggcaggcagacatgttgtagatcacggaatatcaagcgaatcgctttctgagaaagttctatgtcacacgaagagaccgatgggccgggaagccccgggaacggcgctgcctccagtcctgtcgcggaaacgcagggcgccgccagagctgcagcgagagctgacaatactggagtgataaacgccaaaagatttctcaggtgtaactctgaacccagtgccgcagaggcggatggcgtctgtggaagggacgacccaacagcggctgttttttcctgatcaaaaagatctatttggtgctcaaccagagctgaggcgtctccatttctgcctcccgtcgagcgggtgtcttcgtcgtacgagactgcctcggtagccagagtatggtctgcagacgtttctggcagctctgaatcaagaggccagggtggcaagaattctagcggaacaagaaggctttgcacagcctgaaacaaagagacgttgtggcacccaaagacaaatgcacgtgtgtgagatgagatactccggacgtactgaaaaacgcagagcagtgccagatgatctttcaacgttaaagagcaggaaaggcatgttatacagtacccagctcgagtcttgagattatccgagacaatcgggaagcctcttgacttatcatttccaaaacatcactcccgcctctttccacatccagaacaggaatgtcaggtgttcgtgcggcggcatgtggtaccgttgcacacgcgattgacagcacacacagcactgtatgctgataattcaatctgatttcctatagtagctggaactgcctcttgtcgcaaaattcgaattctctcacctgatgagaagtatccccatcgctcccctccacatcacgaggccgtaatgcccacggagcagtcggtgcagtctcagattcagtgcagtagccgcatccccatgcagccgcctctccgttctcttcccatgttgctgtggcttcagagcgggtgttatcagagggcaacgccgcaacggcgggagagctgccttctccgaacactaagtctggacaggcctcagtgaggattcgctgcgactctgttgtcagggcgcttgtcgctagggtatctacaaactgagggaagaaccgcgttaattgctgttgattgtcgttagatacaggcccctcggaggactccgcagtcaacatgctggggcatcctagcctggcaacgacgttagcagaagtgaagcatgtcgtcctgtggccggagacctgtcgcgaatctacctcgttggtttctgagttaaaccagacggtagcgcgctcgtcggtttctgaacgcggttcaccttgcgcctgcgttgaaaccattgctgaaggacacgtgctgggttctgacaaggtagcgaaactttcgcactgtgcgtgaaaagagtcggctggacgccgtcgttttcgtgaaagggtgcgacgttgaggtgaagcaagcgatgacaaaggcgccaggtcctctgctgttctgcacattgccggtcgcttgatggacccttccagcagtagtggcagcgaaagcgattgaaatgttggtggacaatgttcggtggcaggctgagacgtttccggaggcgtaggatcatgcaaatactcgggggtgaccccagcgtccatgatgaacacagtgatttgatacgagcctaaaaatgatgcgatcgaataatatgagggtaggagaccggccatacgggcaaagcctgttcttgtgagtcagaagcatgatgcaagagtggcatagcacgctatgtgaaaaaatggatccagacgtgttgacctaagaaaacgcgccaacaaaaggggaacgcctacactctcgagcaagcgaagatggttccagttcgttgtggtgttccctggtacttctgctgagattctacactctgggcacggcaagttactccaggacactcctgggccgatgacgcttgatagccatgtgaaaccacagttctttctggccttttgagaatatgtaggtaaaatttcca

SEQ ID NO: 2501 - DNA, 2324 bp, Toxoplasma gondii
  source 1..2324: mol_type = genomic DNA
tgtacagatgcacaaacccggcggtctttcccatgtagtagagacgcgcgcatgcgtcctcgaccatgcgccccgtcagcatgtcctccagcagcatttgacccacatagggcgagaccagctctcggtgttgttgctgcggcgagagacagctgcggtcgggagagctgaaatctcctgtctggtttcccgacctcgcagccgctgcagacagcgtacgtcgctctgagccgagcatcgaagggcactcgtgagagcgtgaggctgaagaagccgttccgccgcgagacagcggcgaaatggcgggagggtggactccagaaaggtgggcgctggaaggccgagcgacagcagctagttcggaactgggaacagagtgtcgtgctgtctctcgagttcgaggggaggtcttggccccgtccggttcaggaaacgacgtggacaaggagaaagacggcgcaggggaggtggaacctgcgagagttgcgggtgccacgaaggcggcggaaatgccgttcgagggagaagagagcgtttgtagaggaactgggatccgaggagacagacggaccctcgcaacatgcggcccaacaggcgtttgaggcagagagtttgtaggtgcagacgaaaaaaccgttgggagcgaggagggcgctgaggaaggattcagagcagaagcgagagtgatgcccacgaaacgcgagtctcgaaggacaggcgacgctacgacggccagaagaagaacgatgagtttaaaacgacatgcggaaggtaagagtcgacaggatgcaacacggcagagagaagaaagctcactcgtggtggagacacctgtctccctcgagaggaacggggagacacgagaggcccccattctgcccggtaatacaccgtaggcaggcctggtgcggaaaaagtgaagagtccgaaagcgtaaatgggacagaataagagaaaaataaagtatgcaggtggttgtcgtctcttcgatgtcctcgctttttccggccgagaaagaggcgtggaacacacacgcgtcaggaataccaacagtaaatggttaatcgagcaaatgcggccttcggtgcactcagacaaacacgaaatttcgggatttccgtctccattcgagagcgaaatgtctcctccaatctgtatgagtaataaacaacaaccgacagtggagaaaaagtccaagcgccgggacagagtgaggtttccttttgaactaaatggtttaacgaatttgagggcgggacggtgaacgtcgaaacgactgatgtgcacgcgaaacacactttctccgtgtcaaagtgacacactcacatatacttcaaaggacattgtctcgcttcgctgtaacgggagacaggtctaggaagacacatgacggagacgacgtgggggcaacagcgaaagcgaaaagtcgactagaaattggagagatgaggcggtgaaaaagtcaccggggaaaagggtgaagaactgctggcagactagagaatgaaaacccgagagaaggcacaaacatcctccagaaaagatagtgaaaccagtgttcaacgcgaagaagtgctgtgtgtgcgcctgcacactgagggttgcttggccgtgaagacactgccagagacaggtcgccggagagatgcgagctgagcgattctcgtgccgttccccagagaaataaattatcgaaatcacttgaaaggaaagaacaaaaggagacattcacagatgaactcctcaaaacgcgtgcctgtggaacgagttcgccgtctcgcctttcccaaaggcgagacacgacacgggtgcacccgaccttgtgtcagcagctgagaggctcgggtacacaccccggcactttggtttccgtcttcaacgatttaaataaaaacctattcggccactggtgttaaaagtaagttatggatttctgtggcatctgcctgtaaattctacggtcgcaaaacttctccgtatttcgctgcaggggcttttctagtctcccgagagtcttggagggagcgctgtcgatgccgtttcggaatataggccgaatcgacgccccttgtgaaaatgtagagctatgaggttgtttctgtagagtcgcggcgctcgtgttgtcttttcgcacaacgctcatcgggattctctgaaaacaggagcagtagcggctttacttcgaaggaccaagtcgttccgtctcacactcccatggttttacgtaagagaacgggaaaaaaaactagagagcatttgttcgggcagccgaatccttttccaaagctcagaggcgcaggatggcattgttggattatctgtga

SEQ ID NO: 2502 - DNA, 4969 bp, Toxoplasma gondii
  source 1..4969: mol_type = genomic DNA
agaaactcatccgcagcgttgctcagactcaaagaaaggttgccaccaggtgagagagaggctccgcgatgcgagtgcaacggaaagacaaggcccgagacaaaaaaacactccaacgaaacgatcgggacaaagagcttgcctccaatccgcctcacacggggtggccgtacctttacgcagtccgaacggcttctcaagagatcagcgccctgccacgtctcgcgattcggactctcgggaaacaagggcccatgctgcttgtctccatctggcgtttatatctgaactagagggcacacaggaaagcgcgggccgcaggccgtcggaactctccgtgtctagttcaccgaaaatcagttttccgtttcaggcgtagagaggccggtgtgcagctcgagaagacctctgtgagggggcaagtgtctctcagctcagcggctcatgcatctgtaaatgcgtctttcgagggcaggtcttcgagttacaaactcgcttgtttttctgtgtctcctttgtaggtcaccagactattttcctgtcatcgtggctgcctccggatcttcggagcgtcttcgctcgtcttgcgcgggtcaggtccttgactatcaacgccttggggactcccttcgtatcacccgtttctctcctacattccgatcaagcttctgctgaagccgttggtgctgcgcccagccctccgctggtgtctcccgtgtctcattcggcttctttgtttgcttcgggttccactcgcctctctcgcctgtgctgttctccttgttccgttcctctgtctcctcccggcaccgcttctctgtcttgtcccctttcttctgcgtttttgtcgccgtctccctgtgtcccgcggaaggacggggacgcggaggaagagctgtgtctttcgcagcaaacgcccgagaccggcgagaacgaggaagcacacaccgccgcgcttctccgccagccttcactctgtggttcgccacacaaggagacggggccgccattttcgcggggtccttctcttcgcgaaagcattctcgatgtggaagagacggcaggattgtggggtcccaaacgagcgtccgagttcctggcgaaaaagcagagacagtggagtgagcttcagcgtcgccggtcacgctcccaccacagcgcacaagagcggcgaggaagcgactggagcagggaggaagaggcaataatacggggggaagtcgttcgctcggagtttgccatttatccggcagacttgcacgctcatgtgctgtttaacgtgttgatgagtgaggcgaatcgagttgcgcaattggagacagcaagagagggaccacacagaagagccgaaggacagatggcaggggacgatcaagcgtgtgacgtgtctccggaaagcagagacagaacttaccgagtcattgtttttttctcgactctcaagagtctacagttccattatgtcttcttcaaacactatgtttttccggcgctcctcacgctgaagacaacggaccccgcgacgttttccgctctgtccacgtacccattcgtctcctcttcgtccggttcttatttatccgccacacattcgttccctttatcagtttctttctcttcttcgtctccctctgcttcgtcgacgtttcctccgccgccgctggtccccgcgcgccttccgaaactctcggccctgcatcacgggctcagtatcgagagacgtcgtgcagtgatcgaggctttctcctcttcatctctggttcctacctggtcaccttctggggtcgattctgctgctctcgcgccttcgcagttcgcgtccgggttgccgacctctctcgtgggccaggcaagccacaggcggctctcaaaaagcgggagagagcgacaacaaggatctcttcacggccaagagccgctgccccaggtgtccagcaatccgggctacgagcttcgcatcctttttgccacagatgtcgcggctacaggcgtcaatgtgggagttgttgactccgttattcacgtaaggaaggtagagggaggctgacagggacatggcgtttgaggggagagtgacaagcagcagcttttcagtttgccgtcggtcgtagggatagggagcgcaacttttgtgccgtttgggtgggcgggaagcgaaaagctttgtttgcttcttcttcgccctcttctttattgtttgcacacctttcgtgcagggttttgggagacgcaaagaaaggaaccatctgtgcaaactcagtttgatcccatttcttcgccatctgtcctgttgagtccgccacttcctcggcatggcgtgagcggcctcaagcctgtgtgggctcttctgtgggtctcccctggtgctttattgcgttacttatcgtgtttgccgcagcacacttttgcttgtgctagctgatcagtctgcttcctttctctcttcgacccttcttcgcgccgtgcttagatgttctctgcttccttcccatcatcccctccacttctgggcgtggtcgtctgtatcgctttctctcgcacgctacctgtctgttctcctgcccgccccattcaccccctgcccgtgctgtctcttccagcgactgcctcggttgcctcttctgtctctccatgctgtggccgcaggccgggatgccccgtgacccagagcttctcgttcagcgtctgacgcgtgtcgcgcggtaagcacaaccttggcggagactgcgagatggcagggaaaggaggcgggcgagatggagacacaatgacggggagatgaaggtcgagaagggaaagctggttgaaaaaagcagcagggtcaacgtgaatacgaatgcgaacggggagcatcatcggagtaggaacacctgatatcctgccgcagggcgccgtacggcgtcttcgcttaattcacacgtttccagatctcataacttcatgttctcccccctccccgatgcgctccgatttctaccgggttctgctggctccgacgaccgcaatctctgcacatggcttcccgcttgtcgcctttcggtttatcgtgtcgtttgtctgcctcaactgctggcgtcgcctcccactagtcctctcttgtctgttctcgctcgtatctgttgcctgtagggcacggggtccaactactgcgcctctctcgggttcagcagcccgtccacacgcgtctttcacttcatttgcctcacctccgtcttcctcgggccgcgtctcgtcgccaccatcatgggttctctctgatgcatgttccgcctcgcctctatttgaactgtccagtgaaacatccgttggaaggcagggacgaagcgaggaacaagaaaacgtcgaaatcgaagagaacgacaaccatttttggcggctccacgccaaacgccaaatcgggagatctctgcttctccttcatgacttagaaagccactttctttttgaatgcttctccgaaggaatcaatctcactgaactccatcctcggtatgcgttatctctgctgagcccgaatcgtgcgcttactgcggttttaagtgagaggttcgaacgaaagatgttccaggaaaagcggaaatgggaggacgagggacaaactgaaagggagactggaagcaatcggggcaggcgagatggcggcaacaaaagaagcagaacccatcgctcccactctcttttcatccgccaacgccgccgtcaaggggcaacgtgtaacagcaagacacaaagagacgtcgagagcctcaaaacaggagacgactgaagaagacgcaaagataaaaccccggaaggattttcttactccctcgcaggcagctgcatgtcggtggttttcgggagtatggtggcacgaggtaccctccctgcgcgcctctgccgaccttttttaccgctcgttgctcggcttctacgccatgcagtcgaagcgcctcaaaatcaacaagtaacggaagcagaataaagagttttacattcacgtggggatccagtctctcacggagaaacgtgtctttccactcgcgaagtcccccgtttatgcgaatgcatgtttgtccgtctgcgacgaagtccctgcatgggagcaccttagcccatcgtctgaattaccagtgaaggctctaggcatacgtgactgcagttttacgggttcttcgattatcacgattattcatgtacttgcacaagcggggaacatctaccagcggtgcgcgttctttttagtactattcgacaaaatccacaagaagctgtcgcttttgtggtgagcacgccgtttctgccgacaaggacacgctcagaaaccgacaaagtgtgtgagaggggtgcaaagttgaaggaccggtatcttgtacgtccacgtattttcccagtgtagtttttacccattacacgcgcatatgctggaggcacgactaggtgagcacctattgcagcacacgtcgagcggctgatcgcgcggggcagtctggcagcagatgactgcagcaactgaccatttttgttgagcggcagatgggttgataccgacgatacctgttccctcaggaggcagagacaccgacgacatcgatgggatcagctgactaattatcgataacggctacaccaacatcctgaacacccggagataacacagctggtattgccgaacagcggtgagtaatgggccacaactagccgacgcggcggcaccggttgcccttccgggacccacggtacgagctggttgtcgtcacctgagaaccattacaacatcagtcgaatataagcgtacagattcgtcactttcacttcatttgacttccctgttttcctccctcatcgcaggtctcgtagaattgcctatagtccaactccgtctcacctcccatccctgctctctcccctgatcggcagtggtactgtgtagcgagattgccaatcaattcccgattttccgaagattgttcgctagctgttagcaata

SEQ ID NO: 2503 - DNA, 1799 bp, Toxoplasma gondii
  source 1..1799: mol_type = genomic DNA
cacaaaactaaccaatttgtggtacattcacctgcgatattcagactgaatgcagacacagaaacgaagctcccgacttcgtctctgcggctcgccaccatttcattttctacagtttctcagatgccttctcaccttgtcccacgatgtggcggccaggatgctcttcccgtggctgggagcgtagcagagagatgagatgctgtctcgcggctcgtgccgcagatcgatagacatcttggagataaatggaggaaaatgaactcacgaagaatacagagtgccacggctcgtgtcgatggaggccggtgtcagcgcactcgcgtcaggagaaactttcagaagacaggaaatccagtcgagagacacacgcgcaggagttcgacgaacagtctggactttgcagcggcgtgactgcaccgaaacgcaggacttgcttttcgttcaccgcttggacaatcctggatgacacggaactcgaaacgaagtgtacgtacacccggcttgtgaggaccaaaaggcacggacgcaaggcaagaggagaaccgttaccagttgcagaagcaggaaaaagacgacagcgtctgtggagacttacgctgtgaaaactgagacaaacgtggagacgatacggcgagaaacaagaggtcgagtaaggaaacgtcgggcaggaagttcgtcagaggcggttgcagagaaagagacgggagcagcaatacaggagaaacatggagtagaaaggaggcgatgaggctgaagtgcaagagggcaaaacgacggcaagacaatactacgacagagactgagcaatgacggactcgcaagcgacaatatggccgtttcagtgggcggaaatgaggagccgctcaggagaggcagggcagcgaaggctggcaaggcagatggtggaacagccacttttctctggagcagagagagcacctgcttccattctttttgctgctgcgttagcgatcggttccgcaaagccggaggtttggagccaaacgatccgcgaagacggcagagtgcaaattcgtagaaagccaagtgtggtaccgagtgcaagctggttccttgtgttttagaagcggagtccatgcatgtgcacgaacagcacccaagtgcagacatgcaatcagcgtcttttcgcggcgttcctttggagagggcattctcacctcgaggcgatagcagccagacctgtttcgagaatcggaagctacagacgcggaagtataacaagaatcaacgatgtgcccccaaaccctcgcacacaaacacacatccgtcgcgcccgggttccgcatcgcatttcggtttctgaacccttttcgcgcgcgctgcccgtccgatttgggtttcttagcaattccagcctctagcgctccgtctcagcctagagacggcgtttgtctggcagctctctatacgtcgtttgcacgctcgggaggcggcggctctggccggcgccctcttgtggggagtcgcgcgacagctggggtcggatcgcatgcgccagcctctcgggatgacgcaggcgtcatccacagcgtttctctccaggcggggaagaggcgacgaaactgagggctgagggtggaaggcggcgcgaagaggctgtgcgcgggacccttttcatgcgcgctgttgtctccctgccgccgccctcgtctcgttgccgcagtacctcctcgcttccttttcagttcggactcgtcgctctgttccttctctttctgcttcgtggccgcggtgtcgcctggtgttttctgcccttccttttcttcgcgacaaca

SEQ ID NO: 2504 - DNA, 3686 bp, Toxoplasma gondii
  source 1..3686: mol_type = genomic DNA
gtgtgtcagactaatccatagacgggaggactgctgggtgctcaaatcagaggacagcagacagtcaaactaggaggcgaggggaaatgcccgggaatccgcgaagttaagcagatttgaggatgcagtagcggcgaaagaggaggcgaacacagcaaggacttcgagagggcggaggtacgcgaaaatgctggcggagaaggagtcgtgctctaggcgacgaagaccgagagggtgctggggaaaaatgtgctgcgaacttcggataggaacagcgcaaaagaataagaaaatggcaactgagagtgatgtttcagggaacagatgtggtttggaagagcggaacacttatttgtagggaattcgtaaccgtggtcttcgtaaacggaaagtcttcgagtgtcttgggtttctgtctcacgagctgtgctttgccgagccgcgtacttcgtctcgacgtcggcactgaagtgtttcttcgttcggagtcccgaagagggagttgaagaggggcaaccgttgcagatttttctttcccagcgactgccgtcatctcttgatttttaaatttgtgcaagaatctgtctgcattgtgggttttctccggtgacattgcacacactccactttgatagcaggacatcgctctagcacccgtctagttttccttgcggatatctattcttagtatttgagtcccgcacgtttaccatgtcagctgtaccgatcttgtctcgcactcttcctgccatccctcgtatccgctgaagtagaggtcagcccgttcccgctacgtacggcgtagcaacacagcctgaaaagctcagtgtttgcgtagtgggtttcaacaggccaagaagcaccccaaggaccacatgcatgaaattggtgtctcatgttagacgtcttctatatatcgtagctcgggcgaacgtccgtcatgcactttggacgtcggttgaagcacgtgtgaaggtcttgatttttacgcacgtggccagacctcagctaggacagagtaaacgccacagaaaactgtgtcgtgtatcgaacacatcctcgtttgctatgacagctatgcggaaagcgctgaccacttcagccggcccttctcacgcaaggcatcgatcgtgccctcgcgtgctcgtgaactgccaaacagttttccgcacgtccgacccagccgtggctttcgggtggggatatgcctgcatctctttgcttgcctctttcttcgtcagagtctaacattccgcgagcatagccgtcagaggccgccgagggttctgccaaaatttgtcaacacatgagaacgttatgctcggcgtgtacgaccgcaacgtcttgtgcgcatcacgccgtgaccccaggcgcttgttccacatcctggagctaatatttcagaaaggacaaggaggaacttcgccagcgtcgtaagcagatgcctacaaggctcgtagcaggttgacgtgctgcgtttgattctgccgatagcgtcattcggggctacgaacacggtaggatcatgtctcactatttgcgcagtgtttccgtttcgtttaaagcctgaaacgctgcccaaaaaattgcacaaacgacgcattccagcatatgcatgtccctgcaggtttggctgtccagtaaaggtctccaggcttccgtaaatctttactcccttctttcgacgaacgaggcacttttcggcgccttgttacaacctcttgtgtgcgagtgcgccaaatttcccgtgcttgactctgccgcggttgtacgtacaccacacactttgcctctctgtttctgtggactgtgactgcagcggccaggtgtgcgtcgggaccgccgcagtggttccgctctcctggacaagcttccccggaagcggccaatgcggagcatctcagtggaaaaaccgcaaaacggagtgaaccgggttgagtgggaaagactggacccgtgcgatgcctagctacgctccagaaccgataggaccggtacaaacgggtgcggtcgttttcgtctcgcttccccacacgcgacgacgcgttggaagactttttgtgctcttctcccacggttccttggcagtcagcactcaaactcgaaagcaagctgcttccggcgtcccagggccatgccgcttccttcagtacggtgaaagatacggccgccggggaagcgttgccttctgtgcaacacgcctgtgtgcggaactgctctcctgttcctgtcgcttctctcgtggacgccaagcgccggtgaccggcgcgatggtggtgaacgtcatcgcgcgcggtcagtcgccttttccgtcaccacacccgtcgaacggacgggatgaaggaagccgacaggagtggctaagtcgggccgaagggaaaaagcattcgattttttgttgcgaacgacgagctttgctatcttcctggatttccatggatgtatatagtaacgaacgattacttgtgagttgttttatcctttgtcgaatgattccaccggcagttatctttcggagacagagaaaaatgacgagagacagtggtgtccttccgcttccgcctcccggcactcagtggcatggttcctttattcgcccttggtggtataccttcgtcgtttggccttaattaatggcttttctgcccccttcccctagtcagcagaaacgcgaatggtttgagttgggagcacttgtcccggcagatagtggctcgaccgtcttttgtcttttctcaggagaattttgtacccgtttcatgcctgaaagatccagagcagcgtctttttcggcgtctcatctggttctcccacattggcggtgtcgtcctccgagaaggcaactgtggtggatgcttcgtttcgttcctggagttctgtaccggcctgtttctcgcctgctcactcacgacttctggacctccaccggtctttgccgtacctggttctctagcgtgtttcgagtgggccgcttccaaaaattcccgtgcattctcctgtcccgttttttatagcgaccctgtgttttagcgactgcgcgaacctacatcagcatcgtaggggagaaaagggaaacggtcggcaactgtgcaaggacgtcataacaagtacggaaacacttattcccttgttgcatattccctgtcgcggacggtgagcttgttctgtgtccagacgacccacaagacggtttttttatggaaaggacagtcgcagtttacgagcagtgtccgccttccttttccgtccaccgcgaggtgtttctgcccacgaaagggtggctccgcggcttggatgtgtccagttctatccgagatatcggaagtgtttcttgtacagtgatgcccctggagtgtttgactgacctgtagtgattccatgcattcgaactgactgtacctccatacttctttgttcgtgtgcgcgtgcctgtgtgtgtgtgtgtttctgagacgccatccgcgttttctctcaatctgcatcttcgctgcgggccttccgactgcacggtttttttgtcggcttgtctttctggtctttgcgtgggactgctgttgaccgagcgtttgcgtccgaagagggatatcaaatcagttgtccgggacgacggttccagaggtctgcaagggaggccgtcgtttctccagagttggaactccgtgtgcagaaacagcagatcggagcaa

SEQ ID NO: 2505 - DNA, 1484 bp, Toxoplasma gondii
  source 1..1484: mol_type = genomic DNA
gtcatgttccggttcaggtgcttgctcctgcctggagatgtgtctatccgtttctgcacgtcctacctgatctcgagattatatgtcagccactacacctgaactgttatacacgtctacgaatattctgcatgcacagaatggaagcgcgatttggtaggtcatcccccggtttgacttgttctcgaatatctagatgagtgtcactcgatcacatgcgccgcagttttgtttcgcactgtgttctcgtatactaaaagtgtcgcaaatatgtcaggtgttgctttcggtgcctattaagtagtttactgccacagttgagtgagaatcaaactaggcgattaatgacagctgctccaagagtaacagagcaatcttggatcaccggtgaccagaagctgtcgtgacagagcgctcttgtctaccccggagtaccaggcggtcctggtggtgtagacttccgctaaaggcgctaatgtgcagaagggtccgacaggttggatagcacacaccattcccaaatgaaatctcatcggtcgcgtgtcaggtgacgtctacacagatgtcgcttgacacaaattgtgtgtatactgagattacacaaacaccaccaaagcaaggtatccagtggacaactcagagtgtacagcgttctatgcagctggtacatgatctaaatatttaattatacgaacggtgacaatacgctgcacccctttggtcattttgcggcttgcagcgcagagcactgcgaatgagacagtagaagtgcgacagtgaaacgcctttggctcggggggatcccgtagccgaaagatatacaattaatatgctgactgggattcacgattgtgcgaatcttactctagtgcccaactctgtgtgttggcaaatgagggaagaaaagtcgccctccagcataaccattcgaccaatcggcggtgcatgcacggactggacccagcgagttgtacagagctggtcgctggaaagatgctaagaaggcagaaaagagctgagattttctggctaacaccgccactcgagagtcgtcacaggatgccagttccgagcatttccaagcctgggcaggcacgaattgtctgttttgcgtcatcttccaccatctgtcctgcagacgggtcgcggtaacgtccagtttgtctttgagaccatctcacgattccattgacgagtacgaggccgttacaacctttcgaagcgcagcctggcgtcctcagaactcaggggttcggagctctctcccgtttcgcgcgtccccttaattttccacttccctcggtgtgtgcagaggacgcaacccgctctttgtcgcgtctctgttccttcctgtggttgttcgggacggggaaagtctcgtaaaatatttcttcttcataaccaagtgcttcgattccgccagaacctctggcagagttgcactgtccactaatctactcttgcccgttcaaaactcttcacca

SEQ ID NO: 2506 - DNA, 1607 bp, Toxoplasma gondii
  source 1..1607: mol_type = genomic DNA
acttcagcaagaaacaaagtcgcgcagcaaggaagacggccgcgaaaggaggctcatgcagacagcaaggaaaagctgtgagcaggtcgagagaaccgagccatcaagacaccatctgcgaagaggacatcacgagaaacaggaaggaggaggtgaaaagagcgataccaagaatgaaacggagaaaaaaatgaaagaagaaatgaagagaggtgaagagagaggttgaggagatagagatatggcgagggcttgggagagggacagctccgcaggtagaccgacgtggagcgttctgaccggcgttggagatgcaggaaagcgcggcatgcgagtccagtaaaagaaaaaggagatgttgggtattaggtccagccgaggggaaacgtctctcctccggattcgcaagagaattgcatggcaggaaaaacgtattcaagactttcctttctctttcgtcttgctggcgacggttgaaagcgtaccggagagctgaaggaaggtcgaccggcatccaccgaggaaacgacatagatcgagaaatgtacgggagaagaaacgaggaagaaggacgcgaggcgcaggcttgcaagcgacgttgaagccagagcctctcatggcagggggcagaagagagaaatggagagcgcctctctctcctcttcgtcagaaaagcgggtgaagtcaaaaacagaaacgagaagaaaaagaagacacagaactgtctatctcccgccaagcgatggcgagtcttctctttccggcacatgcgttgagctgttgtgcatgcagccgcgaggccaggccagggcgcggtctcggcttgacgcagaggcgcggaactggagatgaagcgaagcaagacgaggtttcctcgtccctgtttccttctgaaaaggcgtggagagaccttggaaagtgcatctgagagcagcgaggttcgctgggagaaacgacttcgtctgtctgtctctctctctcgcttttctcgcttttttcatgcatcttctcgagtgggtgtgcgctgcacacttggaaactgtttttcaagaaagcagagaattcaactactagcaagcgactgtgagaggcgacagagacgtggatagcaagatacttcgctctctctttgactcttcaagccgcgctttctccggatttcctccagacttgtctccttgcagcctctccgaacttccaccgcgttcaccctccgcctcttctctccttttcgcagaccgagcagagcagcatttggcaccgaccgaatccggctaacctcacaagttgcgaatccagacctccgctgcctccacaagtgtctcgttttgtctcgaaaggcagttcttctgctgtgtctcctccttccatcttaccttttactctgcttcttctcttcctctgcttcttctcttcctttgcatgcatcttctttcctggctgtgtctttgccctctgctgcgactctggagttcctctgtctagccaccgactgcgacgatgcttcgcaggttcgctgcttcagagacgacttcgctcctgcgttgaggaagagcattcgccgtccccgaaagagaaatcgagcgacgacgaagcgcatgcaacga

SEQ ID NO: 2507 - DNA, 1431 bp, Toxoplasma gondii
  source 1..1431: mol_type = genomic DNA
cgcctcttcagactcgcaagcatcttcaaaagaaacgagaatcacaacctgcaaaagcacagaagaaacacaaaaaaattcgattcgcgtatgcttgtacgtctgcgtctgcgtgtgacgttgtgcataaacaagtacctatttatcgatataagtatatatatatatatatattggtaataatgaatgtatatatatatatatatatgtttgtgagcctgttatcctgaaagttttcgcagttcctttgaagcaaattggttacgtgtttgtgctgggtttctttttttgcttttttttgacgacgcctttctttctccgtgcttctcttttcgttgtttatttctcgttttcttttttcgcaagttcacttccgctcagcaatttcccctttgtgttgattttctctcgtctggtacgcgtccttctctgccgctctctctctctctctctgtctctctttgtctctctttgtctctctttgtgacggcttcagtcgctccttttctttttctttcacgcgtttttctccgttctccgcttctcgcgtctcttccatccttctacacgcaagcgctgtctcgtcgtcggcatttgtcgctttcgacactcgttcttttcaggtttctttactttctggttgaagggatgagcctggacggagcgcgtgaaggagacgagtccggcgtcgaggcttccgaaggagacggaacagcgagacgacggaaggcagaagacggaagaagaagttcttttcttcgccgcagaggcaccatctgagacgagaaacattttcgcagttttcttgagagactcgccttcttttcttgagagccaacacgagagcctttcctgagttctcgcatgcagacgccgccactgaggaccgatacaaaaggaaaacgacacagaaaaaggaacgaaagtaaccggatcgcgactcctggtcgttttgcatctaatatcaagagaaacatatagacagaaaaaaaagttgtaaatcttcacgaaaacgcaaataacgggtgttgaggacatgcatgcgctgaaaaaaatgcagtcacgcccgataccgctggccctgcgcatgcacgacgagactcacgaggtgcgaaggcggacttttctcgtcaaatggaaattgttttttttcagagcttctttgtcttttttgtctgtgtgcgtctctctgcttcctcctcttctctgccggcgcctccccacccgaagctcccgacgccggccgcatgcgttagctgcggagagaagaaaagagggagcgcagcagagaagaaggagagcagcagagaagaaggagaacagcagagaagaaggagaacagcagagaagaaggagaacagcagagaagaaggagaacagcagagaagaacagcaaggagaggggaagcacaagaagcgtagacggcagaa

SEQ ID NO: 2508 - DNA, 4884 bp, Toxoplasma gondii
  source 1..4884: mol_type = genomic DNA
gaagggcaaggaacacggaggcgaagaaaggaaggcgcttcagaaggtgcagaggagagagaagacggaagacgagggcactccggccggagcgaagagaagaaacgagagccccttcgtgagcgtcggtctctgagagtcgaacccagagaaggtagagacacagtcgctgcgacttcagaaaagaatcgatgtggtgccgccctcgacgagcaggcgacagctttgctggcagaagtccacggcgaaaagacggagtccgcagactcgacccgcgttgccagcggggcacaggaaaagccagacattgcaagacggcgaagcgatctcggctgaaacggtgaggaagcaagtcggacaggcagagagccatgctcagtggttgcctgtggtttttgtgcagtcgcggccagatggctctcctcgcctgcctcctgtacctcgcgtttctgaccgtttttcactggtgcatgttgcgggttcgttcgcgagaaaggagaaaacgcaaagaagggagagtcggcctgggacagctgcagaggccgcctcctgcgggggcagccgccggcccttggagccccggggagagagacgagtttcattgcggcagaacaggcacctcgaggaagccttgaggcctccctctgcaaattcatttctgattcctcgtcgccaaagctgaccaagtacacaagacacgaggagaccggagagcgacagagaggatcaactcaggtgctactcgaggaaaccaggcgaggagttctctggattgccgtgtgaggtgacggggagccgtgaagcaaccagcgactcttttcgagcattgaggggtggctctctgttcaggtttcctccgctgccgatggagcctgtgcccttttcttagcgagacacgacctgcaaatggtcttccaccaggtttttcagaattcaccatttgtgccagccgtcgacacattaaaggcccgtctggggcggacagtgcggtgcttcgtacacccgctcatctctgtctgcaaatgcgcatagactaatgacccagatgctgcgcgaaggctacagacatggtcattgagcgtcggaaacggaagacgacatcgacagttcaaacctgtctcgagtgtgcgtgtgcggggctcctttctttgttgcgcatgcgacagagaactaggatggacgcacgatggcgcggattttgacttgccaaaacggagacgacaaacggcggaagagggatcctgaggacgtgtatgaaaataaaattcccctctaagaaaggggaagtgtgcttgaggggaggaggcggtttcgagcagcatattctgtgcaagatgcgaggaaccagcgaagctaaaaaaaacgcatgcaccctcttgcccagaactctaccccagacccgttgctgctgctgctgccgcaaaaggccggtggaacccgccgccctggtcgacagccggagaccgacagccatgcgctggtcagcacctgcaagatcagctactctgacggatggaagtatgaatgtacgtagcttggcataccgctttgtgtaggcatcaacgggcgggggaggttgagatccgcacatgtatctgtgatgccaggccagacagggaggcgcaaaaaggctgggcgtgccacattaccgtgaagctgcagaactggcgaactggaggatggctgtttctctttgctttttgccatgtgaccagtcgcatttgctccgctgttctctgtcgtgtctcgcgacggcacccgtgtcgtccgattcgctattggaacagagttggtagttcgatacccacctccagcctatcacgtcacgagggaacatcggatttccgctcctctgttgccctccctaggactttccccctttcagtgctggggaaacacagatgaaattacgccagcctagtggcgtcctggagatttgggagcattcatccagctgtctagacactcaagagcccaccaccccggtttgcaagcgttgcagtctacgccagggacaatgttcaaacatcaccgacgatggaaatcttcttctgtggggtggctgcttctaaatagggacagcggtgaacgaagttgcttcttccagggaagaacggagcaaaatcagcaaaacgtggacgcaaagacctggcacagcgtcgccgcacacagccgcgtactgacgaatacagaacgatcgtgcttggaagccctccagtagggtgacggcaccgcatagacagcggttgccactcgatgcctttcttgaaaggaaaagtcatttcctttgtgctaatcctgtactaatactcggcgcgtgactggggagaaaacaacatagtgctttctctaggggtagaaaatcgtttgtttcgacgtgagcctggcacacactacaccaccgcattacgacagtgactgtttaacgcgtaaggagcgacttgtagtcatggggacagacacgcctctcaagtacggcgtcttcttcaaagcaaaaataccgatttcctccttcctgcgtcgcagacgcaagtctatcgtaatcactattggtgatcgattgagtccacgaggaatggtctgtcggttaccggagtgtcgtgtaacctctactgccacacgaagttttccctatagcaggcctcggacgaagagccctctgcccatgacggcagtacaagcagaggacaaaactcatcagggagtgctggatatgcttcaggctgctggtctatcttccacttcagcatggactgactgcatgacaccggcacgatgccgtgttgttgcgacggtgttactgttcgggatgtggactacacgcttgtacacgctagcgcactcggatatttatctacgcgaagaggtggcgcaggctagtcctttgactccatgaggtgcagttgtgaaggcgccccagcacggattccggctgttacttcttcctggagaagcgtcgggcgttaggttcgccggttccgcttacacgcggtgtacccttgtggtggagtagcgacttccggctccttgaaaggcaattgcacacagccagctcctcaccaaaaggcaggcagcgagaagtgaaccactgcgggaaacttgtagacgccgtataaggcgtgtctttctttgaaaattacgtggcgtccgagacagctctcggcggcggtacgccactccgatgccttgaacagagcggtcctccggacccttcattctctgttcgacacatctatagcgtagtcactgctcagctgcgcgtacagcgtcgattgtacggctgtagctgtcccgctgagtgccagacatatttttgtctactatcccttccctcggtgggcggcggttccgtaccgtcaaaagtttgacgctgtgcgctgggtttcagcgtgttgtggagaaagcgtgcgttggcgtcacaaaaagaagatgaattttccaggcgtcgcttccgccacgagcgagcgcctgtctccccacgagggaacactgctgtaggagggtctgtctacaaaccggcttggatggctggaaaccaattcggtacgcactttttctcgagggaggagctggaagaaatcagcccccctctaaaaagttgaacgcgcatcgaggatcgctcctcgtgcgtccgttttcgcgttaccttggtcagactgcctgggcaggaacccgagtccgatatggaacttcggggcccgttctctgcggctgcttttcacggagaaatccagggcttcttaggaaagccgccgacggtgtctggcgtgtttttcccgcgcgtcttcccactcatcttgcgcagctggctactgtatataggaggaaaacgcagctctccagaaagcagtgtgcagtgaacgggacgcggcagcgcgacctcgcgcgtggtagcttcccggcttgattcccgttgttcccttgtttttgtctcactggaatgagtgtcgttaacgaagaagcgtgtgcgttttttctcagcggacttgctcggcagagaggactgcgtggcgttcgctttcgttccggggttcctggcggcgttttgtttctgtgccttcgtgtgcacaggggtgggctgccgctctcgttgcagtggccatttcgctcgcccgccgcctgtcccgggtgtttctcgacgccaaaaagccgccggtttctgatgtcttttctcgagcttccgtcgtctcccgcttccgcgaccttccttctaggactttctcgcgcgtaacgcgtgtctctcagctcctccagcgcccgtcgttgccttttcgactcgcactcgcccgccacgggaaatgagattcccccgcatgcgctctgctgagcacctctgctcgccggccgtcacagcttcgtcttggatggtcttctccttgctcgcgctacctgctaactgcaggcccttttcaaatgtccaatccagtgtcacttcccttgttcaccgattgttttagaacgcttcctgtaggcgccttcgtcgcggcatgcatcatacccgcgcgtcgcgtgccagtccgcttccttccactgttcgtccccgactccgtgtagtttttcctcgtgattcctgccttagtgtctcagtcctttcgccgtcctcttgttcacccgttttcctttttccctttccgcccctccagccgtcactgttgctgcgaaaaggccgtcctcgcctacggggcacccttgggagtcggtcgaggaatcccacgggccgtctctctccacagttctctcttcgtcacactcccgctacaaagtccgtcagtttcttgccgtagtgttctcggctgcgtctgtcccacgactggcgttcctggtgaggaacccgacgcggaggtgtcgaatctgctcgtcgtagccgctcctgcagtcgaatca

SEQ ID NO: 2509 - DNA, 2377 bp, Toxoplasma gondii
  source 1..2377: mol_type = genomic DNA
aagggagacaagagcgagcacgaacgctgcgcaagagagtcgcagagaaggaaagcaccgaaggcgagcgcaagtccagcagccgttttcacacatccacgacagagagcgcggtgaaaaaagaaggatacacaaagagatgttttctcgccgctgtctctccctcgcctctctccttaccccgtgcgactgtctgcccggcaatgcgccgcgctctctgccgccgaacttcttggccgcgaggacgggggatggcacattcttcggaagttttcgttctttcttcagttcagctttcggcgaggaccatgcgactgtgggcgacgtcgggggagtgtcgctggccttccgcggcctcggtgcagcgacaggatcggcccgccacgaggccttctcctccagtgcatcctcggccaagatctccttcttcttccttgccttcttctcctcgatcgccttctcctccacctccttctctgtctcctccttcttctgcagcttctgcctctccttctcctcgactgacgcgagggggacggcgacggcctccttcatcgttgcacgagccgtagcaagaggctccgacggcggcgccggtcgagacgcaggcgggtcgaccttcgaatcgtaggccacaaaggcgctggagagtctctcgagcgtctctcgagaactctaccgggtcgcctcttcggaagaacagccacagaaggccgacgctgagaggatttggagaaagcgacgcagagagactccgacgccgaagcagagacaccagagaggcacaggaaggaagacgctcacttcagagaaggttcgcgaactggggacgcgcggaacacgcgaacgctgtcgctggagcacatacacagagactggaacagaggaaggagacgcgtcgacaccagatgtgtacgaacagctgcgaaacgcggacggacgaaaaagtcgagagagaagccgcgagatcaattcgtcgcagagaggcagacgaaaaatacgttttggggacaaaggggaatccgaagaggcagagctgtctcgccttcttctcgctgcctttcactcacgcgcgttcctctcgcgcctgtctgagaagctcgagtcgcttgtcgtcagaggatttctcctcagctgcggacgcatcccgtgacggagttcaaactcgggccgctgtgcagcgcctaggcgccttcgagagacagggtgccctttcaaggtctgcgcgttaacaggccgagtggatcgacgagtcgaagatcgaccgcgacaaagagaaatgcaaaatggcacagacgagggacgcgtcaaaggcagcagtctgcagagatgaaggagcgtcgcagaagatccctggagctgtggagagaactagggagaagaaacgggagggcgaaacgacctcgctgttaagcttcggagtgggcctcttttccgctcacactggaacggcgaacagcgatggtgcggacagagacgaggagctcagaggcgccggtcgcgtgcgtcttattgaaatccgggggactcgacagaaaaacgaacgcaaacagagagacaagttccgtttcgtcgcggagagcgctctacgtcgtcggcagagacaccctcgagtctctcactcgctctcagggggtccgcagacggcgtgggtacacatgcaacagcacccgagacaggcctctgggactgcgaaaagcgcgcgaatcgcgggaacgcctgcgaagaggcgtcgcgtgagagcgctgacaggacagtcataaacgttcgcgttttcgacacgcgttttgagcgtgttttctgaaacagaaactgctttttcggtccggaaacgccgctcatactatcctgcgcctcgacccagctgtatatacaccccagcggtcccgccggggactcgctgcgctgttcgtctgaccccacacgcggccgaaaaaggagggcgtggaggcggaatttttacagttttaaaaggatttttgaaggcgtccttcatgatcccgagcctgtttgaaataaaggatcgaggcgatccccgtctctgtcctgttctcctcaagtagctttcaacgcgtacgcagcgaggcggtcgattcgtcgatgacggcggtcaaccgcggaaaggcttcttctttttcatgtaggtagtattttgtgttttgagtcccttaccataaaaacgttcttttcttctctcctgcttgtctcggttgagagtcacagcctcgccgctacgcctgacgccctcccgcccacgtcgtcgcttcgactttgcatagtcctccgaccaccgtttccactcgtttctccgtttctctccgagccacagggcgtctttcccgcctatcgtgtcgccaagaaacctctgttaacacga

SEQ ID NO: 2510 - DNA, 4186 bp, Toxoplasma gondii
  source 1..4186: mol_type = genomic DNA
tttcttcgaagccctcgcgtccgacgtcccttgtccaggactcgatgcatctgacccctctcgaaccccccagctggcgcccttctcgccgcccgacgacaagccttccaggctctctccggttgctgcagccccagctgctgctgctgcactctgggcgcgccgctttcgagtgctcatgcccgaccccgcatacgcggcaggcgcggcgctcgattcccgtgacggcgggcgcggtcccgaagagacaggagggcccgctgacgagggtcctgaagccgcgccagccccgctggcactcgcgggtccttcagctccggcgagtccgtctcggccggagtggatcatgggtctcgaccgcgactcctcgcggtctctttcggactgcttgcacgcagccgagttcgagagctgctcgctcgcggtcggcgtggaggcgccctggggcgagcaggccatctccgccttggttgcactgagaggcgaagcgacagagggcgacggagacatcgaggggctctggcgagcgtttcggaagttttggcgtctccgtttcgcgttaggaagaccgtctgcgtgtgtcccgttcatctgctctacaggcacctttccgcgggcctctgctgatccgcacgcgttttccgctaccgcaggatctgtcgatccgtcgtcgcgacctcccgcgccgagtttcttgtctgcgtctgatgcgaactctctggacacgccgttctcgtccagacagtctccagctggactcgcctgcgtcacgccattcgcgcgcttctccggcttgatcggctccacattcttgcccgtcttcggcctggtcccccgcccacctccgtcccctgttttctctcccagagtcgatcgcagaaccttcttctcagtagggaaacccccagaagcggctgtggcgggtccagagctcccacatgtctgactggcgaagtcgccgtcactcgagcccaatgcaggtgaggcagtggcttcaggccgccggcagccgcgccgagaacgaggctgggaccccaggggttccagggcggcagacgaacagactgtcgcaaagtggggagacggggaagctggctgcgcgtctgaaaacatactgtgcgtggccgcatcttcttcacatgtttgggcttccaccttccccgtttcctcctcctgctttgctgcagacgaaccggcgccgtggcgtggcaacacacgacccgagtgagctgtatgtacactgaagccgccggcgtccccgcgctgcgcgggcaggggtgcaggcgtgtggcagtcagttgcgcttttccactgggcttccgccgcggatatcacgggttgttcagaggcagctgagtcgtcgtctcgtggcttgcctgagtcgcttccacttgcaggtttttgcggtggatttgcggcagctgcgtgacgagcagctgcctctgtctgcacgcctcgagccggaagactcttcgcatacggagtctttcccaggcactcggcactgggtccttctttattatctccattcgctgaatctccttgatggtgtgtttgcgtctccgttgcctctgacgcggctggagtttcccttcggcgtttcgactctggtgtggcaggcccgcggctcgcgacccccgaagcagcgttttcaccagcattcggagacgacttgcccaggagttcgtcctgaactgcctctccgggtgcacttcctcgacgatgtttcctcgaatttgccttttcctcttctttcggcacagattccccgtccttttcggagttcgcttttgcggatccacctacatgcggcgctggggccgatgggtggtcgacccgcacgtctgtgtcgggggaaggctctgaagatgaataattttcagcgaagtgccgagtttgaggagagtgagatgtgggaacgccaggcgattcctgcaaggaagacgcgagcgaagcgaggccggcagacgccgcagaggcgggctgcgttccggtcgtctccccccccattgcgggacagagcgctgtccttgtttacggacctgtcagtgcgcaaaattttcgcgggactgagaaaaacgtacgagaaactgaacgtttacggagaaacgagcggagaatcaacgtgcagacggtgccgagacagcatccgagacggggaagagagcggtggcgcgcgaacgggcaacggacaccggaagtggagagtggaaaacgacggatacgttgttaaggaaaaaagaagaagaaagaagacgaagagagtagaactcccgtctttgcgtctcgtgcctcttgccacaaaaaaagctccacctttctcgtgacaacctgctccctcctctggatctgggaacggcagttttcttccgcagctcaaaaatcgagctggcgacttgtgcagccacgagagaccgagaaacgccagctttttccacttttgtcgcagttcacctgcgctaaatgccacactaacctgcctgccgaaacagacaggtgaccagcacgccacagcacagcgtgagcaggtactaaagccacactccgggtgttgtttcggggtgtttgtcgccctgcacaaagcctcgcgttcgcaggcgtaaaggcaagctggagaaacacgcctttccaccaggaaaaacagattaggcacactttagccgctgctccacagtccacggttcgcgctacagcgagagtcccgtgcacccgctttcttcgccctcctcgaacaaacaccgcagatgtgtacctggagagtttcgcagtaagccggcacggggacgcgagaatttgaccacccccgcggcagtccacagaacacgttttcttcctccttcttttccttgcaagtcagaatctccgttatgactcggctatgtgccggaaaccgaggcgtgtggacggaaagagtggcggcgggcgggtcgaggctttcgccggggcatgtgcaagaaaagaaaaaaggctctcttgcgaaaacgagtcgcttctgaggcactccagactcttgaaaagccccgagagacgccgcgccggcagaaaagacttctcgtccgcaaactgatggacacttgcggaaaacgcgttaggtggcagtgcccggctaatttgtctcggtttctcagcgtacagatcttgagaagagagcgccgtggcagagaacgcaccccctgggagaggggaaaagaatccccgtttcgacctatatagcgaatggccgcgcgcgaaaaagagagccgtcctctcgacaggcttctagttaatttgcctgcgtcttctgcctcttgtcggcacgaagataaaaaaatgtcgcagataaccctccttcttcatagagactacataaggaacggtacagcctttcaccggtctccacggcgttcgcgccggtcccgccgtagcaagacaaagctagtcaaaatttgcttcctccctagcgcgtaaatcttggggtcgtcgaagttttgccgcgtcttttcctctcatctttcccttgttgtgaagaaactgcgcaaggtggcatctttcttctttgaagagaaaaatgagacgtagtagcaacgagaaacgagaagaacgggggggctggagagcgctgtgaacgacgccggttgttcggggctgcagcacgcgaattcgcgcgcgcgtggagggctcttcgccgatacactcaaaaacgcccggtattccgttttttctcgcgaatttctcctgttggcttctcagacatttccgacacttgcttattctcctcgatattctgtctacgggaaaagcctctgccgtcgctcctcgcggtttccctggggatttgagtccgtagaagaagatgtgctgcacgttaccattcgctgtctcctccgcctccgtggtgtctccgcttctccgtccttcttctttctctccgttggtctctttctcgcattgatcctgcgtcgtctcccacagagcgtccttgtcccttgcctaaaaactcgcgtcgaccagattccacttgtggctcgcggtccttctgcgcctccccggtctcccccgtcgctgtcttccccccccccctgtcctctgtgtttcgtccttcctctcttttcctctttcttcgcccgtcgtgcatctctacgacttttgcggcctccctgctccttcctcctcccccgccttccctccccgtctccggtgccccaga

SEQ ID NO: 2511 - DNA, 2014 bp, Toxoplasma gondii
  source 1..2014: mol_type = genomic DNA
cgtatttgaaccactgcctgggacgctttacggcggcggttacgagacagcgagcgaaagctgcaaatattcgaaagtagccgaaaatatccacttgcgtgcgtgcacagtttcgcggtgcggtgctgggtgctgtcctcggttcttcaacatgcagagttgcccgtgacagatcagtgtgtctgcgtctcgactcggtgcctgtcgctacagctttctccctacgacagccaactcctatcgttttctccattagcttgtgctggcggccaacttgggggcactgctcagcttgaaatttccttgcttagtcgcaacgcgcctgctagcctactagctcacaaggtcgtgtagcgtagccatgcccataatatgcaagaacatcccaggagatttcgtgcatggtgcgatacagacactttctactttccagacgaagagctgttcatcgcggggaaaatcattgaggagaaaacagcctaatcacaatgtacgcggacaacgctaaacgcatcttcggactcgataaaagactaaacataaagaaacacacgtatcgcgagccttcttgtttttaccgtttctttagaggaatcaagtcgggagaaaaaggcttgctgttgcggacgcaacggaaaagaccggtttgtaggcggggaagcagccgaaacataaaacagttctcagcgccgccagtaggccttttctggcatgtgcgtactacggtcaaagaacacaagagcaatttgaaatagactctgcgttgtgctcgagttcagggcccctactatttacagtttgtgcatttcctgtagaacgacaaacgacctcagagttcatctggattcctctcatttaacgctgagtagctcggtcagcggacgggttgtcggtttcaaatttcactttgtggcgctttatgaatttcaaaaggtgacagccttttgtctgtctcactgcactgtaaatccgccagtatcgtgggatgtggtgagtcttttagggcattctgtccaccaatttcagaaagcaaaccatcctacagtgtcgccaagaactgcaatacagaagggatgttgaaagtggagatgccttaccaagtttccaagccacaatggaagagaaactggacatcgatatgtgccagaggcaatcgtagctctcaaggtctttcgggcatacctgatgtctctggctgtgtctgctctgtatcttgcgtcttgggcgttgttctgtctcctgttctgccgagttctgcgcccctcagaacgagtctcactgaactgagagacgagagcaaatcctccgtcctcaagagcagtgacacgcttactcgagataaatggcaactccgattcaaatgagacattcttacaaaaatgtgggcggtttcatccacgattcactgtcacgtcgtcatgcgactggcatgcgcgagagtcttcttacccagtgcctttcgcgcattgcatgcagttgcacggagcgaaaaatcgtcgttttcagcactgtgccctgatcctgaaggcggtttttagcgacggctgattgaagaaagattcgcttctgcagtcttgttttcttttagtttactcgacaccttttcctgctctacacaccctgccgagcgcgcggaactgggcacgaagaggccttttgagttctccgtttttcgcaaagctgcgacagcaccgacgctgagtcaacggtccgtttttcttttttgtacactttcttatttctctgtttccctctactgcacgcattcttcggagtctccaccttttcttttcttcggaaggctggagtctccccgccactgccgctagcgcctcggtctaccgtcttcccccacacaactcggcgactcgaaacttccgactgtacggatttcccggccacttggccacgcgaactccggtccaagtcgctgtcagattcctcgtctctttctttctagtcccatctgcccaacagacgcgccgcgaaaaccttgtgtggggggctaaaaaaa

SEQ ID NO: 2512 - DNA, 4504 bp, Toxoplasma gondii
  source 1..4504: mol_type = genomic DNA
agaagagttgcagcctgtcgaagtggagtctcctctcctcgtcaaacaggtaaaaaagggaggtcgctttgccggttgcaagcaaacgcgccgagaaggcccagaaaaagatgtttttcaccgagacacatagagaaaagaagatcgccgtggagagaaacacacgcagaagcatcacaccgacgcaaccgaaaaaaagagaaaagaaacgacagcgcgcgaaacagaacgagaaagcgagaaaagaaaaagaacgagaaagagagagaacacagttgcgactctgcgggggttgaggaagtttgattgtcaaaagaaaagtgaggcgaatctgtatctgctgtttgaaagaaatctagtccggtcctgcaggaagaggaacaggcacaaacgagcaggaacacagaaagaaacgcgtggaagcaaatgtctcgacagtctcgctgaaggcggtatagaacgattttccgtctaggtaggtgaggacctccgcgcctcttctgtcgcagaagaactatcgactcccagatctcgcagattacagaaaagtcgatcgatcaacggatatacacgcgcatctccgtaatacatacttgcagatgtacgtacatgcatacagggagagagtgaaagggagaaagaaagagcttgcccgaagtagaccgaggacgaaccggactccgcgggtgtgtcgagagagagaagcagcttaagcgagtccgattggtgcagacagaaaggttagatacagcgccagagaggtccagataaacggatgaatagatattccgatgtgagaagagagtacgcgcgtggacggacagaaagtaatttgaggcgcggtctttgtcgaggatgccaagagcacagagaggcaagagtcccaaatcgcaaggagtggattctttgttcacctttcggagtccccatacacgacagaaaacgcgttgacgccttgcacaccaagagacacaccagcaagcagagcactgtggagacgggagggagccgttgtctcttttctttttgagatggacatttccttctttttccagtttcagcatgacctcttcagagacttgagattcggcacacaaactgaaggaatgctctaaaggtccacagaagaacgaaggagcagcaaacgaccgtggggcaaaaccagccccgctgcgaaaacgcgggatgcgtgcgacgcgtttcctttctttctgccaagctgcgttcgttcctttctctgcattcgcctccgttctcgctcgttgtctttgttccctgcccttctttttcctgtcctttcttggccactgatgccagagatctcgctttctccctcctcctcctcctctcttcagcggcattcgctgcggtgtccccgctctcacgtagttttttcgctgacgctcgcgattcgcggtggattgtggctcctgtccctgaggagaaggtcgagctgggaggcgacttgaggagaaggcgggaggtcgaaaaagccggatttccaggaggtgaagaaaaacgcagcaaaacggcgagagagaggttgccgctggcgacctgaagctgcagctagctctcgagctgtgtgtcgcgagtcgcgcttgttcgcgttttttgagactcacgacgacctcgcgtctccgctctcgagagcgcgcgcggaaaaggaggagtctcgtcgaagacgcgccgcagagcttgtcgggagattcagaagaaagcgtcgacacccttcaaccacccacaaccagacgcgaaacagcatgcacggcgaagatcacgcacagaaaaccttcgcgccaggcctcgcgggtgtgtgcagagtgagagtgtggtgagaagagaggaaggaggcgagacggcggcctagctgcttttcgagaagcctgcagagaagaaaaaccgcagcgattccgtgcttctctttttcggcaacaagagcgtcagaggcttcgcgtcgagttcgctgcgaaaagaaaaaatcgaaagcgtcgtgcccagcttcttgcggttctccatctgagaagcgctttgcagaaagaacgagaagatactgggacctgcatgtctggacgctctgtaaaaaggagacagaaggaatcctcaagtgtacttgtttttcccgtttttccggtcgtcgtcgcgctaaaggatttggagtacgaagcagccgtgccttctgctgtgtttcgcttcaactgaacacagtggcggagaactctctcacgggcgcagggagagagaggcgcgcgcgcagttcggacggctcccgatctccaatcgaaagcaacacaaattccttgttgcccatgattcctgtgtacagagtgcttggcaaaacagtctttacctgtttctggagcaagaaacaacgttttcaagcgacgcgatggtgtccagagtgagagggaggcggggaggaggtagctgctgccagcactgttctctccactgtctgtttcccttttagatgcagacagatatccatctcgagacattgtacatctaatcctgctaaccacactgaatctccacaagcacacatccgtcgtttttcgccgcaaacaattgccaactggaacgcatacacacctatacagacaatcgaaactcgaaacatagctttcctctaatttatacacacacacacgcatatatatatctttatataatatggttataacatatatatatatatatatatatatgcttatagctttctatgcgtgcactacgtcaatccccatctatcgagttgtacacgttggcatacgtaaatccatacttcacgttttttaggtaaaatacatatttcctaggagtatatacatagatgtgtatacatgatttgttaccgagacagggaagcggacaaggagtgtgtgtgtgtgcttccgtctgactacaagcgagattcgaaaccatgcaagtccttttacgccgggaaaatctctcctgagtgttctctcgtggaaatgagaaacatcgatgcttgagcgaggtccccgcgaagaaaacgtgctatttctctcgggactttcgactctctcctcagttcgtatcgttctttttctatcctgtggatcacggccattcgtacaagtaattgtatttcactgcggtttccatccgagattcgtaggaatgagaggaaacgcgttttagctaggaactgctctgtcaagatcaatccgcgagggaatgtcagagccacagagtttctgtaaagccgcttccacgtgcgagttctctattcactctcatcaaaagttggagaaaacgtctgctcacccgttcgccacaatcccgcgactctcccaagcgctgttttatttgtgttccccttttaatacctgagtgtgtgtgtgtgtatgacgtgtacaaaaacattcttgtttattcatttgtttatgtatacatgtatgcatattcatatctatataacactaaatatcgctggagcacgaatatgaaagtagcaatttccatttctaacatcacagctgccaagatagattcgaattgacagaaacctcatagtacctgtgacaatgaatgcgactccagctaggaaatacagacaaccagaacttctctgattgcaggagcaaatgcgtgctttcctgcttcgggtttccgaaatttgactttctgtgcctgagcattttacgacgtagctacaaatatatatatatatatatatatataggcaagtataagtagtggtctcgtttagaggacagttatgttttagatcatcgcagctgtttatatcgattgaacttgtttctgtaggataacataggcggagggagaagcaggggaaatagagaagctccagttcctctcgcctggctggagatgaatgttcctccggttgtgttttcagatgttcggtgggaagttccagcataataaagtcactgccttcctaaaaaatacattttacctgcagactgtctctgaattctctttgctttttcgtcatcctcatctttccgagacatgcgagacaacgaactaggacttgagtgggtaccaggaccgcgagagaggtcttcggaggaagagtgatttccctgtgttttgtgaaactggaaaactcttgaattcgccatgcatgcggtaagaaggcccagtcaggtctgaaggtttcagagaaaaatggaggagaaaaacgcacacacaccgtagctcgtgaaaggagaggtttcctgtcccccgcgacgcacccgagcttttttccttggccgagacagaggacttctcctttcattcgttttaaagagtttctcataaagaagagtgcctcgcctttcgttgtttctcgtccctttctgagagccgcggtggacagacgaaaaagaggaaagagagcgagaaggagggagatccgcgacagcacacgatcaagagacgcggcttttgagttctcgtcgcgtgtttcatctcagttgtcgatcctcgataaaggaggccgagaaaacgagcaaaccgagacaga

SEQ ID NO: 2513 - DNA, 1207 bp, Toxoplasma gondii
  source 1..1207: mol_type = genomic DNA
ctgcgtcacccgcctctctctcataactcactttccaaggacaataaggtaattgctcgtgccaataagaagcatgcgatcggctttaccctccacgatccggcgggtcaaacggtatcgaaaaccccccagtataccgctctccccgttctcccgagaagcagtcagcgtctcttccctggctctaagtgccgatgttgcgtcgtccgcaatcctgcttaggagtccggaaaaccgcgtttcgcccgcatgtgaaaaatcgtcagtttcccgacccccacatccgtctccgttatcttctgttgctctctctgtagcagaagtgcattcagatccgggcggaccagggtggaaggtgttttctgttgaatggctttcgttctgtcttgtcctttttggggagcttcgcgctcctaagcctgccaacgcagctgcccgcttccgcgcgaaaattgctgccgccgcccggcgcgcctccagtgaccgaggctgtcctcgaatctcggggcactctcccgagcaaaatggggaagctgcatgccgctggcaaaaaaaattgtcacgagagttggaggagtcgggagctcgcgacacggcagatgtctccagcaccggccgagaatgcggcgacgccggacacaggtcgccactcaacgtcgaagatcctcgagacggggaattccgaagagaggcatcttgcgatggaccggatgcggggttcgacacggacgatgtggatgacagactgtagtccggaagcagattctctcggggggcgctgtgcccgtctgcttgaaaccgggctgaagggagcgcagcggcaatagcggcgccagaggtagccatattagaggcataggaggaagaaacagcaggggtaagggtggtaaaggtaagctcttgtggagccgactggaaaagaacctccggaggcccgggacccgactgtcgcgacgagaaaccctgatcacaggcgtctgacgaaacagcgtacaaccgcactcgcggtgccactctgacacatcggatgctcgggaatacgcggctcaaacactgtacaagagtcgtcctcacagcctctcacatcaccagcagggagcgcgccaacagccaccgccgggcgtcctcataattccgtgtgatatcgagttgctttgacaagagaaagcgttcactcggtccaccgagggcggcacggcagctgaca

SEQ ID NO: 2514 - DNA, 2134 bp, Toxoplasma gondii
  source 1..2134: mol_type = genomic DNA
aggaccgggagacagcctcaacatctttcactggattcctgtttctttcactcgttgtgtaaaaggaacgatttctgtttcgtggcccaagccagttttttctcctttcactctcgcttttgctgcactgagaggggaggctccagcacggacaaggggaaactcgcctccctcccgttgtgctctgtcaatatttgtcgtttgtccgtccaaaacagactgaatcatggcgttattcgccgtctactgacgttgtcaaggctaaacgcgtccccttttcctggctgtcagttcaccttaaaaaacagcaactcacagaagactcttcaacagttgcggtgtcgctgcacatacgcgtgggcgtgcatagaccatatgtgaacacgtacagaaaaatacagctttcacatttagaagactgacatatgaacctttatctcgcttaacttttatggacgtttcacagcagatatatctacctaaaccctgattgcatgcgtgtcgcgcagatgtctagaaacacgtaggcggtcaggtgcttgcacttggttttttgtgtccaggcatcctagatctgagtcattgggcgggctgtccagcaaagaagccagaggaatagcacaacgaaggatatgaaaatgggtgggtatccgtcggcttcgcacgttgatattttcagcggtgcttctcatcgaaaaggatcgtggaagtgccaaaagctgtgccaaggaaaagctacccacattcatgtcttcggtccttcagctcacctacctaaaatcctctaccattaggtggggtaacagaaaggaaagtgtctcgcggcaagccagacgtgtagcaaccttgagtccccgttcttcttgcagcctgtgataatactctgccccaaatatctcagttcttttcttcagaaacgtttgcgtctcatgcgcttagcgcaggccgccgacgttgtgaagtttcttttcgaagcggacatgtgctggtaacatcccagtgtgtcaccacgagctaacatgtacgtcgtgctctccactgcaaaagtgaactggcatcctacacaaattcagaaaagcagagttcttactcttctgcagcggcgcgtgtgccttgctaatgtgctacactcctctgccggttctacatctggatgcttgccaacggcagttaggaccaccagacaaacccccaggactggcgctacttcctagttccagccccttctgtcagatacataccttccgtctccttttttccactgcaatgggcagcggccagcaagacttgctgcaactactctatgagtgtgccatctgcgaaagtggattaattcgttcactagtctttcaggcgcaaaaaggaaaaaacgtgtagactcgcggctatcagtagttaccctgcattgcagcaagcttgtgatgctttgctgcggttgaagagagtttcaaaaggaagatacgtgctgtgtctgtcttttcatacggcattacgcgacgtctgccgtctaaaaccacaagacggacaaaaactatcgaagccacatatgaaagacggtgcacggacactcttctcacgcttcgactgtttcgatggcttccgaagacgttttctcgcgagacaagcgaaccgcactgggagtgtgctgcccgcttcttccgggcggcgttcaagcaatacgtgggtttttttcgtgcgcacaacaaagtccctaaaagagtcacatgagagatccatatatgcctaacaatgcatctccctccgatcgtgtcctatgcaagactgcgtgaagggcggagaagcaacccacccaattttctgttttctcgttcgtgtccggagactaaccgcgaaacgcgtgcgcaaattagtatgtctgcgggggcccccaggaagccaagtagcgacggaaaagtggatttccttctttaatgcttttgtggaacggttgtttaattggaaacactttctcacagcgaaagaggaaaatattttcccgtcgcacaatctccaaactacctttcgcgctcgaacgacctgtctgtgctctgtcggtcgagttcacctttttcgccgcgcctcgatttcccctcaatactcccggtcggatatttacaagaaaaaacagtcaaga

SEQ ID NO: 2515 - DNA, 4781 bp, Toxoplasma gondii
  source 1..4781: mol_type = genomic DNA
tcacgaagtcacacttcggtattcgtgctgtcatgcctataaggcgcctttccttgagcagcttctggggcgattccacaagaacagagcacactacagagtgctaggaggaccatggtcgcaaggaagacattctttggcagtacttgatgaacccttgaaggtatctggcggctctccgtcgtctaattacgagttgcctacgtaacaggcgagactgtgttcaacctcggcacccacattgatcttccgtaaactctcgacccgaacagctatccaactgtgcatgtttagtgccctctgcgcttgggtcaaagtcaattcacgacactgtcgtacccctcaaagtccggctctcaacacatactcttgtggtgcagctgccagccgacaactacatatatatatataaatatatatatatatatactatctgtacaggttgggtttgctttcctctcttcacggaggacgcttagttggtgcgtcaagagtgcgacacataaaggagcgcacatatgtcaatagtactacgtagaatgcattttgaggcggtataaatgcccgacaactcgtgcatgtccgtgaacgaggcgagcagcgacgtcttgtgacctatctctgctccagaggtcattgaactccggtgcaactcgagatgggcaatgctagacacaggtttcacatcttacctgctggcccaagacaacgatcgattgctgagcagaatcagaaccctttggttctgcgattcgtgcactgagacactgaattacagattccgtacacacagagaacgcgccacgcactctccgcgcgtgtatggcttcgcgggtcttcggctgcggagagccgcttcttcgcgagtgaccaggcattttggggggcttttgcgcgagtctcacgactgcagcaaacagggagttgaacatgaagtagacgaggagtgggcagatgcatccagtggtcgaacgctcttctcagcttccacggcaacggcggaaagccgtgtcggatgcgtctgcatgaagcgtcgcctgtctatacacccccaatccttctggtcccgcggaccctgaacgcttcttcccttgaccgcgaaacggctgtgaactccacaagttggcggtatttctcgacggccacaccataaaatggcggagccgttgttacaagagggacacgatgcgtcgttcccagaaccaggcacctctgagcagcagattctgggaaacggaacggaggtaacgcggagtttcgtaggccgacgaaaataccgaagacaaacacggatacccgcggccggcggagcgactttcactggcgggtaaacaggaatcgttccttgcacactctgagggagagaatcgagatgtcgtcacgcgctggagaatgtggatcgctctagtttttaaaactggagactgccctttctgacatcgccaagtgggcatctcatttccttgccggcgagacaagacaccgcagtgaacgtggcagcgacaagaagtcgcttcgactgtgcccggctgcgcagcggcgaaaagcgcagttgccaaaaatgagcctttacattccgagtcaatcgacagaccctgtggctggcttaaaagtcataacatgtgtctttcccatggctgtgtcgtctttttgctgtcgggcaggaactgatggagtcccgctgacagaggagctgcacaccaagcagccggagtaagagtttcctgcgcgggcgcaagtcgaccgcgaagcattacttccgctgtcgcgagcacccatctggcaaatgaagattcaacaatttcttgcccctcagattctgcattttagtatcacttctgtatagtgggaagcaaggagagctttgggttcatgaaacgcactgtgcatgtttgtttgaaaaccgacgcgtgacgcttgggtcactgcataccgcaacgaatccggtcaggaaacacgaatgcgagtgtttggaaaacaagaactattttcatcagtgggaacaacacaccgggtggggtttcagcgcgctatcgtctaggaaactcagactgtcggtatccgtttaccaggcaattgcggcacacacgtgttagctatatacgtcatgctgacccgaatgaactgtaaagaacaggaacaaaccgtgaagcatggggatgaagtgtgatgaattggaggagcagagccatttctctttcgtttagcttcccaattgacaggagtcttactctttattccgtgccgtgtcgcggttcaagacacctttccaccccaattcgcgtgctgagcgcgttacgtgtttcccctcatctgtgcctaagtttattgagagaagcatgcttctgcgatatgcccttcgcatcatgtgacaggtttatgtgacacaaattgcaatgcattgtgcttgccgttattgctgaaatgtcttccctgggaggatctgcttttttttccactgtttgtatacactgtggttcaaaccacgtcagagttgagtgctgaggacacttctctcttcagtgttcagaagctcaggttttctaagctagaaacagggggtgtcgtccaatgcaaatactgccccacaaaaacttaggtcgcagcaatgccatcttgcaaaagtgcagtctcatgtcatgcgaccctgagtgtattgtcagattcttgcggtgttccctgttatcgacccggtttggagcatcatgagagttagcggttttttcattgcgacgtgtccctcatactcggacaaccagagttttgcgtcgctttgctacttagactggagtattcgtgacacttccttccctcttgcccatgcattctcttctcatccgaatgcgctgatgaccttgctggcctccctggggttctcaccaagtcgtttggcaggacacgagacctgttaatgcagatgttctctcgtttggatattcacattttgcggacatctgctttctttcgccaccgtcacctgtaagagccgtgtactttcctgttggttggctacacggtcgcaagctgcttctgacatcaaccccggtagaacacaaatctgctgtcagctgctaaagcatattctcaacaaatcctttgtttaccgcctgtaccgcaagacagatacggagaagtgtaggacgtgcccgttgagttcaagatacatgctgaatagtgacaagaagcaaacacaacgtgcgtcatcgggagactttttcaagcttctcatgattggacggcgtagttcaagctcgatacaggccgaccccttttgtcggtcacggcaatctcctctgttccttgtgcatagaacctaacatcctcacagttgcacgcttgtgccttccgcagacctatttgtcaaatcgaaaaataaggacttttgatgtctgccgtgaaagagaaaccgaccttcctggcatggatgtggctgtaacgcgctggtcttgtgagctgcaaagttttgtgcaagggcaacactttctctcgcttgcataggaaaaacacgagccgagttccattccgaagagcaagtgaaaggaatgatggcagtactcttttccggcaactggtagaatcccgcgtttcgtcgttctgagggcaacccggacggaaccttttcgcgtgctcgcattcgacgcttcgagctttcgagctgtcccatgggaaaagtcgaccgctcattttcacatagtcgggggtgttatttgaatgcagtagtttcacctctttgggaggcacattgccgtccacgcagcggtatattactgtcggatatctttgtttttcgccttcttggctaggtgaaaaacgacggcactcatccccagcgcctgcgtcttcaccgccagcgtcggacacggcagaacagttccccctgtttccctgtctaaaatgttacatttttgagcttgtatgacctggaaatcttccttacaggtcgtttccgttgtttgctgagaatcccgagatttcctgtcctctcacaactaggaatttgctaggggttgcgccccactaggatttgatttcagtgtgcctttgcttgcgtgatagcaggtgaaccagagcatgatcaggacgacttctgcggcagactttgtgaaatccacccaagtagagttgtgacttatttgtttgccgtgtgtgttaacaccgtgtttcacgctacgcgccgtcgtcgagcggcgagaaaaacttgagaaacccattttcagccaagcatcgtgagtgcttgtcgcgtttctaggtccgttagcagacgtgcagaaataaagtttagtcctaaaccataaacggtcgcgatgactcacaacacaccctgcaggtcgacgataccacgtcttgttcccttcctgacctgctttgaccgtaactctgctgtcactttaacttcgagcgcgcggaaaacctctttcgtgggtcgtcgttccgggttaagttgctctgcatctaataggggcgttcattttgcctcttcctagcatttctcgcagcgtgcgttcgtcgctatggtaaatcttgtgcaaaccaccctgaggtgtggtgagcgtgtgtcttgttggttgtcctcttggtcgacggctaaggcgctcgccgttcgtcgattcgaagcttttccattttactcggcccataatcttttcaggctacacattgttccgattttgtcgttccgacgttcgctgacgcccgccgttccgtgcgctcgaccctggcacgtcctgctcgcgggcacagggggttctttgcgtcgctccgaggttgttcttttacaataa

SEQ ID NO: 2516 - DNA, 2684 bp, Toxoplasma gondii
  source 1..2684: mol_type = genomic DNA
ggacaccgagcaaacatgtgtgcaggtcagatgggtggttctcgtgcctccgtttggccatggaaaatatacattttaacgcgatttaaaccacgcaagatgtaaacgttcctccgaaggggacattcccactcgacctttcgtctgtgacaaacaacgaagacttcttcccgctcccaggaggcaatcgcacccgtcgcgctgtcctgtggtggaggttttcccctaccatttcgacgatagaccgtttatcttttatgttgtatggacactcttcctcaacgcagtgtggagtgagtgcagcagagagtcgacacggaaagtcatgacttgatgtggggtccgtgtctgagctggaagggtttcggtatttgcagcagagttttgaccagcgtgtaggtggcgctgtattcacacaagctacactcatgcagagctcagcttgaacaagccgaacgttttccggaaggggttttgtcttggcttagcaactttcccgtttgctctattgtattcgaggaaaaaacgaatggcgtgttgagaaccaccaccagaaccacgtggtccaagaccgcctacacctcgcagactccctttgcagaaacgctcaaacatccaacgctgaagtcgaaccgccaaaatgccagactttctgcaaaactaagctgtgaaactccccggctgctctggtccgcacttctgcagccgtggcggcttttgttaaacatggatggacgtgtgcaggcgaaaaaaaaagtgcccgaccgtctaatgctgcagctgactaggaaagtggggaaacagagctgggcactgaatgccagttttttttctgctacttcctgaatttcgcagcatcatctgcacgggcacgggagctcaaataggagcccttttttggtgggtgggttcctctttgcggtaatggttttctccgagcggcaattgcatgttttctgcgtagaaaggcaccgcgagaaccgtggtatttcctttgcaaagacagccaagcgggacgcaaaaggcacatcacaccgcattcccaactctgcttgtgtgcactggtgctccgcagcgttgtggatcgatttgagatttgaacacttcaaaagctgccttccatgagattcgaggaaacacaagaagtacgaaacaatgctctgggcttgctggagaaaaagcaactcgtctttgtgagtcagaacacaggcgatccgttcagtgaagcacgcagccggtgtcgggaaacaagcgtaactggaagtcggttctgaaaaagtgttggaaactaggcagatgtaactgagtcgtgctttgcgaaagcgcaggagaaaaacagaacgacgtttcctcctcctttactagactatcaaacaggggaaacttctacccatgattcctcttttcgaggagtctttgcagctcccgttttggagctctccaggactggttgtttcaccgcagcatgccccaaacacaaactctcattgaaagggcacgttgaggaaatgatgctgaggaagcggcagagcacgtggacgtaaaaatcgagtgttgttggcaaagaagtctgccccctcttcaggtgcgaggcatgcctggtacagcgcagactccaatcctgccagcacgtcctataattcggaccgcaggaatttatcgatttcatggccgatcgatgatggccatctgcgctactccctcctgtgaaaatcgcgtcgaaacgaggccctgaatacatagaaacgcgaaccatagtcctaagatttcaccttagttctaccgggcggatggtgtagtggtatcacgcctgatttgcattcaggaggtcccgggatcgatccccggtccgtccacttttttaccaaatgctatcctttttagccgataacctgcaatcccctggacagcttcttgttgcgtttttttaagaagacattttattcactcaggaacaccttctttgtctcaacaggcatgcaattacaccactttgtcttcgcaggcgccgcatctccaagctggagtgtgtaaggataaaacctaagtgcagtatcctctctgcatttaatttccgattcctgacgccattgctctttggcagttttgtttttattgctcaattccttctctaaacgggagagtagctgtcatgctgacgagtcctccgcaggaatgcttcggtggacttccccaacaagcgacaccggcagcccgaaagggatgtgtttgtggacaaccttccctgctcatgggaaacagaaccgctaaaagtgtcaccgcggaaagcgaagcgaaagagttctcttcttgccatccagatgtaagtgtcatgttgttgaatacggtaaagttcttggcaactttttaaagcaagaaatatgtagcacaccagcaaaattccgcgtgtcgccaatcgcccacaccgtccttcttcgttctttctgtgcatttctctagtgatttagaccaaccaaaaagtgcagcgattcgttttttgcttgtttccttctgggtgagacatggactgagtttcgatattctctgggtcgcgtctgtcggcccttcgttgttttttcacaaacgagggaacacgtgtcagtagtagggaaaaaaacttctactcaggaaaaagtcgcggccgaggagaaaaggcgacctttgatcgaggaaagtgacagtaa

SEQ ID NO: 2517 - DNA, 1727 bp, Toxoplasma gondii
  source 1..1727: mol_type = genomic DNA
ctctcgtaccatgttgttgctcttcgcggctcatctctgcggctcagcgtcgcctttccctcgacccgctgctgcctctctgaggctccaagagagaggcgagaaggagaggccgaacgagagagacagagaggagaaccgaaggccccgaggaagacgcagaagggcggaggcagcgaagagagagacacagcgggaagacgatgttctggcgggaggaacgcgagtccaaaagacagagacagggatcagagagcgagagagaagatggggagatttgctggtaaagagaacggcagacggcgggaaggacgaaaagggaagcgaaggacagacgacccaccgagtgtggaaagacacaagctcggttcctggcgccgataggcaaccctgagaaggctatcgagagatctgggagcttgcgtagagaaaagtcaaagcaagcacaggaggagaaggtatatgccaccagacaaaccgtcttactttaggaggagctagagaacacgggacgaaggacgaagcagaaagtaagcttttacactgtctccgtcattcacgggagaggcgccaggaatgaaaaagaggacacgaagtgtgagatgcaggaaatcgtaagaggcaaccagcgctgtgctagcgccctgaattccctgtatctgcgttcgcgtctcacctttgtcctcttcgtgagaggagagcatcggaacggagtaagcctaccacagacactggcgccacggtgtgccgagtgcagagcaaacgaataaaaggttgacgaagtcgattttgagaggcagaagatgtcatgttcgtagttcgggtggcgggtattaacgcgctgtcccttgtgacaaatgaaaaaattcaacggtcaggacagcggcatgcgaggcacgcgttgacagaggcgcacactcactgggatttgaatactggaacaaaggcaagtggagaagaggaaatatctcttaaatgcatttttgcgtctattgtcaagcgatgtaccctccttcccacctaagctggtagcaccagaagcgcagcgctgcgtgctgcttctgagtggccaatccgtaggcgacgagtcaaagaaagaatgaggaagaacagagcctctagtggagatgtccgcaggggagaagaaggaagcgatgaaagcttgtcctggagaaaagttggcgtccgcaagtgttcgcttttcctgagaagcatgccgaccggcacactgtcgcgcatgtaataccgctgcaagtcacacgcatgcatcctgttttcaggcggctagctcctgcagcgcaaactcggagactgcgcctcgctctcctacaaaaatgactctgtttgatttcgggatatcggaggaatcgaatgtagcggaacgatacctagatgtacgtacacctcgtcctacatgtgtctgtggttgagcaacgagccgcattgccgtctgtcccctatgtcagattttcttttgattactttttgtgccgagtcggacagctttgtttgcctatcgaagctgtctgccttcgcaatctcgaggtctctcgacaaagggcagaacgatgtctagccagtgcggttgttttagggggatatgaacttgagggcgggggcaggagcagttgtttgatagagaagattgctgcggcgacgtgatgtgtctgatacgcaagaaatgcctggcatggtctcagtgtctgtttgcagttctcggaattcga

SEQ ID NO: 2518 - DNA, 2402 bp, Toxoplasma gondii
  source 1..2402: mol_type = genomic DNA
agcaaaccgagaccctctaggacctcagatattgcgtgtgactcccgactactttctctgtctctcgcaagaggacacgaggagaaacgaattccgtcagtttcttcggaaaaaagcttagactcgctcgagaaacgccacctgtttgtgtgagaatgtgctgtgcaggcgtggagatacactttttgtatttcttttatgtaaaaagcgagtgtcttcttggtgtctcaccagcgaaggaacgcgaaacagtttacaaggcccagtgtctctcttcatgtctacagctgtaaatgcaactaataacccgtacgtacatttctaggtaaactcggagagacagggaaagacatcggcgatgtgtgattttcccgtcttcactgtaggcatagagagagacatggagaagacgagattccattctcgccgcaaatgccgtcttctccccacagagagaaggaagaaaacacaacagcgtggaaacctgggactctttttgtgtcacgaggtgtcaatacaccgtatgtctctgtacctaagaactggaagacacgtttacggcgcccccgttctgatgcaaagcaaatgcgagtgtgaactcgcggctcctggaccaccgctagcctatgaggcagtgtcagaaggaagtggagaaacccgtgaaaagccaaagacggtacttctgtcattgcagagaacgcgagtcgtctccacagaggtgctaaaactcgacgagcaaactgttacagcttggcacttttaacgcggcgtcagcgccacccccccccccccgcgcccggagggcaaatattctgaatgtacggaagtagtttcatgtgggtccagccacaccgaaacagtttatccgaaaccttataactagataaatacgtatatatgcacattgaggtaagtgacgagaaacaaggtacttgacacgcggcatcaggtccgtaaccgacagaaacaccacgacttgtccgtgttgaacttaatgtgaacgaactaaacacagggttgaaccccagcgcggactcctgaagaatgatgcgatgtgtgcaccttgaaagagcatgcactcgttctgtgtgaggcgtttcctgtgcattatgtatacaaatacactgtatctttacacgccatatacagtatgtaaatacagtctacgtccacactgggcagcggtctgctttttgggagaactcgtcgcgtttcctgcgttggaacggaaatcccttcggtcagagtcactttcgggcggatgttctgtccaagcggcgacacaaacagaagaaacatttccttcttgtcatttcgcagcggctgtacttgaagcagtagaaaaaccacgtgctttgtcggtgacccagggcaagaaaaggcgcaacgcgcatgcacacgcgcgattgtcggagtgacccgtccaggctggaacgggtgcaattctggctagtgcgtctttccctcgacttcttgctcctttttagttcgagttcgtcagagactttgctgtttctcggacttgtcaagtgctgctttctctgtcccggacaccggcgtcggctcgcgagtgcctgccgacgcagtgcgttacgtcccggctcgccgtcagctcgggagacacggatcgttgacagacgaggctctgcagagacttttcgacgtgaagcagagcaggtgtgtggcgtttctccaagaaacacgggaaactttgcgttatttcgtctttccgcccgatccgaaccctcgaagcgcctcgcgctggccatgtgtcacgagctgtatgtacacacgagacaccgacggctcagatgcgggctggtcccgggcgccgcgaattcgcgaattcttgtactttctttccaacaaaagcgatgtgaacttgatgcgttaggatatcgaacatcgactcttttccctgtcgcagctttgagggtcgcggttgtgtggctggggaaacgccggcgccttctgtttagaagagactgcccaggtgatgattcctcccgcgcgaccccgtcgggaccttcgtcgatgcctagagggaaacctgcggcgctcggagccgccttgacaggtcggaaacccgtgaaaatcccaggagttccctctcgcgtcttttctccgtggatgaaattgcacttccatcgctgctataagcgcgccgtccccgccagtcgccttcgtccaggcacgcctcttccctctcggcgtcattcctcccgctgctccctcacctgagcaatccgcgccccgcaaacaagggacagaggattctcttcctcaagaaagcggtgctcggagagcctctgaccgagtccatcggactgcaggtgcttcagtgtattcaagttctcagtttgcccagttcttcgcgagaactgcttgcagctccacatcta

SEQ ID NO: 2519 - DNA, 2316 bp, Toxoplasma gondii
  source 1..2316: mol_type = genomic DNA
gattctggaggaattgctggcctcgaatgtcgtctcggctgtagagtcacacgcgataggctcgagccctagagagacgccgaagaagtaaatgggttcatgaaatgttttttctccggttttctcattgtctgtttccggtcgaacaacgtgttcgctcctcgtgggttccagaacgaatctttaggtagcagatttcttttttctcttctcggtcccgtctccgatttgaggggcgtctgcgtactttgtttatttgggttgttcgcgtttcgaggcgcctctctgagtttcagggatctgtttcttgtgtctctgccgtttacaaacgaaaccagaacacgactcatgcgtgactcacctctatccgtcaggaggcgctacgggctccgcagctcgagagaaaggtaacttgtcattgtcacttctaaaaacaagattgggcctctttctcgcgcttatccacactcaaaaatggtctcatttctttggtcttgtcacccgtgtacactagtataaaatatatatactgctgagaatgtggtcaaagacatatttgtggtcatcactcggtttaagggaaagaaccaggtgcttccgcctcacctgcgcaggtatccgtggatagaaatgcatccccatgtgatctttttgttctttagtgccacttagaactctttcaagcaatgtttaggtgatggagccctgttttccgacgggttccacatcggtcgtttaccaggcgtaatctattgatcactgttaccactcgtatcagcagcgaaagagaacgagtactcagatgctagggtgatcggcaccgctgtactgggagatgtccagcggcactactaagaacgaatgccgctacctttgagcaaacggcgttattctcgcgctgtcatgctgggtcaaatctgttttagatttttagggtaagaacgcagtagagtgtgtacgtgggggatcgcgagagtggagaatcacagaacggtgcctctgttacaaaatgaaagaaggtcccacgctgcttctgaactgtcatatttaattccctactttaacggtggtttgggacctagctgcagctcgattttctaactgtctgctgtttcattcgtttcctcatgagtgtcccttgtgcccgatcgtttttttcggatgagcaaaagaaaactagcaagacacgtagcatacttaacatggagcatcgcccgttgccctgcagtggcagtcctctgactacctcccgcccctgccccacagccctccctcttctgcgaaagattggcaaaaccttagacacttatactaataggatctgcacacaaaaatctagtggcaagaggcttgtggcacaaataaattgaggtgcaaagtgttataaaccctttatccagattgccgtcgtctgttctacttcgggagcgtcctcctgaggaaacgcaaaccaaaggacacaaagaagccgaaggttgtagacactggaaaatagtgtgaagagaaagtgagaattatcattcggctgtctccacagatgtccaaaatgtcgattcccgaacttttctctgctcttacccgctcctccaccggtgtactacaccctcccccccctccaccaccgaccctgctatcaccctttttccggtgcttcctttctctcgccttttcttttgctcggagacgcgtttgagaaaaacaagggacaaccttttcttcagcgtagcctctttttcgtcgctagcccaaacgctccacgttttgttgcgtggtatctctgtttttctcctcactccaggtgtaatgccatcgcacacatttttctgggctccacaggcaccgttccggtgtctcctttgccacaaatttttcgcgcggagtttttctctgtattcgctccactttctcggctaccctcggttgtgtctcttttctcctgtagctgtcacggcaggttgcccgaggacgatatccgtcccaattcagaaactttcaccgtagaaaatcgaggtcacatcccctgacctcacactgcgtgtgctgtagctcgcttcccgttgtttctctccgtttcttgtcgttcctgtcgcttgtcacccgtcagttttcttgtccacttgcctgtcaatcgctctttcgcatttctctcctacactgggacgcttttttaaaccctatttcccttgcgcccgtgttcaacccacccagtccacaagcgcctctccccgacttcttcgtctcgccctcgacagaaacgacatctctttcacctgcaaagagtacggaacgttttctcaccccctctggcctttccca

SEQ ID NO: 2520 - DNA, 4984 bp, Toxoplasma gondii
  source 1..4984: mol_type = genomic DNA
gggcgctctttgcattcaccttcttctttcgcgagagttcgaggaagagtgccttcagaagcagcgagagaagagacagacgcacgcgaaggagagagacaccacgaggactgcaggagaggagccagtcggacgaagggaggaagccgagagggcggagaagagggcagagaggccgtcgccgtaagactggaaggaggaacgtgaagaaggacagagatgggtggaaggcgcttctttgctggagctcgttcatgcggagaaggatctatgaatcgaggaagcagagaggaagagaggccgcttccagcaaagcaacaggtaccatcccggtacccatttccatccgagatgctatgtgaacaagcatgcggtcgtcgacacgaacataagccgctgttagaaaacgaagaaggagaaggaagagaaggaggagaaggaggagaaggagaagaaaacgaagaaggagaaggaagagcagagataaagcaagggatgtgtgaggagacagaagagaggagttgccgatgaagaagacgggtggtttgagctgtgcgggcgaacggaaggcgaagaagagaagagagctgtgaggacgccgagcgagggagagtagagctgacagaaaaagaatggagatcaggaggagaagggtcttgtgaggaggtggaagaagaaaagagaggcaggttcaacctcgcgccatgtacaggacaccgagagaagacacaaacaaagagaaaaaagaggaagcaggaagcagacgagaggggagagtgaaacacccccattggtcttagcgtcgatgggtttgctcaggcgtcgaacgcacgcagatcgaagcctgagaaaaaagaaggcccttcaagaaatacggatcgatgcagcaacgagaaaagaaactcgaaacatggcgagataaaagaaaaaggacatacactgcctcggtatctaacgtagccttgacgaacatccgtacacaaggggtacgcatacattcatactggttgtcgccttctaactctctccggcgaggtgtatacttgacagccaacaacgatcgactaactgtacaggcatcattcacttcggtagttctttcctcgagtgtctccagtctgccagtctgcacgggatacacacatttcggggatcctgcaggtcgaacccccagaaacagttgaggagaggagcggagacggcgcgggagagaagatttatcgattcttggtctctctgggttcctgtcgctctcttcaagaggagctgagaaacccacaagaagtaaattccagttcatactcggacgacggagctcattcgtctcgcgggcgtctgtcgagagctgttcagggcaccggggccattgctgcggggggttctgtgtttgcgtcctttgttcgcctccacggaagccaggaaattttttgtatttgaagccaacaaagcatcccggttgcgacaaataaataaggaaagagaagagcggataaaaacgcgagaaaagtgacagaaccccgacactgcgccctcctgtggcgcgcgtctccttgtctcgatgtgcacgcgatgtcttcagccccgagagacgcggccgcagcggccgatatggcaagcaaccggggaaaattagagactgaaccatcaggggaaatgcgaggtttaaattcgcttcacctgactctaaaagctctgcaaaggagtggagcgtgtgtttctttgctccaaattcgtcttcttcgaggcaagcgcgggcacgagaaacgaggcttcagttacggggcgttgtcattctgggggaggtggaacgccagttcccagagctcttccatcgccacttgtgtttgaggtcgagtccacttgctaaacaggtcccagaccaacgcaaatccgatccgtgcattccgaacaggctgatactgagaaggagcctgcgaacgtgaacgatactttcatggcttgtacacaagtggcggatgttcaaatatacgtttgattccactatacttgcagtagctttcttcctcgtcttctgcgtggaaaagagcactctccgtttactcatctcacaaagacccaaaggactctctgcctgtggttaggggcatgtgttccttcaacaagacccatacggcaagttatcatgcttgcagtgtcaatctgacaacagcagaagcgagactctctgcagctcgcacactctgccgttttcgtctcacagacaaagcaacgagataacaaagattccaagtatttgaaagactccgtgggtcatatggaaatcgagggcaaagggacgcaagcatcgtgactacgaactggcgtatggacggccttagagagttgccgcatctgtttccggaaagtgaggaagccggagttgagtgctgtgcgtcagattcccgacggcatcggcaacgaatgcttttcatttttcacgactgatctttcgcacagcactctcaagggcgtgctgaaaagctgcgaattaagcgggaagcaagtacgatttccatgggttctcggagctgagcgtcgggaggcaaacggtccattttgagacaagggaactggaacggtggattcccgtgtcacgtgtagagtctgtcgagtactggctgaccttaacagtcgccggcgaacacgcgaaaaaaggaccttgctctgatgatctatttgcactgaggcaataccttgcctgttcaaagaggaatggattttgcacttatttgagtgctgtgcttgtcgtgagactcgagaaaaacgcgggactctgaggctcctgttgatggcctcgaaagtggaggggtgacggtaggatcacaggaagaatcgtcaaaagatattcccacagcagggcgactctgcataggagcgcccgaacgctttccggtcttgttcgacttccgtcgtcacattcagtgtcatttgtgtcagcaactacgaccaccaccggctaggagtattgaaaaacgcgtctacctcgccgctctctttgacgggtcttttttgcctgagtgtctcgtgcaggccatcggcataaggtaggattcccgatttcctccgggtactttggtctcataccagcggtagaagttaggttctgtagcacatcactgaatctcaaccactagatgcaggtacacataagtggacattgttcagcatgtttaatcgaggaggtggcgtctagaagacacaacgaaggttcagcttagagcctcacaaatatgcataatttaaagtggcacggtacgtacgttgtgaagttaaggcgttacatctttcggagaggtttccaagcgttacttcgaagcttagactgacgcgaatgctccggcggacacatcgtttgtcttttcacttaacttcttcgacaaagggctttggtgcctcgtctgtggttcgtcgttcgtgtcagggagccgagagacagtttgttccctctctaccatataaattcgtgtgaatatatacaccagaactacagtgtgttactcacttgttcctgaacaggattcagctagtaacggtaggtcatcatcagaaatgacacgtgagctggggtaggatcgtctggacgcagtttgttccctatttgccatgtcacgtgtttctacagcaaacctacagtgttcaggctgacgaattcagggtccaaaactacatagcactcaacagcgactccgtcttccagcttccaaataaactttatatgaaaatgagcgcatgtaaagtcgtcgtgaaaaagccatgaaacacggatagcgagacaccgttgacgagcacgagaatcggtcactcgtccgacacctccagattccgtgaatttctgtggcaaagctcgtttctagaagttagactcggaaaaaccccctgttctgcaaaaaggcgacacccgcgaaaacacgtcacatgttggatatgcctgtcccgtcgaaccccctttcgcaggcttgtgcgaggggaagctgagagtgtcgcgtagtgttgaagtcgacgaaaagtgggagcaacaccctcctcgttcgaccttcagtcgcacccgttacattagcaattatccttattatacggtcctcagaaaaacgcagcgttctctgtcttggcgtgacagcccctcgtgtgcggaggcaaggggtacccatgacccgggaggcgtgtctccgcgatgtagctttttctcgggtgcgtcgagtgtttgcccttcgcagagtgacaaaagctcccttaccccaaaggacttctccatgccagcttctggagaaggaacgaaactgggagaaggacggcaagatcctagccaaggaccttttcgggatctgagccgaaaggttgagagacagccgcatgcgtgccgcacccccacttcctcaaactcgaccctttttcggacgcgtccgaccggcctatccgtgcgccgaccccgggaaaacgcgcctttctggtatataccgaaacaccgtcctttgagtccttcagtggaatttctcaggtgtgtgcattcttgagaacccagggatccactcggggagcttgggggacacgacacccgccaagaaaggcggtttcttctggtgtcgacgcgagtcgtcagcgcggttcgtggtgccctcctctcgagaacccttgcagaaaagtgtacgaaggctcgaagttttggagatcgatgtgttgcctctctgtcgcctctcgcctggaccgtgtcggtttcgagtttgctggccccgcgtgcagttctagcggagatgcgagggttttttctgttgtctgagctctctgcatttgagcatgaggagtccgaagctgcggcatgagcagttgctattgcatttgggtttgcggaatgatgctcagcccagcctgtgacgagcctggctcttctcgtgtccatccggccgagtcgtgtggtttctccgtgtacagtctgccgacttgcttccggtgaaccgtggagctcaggcacgtggaagagctgtttcca

SEQ ID NO: 2521 - DNA, 2312 bp, Toxoplasma gondii
  source 1..2312: mol_type = genomic DNA
gagagcagcgaatatgccgaagaagcaagcgaagcagacggagaaggcgacagagagactcgcgcggtagaaccgagagaggaggagagagggcggcggagacgagaagagatgacagaggcgtgtgttgccagagtcgcagagagcgaagcccgcgtagagcagcagcgcgcgtgaaaggaaggctgtcggagtcctctgagaagcagagctgagctacaagcggaagaagacgcttgaagcgacgcaggaggctcaaacagcttcgtcaaatgtggaggaaccggcagtggggcagtctttgtgcagaggagctcctcgcccgaacttccaccgcgtcggcctgggcctcggataccgaaagcaagccatcgaggtgtgccagagacagaagacgcgagaagacgggagtgaaggagagtgccagacatgtggcgagcggatgttaccctggggcccagtggctctgctggcgcgtgtttggggtgttggaggcctctggaaaaagaagaaaaagacgagccagaaagacagactctgcttctgtgaagagagcagcagggaagcgcggtttttttcgcggcgagtcgtagaggaagaaggaaaaggcgggcggagcgaagacgactagggaaggcggaaaaacgaggaaccggacgacggccacaaaacacatgggagttgccggagtcgacgccccgcaaagggcgctcagcaatcgcaggtgccacggttgccatgatagttcgagaagtttggaaacggtggaagagcgacggaacgcggcagccagttcgcgcaggcccgactgcgtcagcacagcaaagtctcgggtgagttccgcgaccgtgcggtcggaaattggaagggaacacgccaacgagggaagcagccgcccggcagacccgcaggagacaacgaggcacagtcgaaactcagcaggagacccaacaatccattcagaagagccagaactgcagaaatggacgtgcaagcgaatcgcgtgtcggtcgtccaaaccgccgggcgtgtatgtacacccgaccaggtcagcgctcgatgtcagcaaagacaaatggcttcggcattttctagactcggtgtgccacagaacgcagcgaagtttacgggagagaaggagaagcgagaaagaagaggccgaaggaagggacgggagcagaggacgggggttgtcggaagggtcggcgaggaaaaggaaacactgtgtgtccctgcagagcctatgccgagcgaatccgttcgacagacagctgcatcgtgtaccgtcagggaaagagtttctctctgctttgtcgttggtcgcgcgaggaaaaactagtgcagttgtcagcggaaagaaaagagttttaccttcttctcgtggactcgtacccggctcacgcgtgcatgcatgctcatgttggatatggagaccaccttcgatgcttctgttcctccggagctgccgacgaacaatttcctcagactcttctctcttccgtcgttctttcgcctcagtcctcgtagaacgacagcgacacaaagtgcatgggctgcagaaaactgtgtctctcccgttttcccgtgtgcctctgtgtggctctgtcgacagtcaacaacgaagactttctctgcaagcgtcgctttccattaccttgtatcgacaggcctttatttagggcatgtgaatgagctacgcccttagttttttcaagcgaggctgtctctcccgatctgtttcccttctccctccggcttctcttgcacttgtgcggatgtccccgttaacgtttctagatctctctggtctccgacttttcgtgtctcaacagttcgtgtaaactcttcctttccgtcacaagctcgctttcgttcacgagttacgagtctctcgactggtctgagtctctgcctccccccctgtatgaggtttctttcccctgtggcttcgggcctcctttcgagcaccattctcctttcgttcttctgtcgcgcgcagtctctcttcttcctttcgtccatctgtctccgaggcttttcttgtgcacactgcaaaaattccctctcttctccttctgcgcgcgtttttctcgtctcctcgcctctttctcgccatcaagtgaatgctagcgtgcttcgtgaaagtccgagcactctcttctccttccgctgtgtttcctcgctgctgtgcctctcctcctctcctcttccttctccacaacagtctctttctttcctttctctcggaagagctttcttcgctcttccgcattcgccgggcgaaacgccgctgtaggcacgaacacgagcga

SEQ ID NO: 2522 - DNA, 1651 bp, Toxoplasma gondii
  source 1..1651: mol_type = genomic DNA
acggaacacgtctatccaatgacatcggatggactgacctggagaagaagctccaagtcctcaggggtggttcggttttcgaggcgaaacgcgcgaatgatctttttgactgaacataacagtccgtgcaggaagggcagtacgagaacgcacaaatgagcgtgaaagttccaacgctaagagacaagtgctcctgcgaatcattgctgcgaatcaacgaccgtgaagaggcggagaaagagttaacagcatgcgtaccttccgtgcaaggggtgatctctgaggggacgtggagcacccggagaagctcagactgtctctgcgtgatcgacaagagtcctgaaacaggtggctgcgtgtcgagaatgagcgagttcaaggcgcaccagtacctgccaggaaaagtgatggagggaggaagaaaacgtgggtgagccgcgaggagccaggattggacccgacacggcagtcgcaggctgaagacagaatcctgtgccgtgaggacgtcttcaaagatgagccttcggtccttaccatattggctcgaggtggaaattgctttccttgcaaagagcctccagctctttgtagagcggattgtttgggtccgcccgcactgaatgtagcgggggctctctcaggagtgtttctccggcttgactgttaccggtcgcgtacagaacccgtcctttgaactcgtgaatctcgcatctaagaactccattgtgattttccttggcgtagttgttgataaggtcgacggttgaagctgactccatcctaactgtgagacattagacgctctaaggcgaaaaaaattgcacgcgcagacgagtccgaaaagaagtatgcagctttctgacactgaatacacagaggcagcaaacggtacgatttgctgttgaaaggtctctactcaaatcgaaacacagttaaagaccgctagcgctttatcgtagtgtgtacaccttgattagtccgttgtgccgcaaacgaaaggaacgctagcacactcgagaaggtgcctgagctgtacgtgatcagcagatgtttccagtgacggacaaacgacatcctgatcatggcactaatgtggtaggggccttgcagtcctagaaatagcgaatgaactgaagcaggcactccttttcttgagcgagtacttctttctatcaaggatagctgcgcaagtgcatgcgatgcagtcactcagcgcaccgctgacatgcaaccgactgggactacacgtgagacagcgtatttcctctcccaagatggcgttccccagaggacaacttgtttgtattctgcgcaccatactgattggatttaataagtttttgtgtagcagctttgagatcatctgcagaatttatgggagggactgcaactacatgcgttgacatgtcaactggaggcgcatcggcgatgcccaagtcctgaccttcagttcgtaggtcgaggactggattgcacgaggcgtatcttccgattcatggtttccttttccagcctatatacttgacgggtgcgacaaaagctgaaggatttgagcgtaggatgcggtttagtttccttttgtggtatgcgcacactctgcatggtgtaatgcggagctgaccaccggcgtcttccgtgactgacctacaga

SEQ ID NO: 2523 - DNA, 2110 bp, Toxoplasma gondii
  source 1..2110: mol_type = genomic DNA
cgtacacctcttctacgctgaagaagaggctaacgcgcggaaagtcgggggtttcccagtggaacgcgcgacacagctccaggtgaaacagtgtgcttcctcaccgatttgcgaagcaatcgacgacttcccaactccacccttccccgagagaaccatgaccttcctcttgacgtttctcaaccgatccgcaacttcgttcgctgccgacttctgcgcaactgccgcctccgcggccgcgccgccggcacacaacgagcgattcggacagcctgcacatgcgtcagacttcccagcgtctgcactggaaactcctgggcagtcttctctctcagcagccgccgcatcaaattcagaagcagaagaagcagaaggaggagacgaaggagacgcagggggaggaggaggagaagaagaggcagaaggaggagaaggagagggagaagaaggagagcaagaaggagaaggagaggaacaggaaggagagagtaggtttgttagcgatcggataagagcagtttggaagggacaggagcgacctcgtttgaagtggaggtaggcgagagtgcccagagttgccgctgtgcctagaactgcccctgaggctgcacccaggaggaaaacgtttcttttagaaagtgcgaaagggtccattttctgggatacgaagtggcgaaataaaaggaagaccgagtaataaagaaggagacgattcgtcttcaaacgggaaacggagaccgagatcgaagtctctcccccgaaaagaggagaaaagagagagaaaaaaatcactcactcacgctgtgcggaagacattccgaggtgtacatacacctggaactgtaggaggttcttcgaacagaggttgcagaatgaaggactcaggaccctggagatggaaagaaagtttgttctccacggatttctcaggtcgaggaaaacgcaaacaggacttcttttcgatcgacacctgtcggagtcggtgtctgtacagccgatgttgtctcccaggagggatttgcagtctttctgttcccactgcaccgagtttagagcccagagacgttgcgtatttgaagaagtcggcgcgccagtcctcccgtctggcagaacgagagctgtccagtctcttctggagcgtcaaaaaagaaaaggtcctttcctcgagagaaatgtgacaacaccgaggaagctctcagaaagggagagaaggtgatggagagaaacggaagacaaaagaagggaggggaagaaaaaagcgagaaggtccagggcagaaagaaaatatcttttgatgccgagagtcgctggaacaactgcgtcgccgactctactagaggcgtcaaccgcgggagaagtatccgaagaaaactggaagaaaaaaaagagtttttccctctggatttgaacgagaaggcgtcgattccgcttccgagtggctttcattcttccaggaaaagccgtctttctgagttttttactggcatcgtgggcatgcagccgaaagcgagcctgctcgtcttgcgcagagacacacaagcgcgctgagagttgcgcaaaaacgcgtgtgtcttcgcttctttctcttcgctctctgttcgtccacttcggcgtgagtacgttcaggcggaagagagatttttctctaacaatcaagttcccgacccgcctgttcgagacgcagcaccaagagcgtctacagccgtttttttcgtgagcctctggtgtgtaaaacttgcggacttctttcgtccgccagctctcgccagcttcttgtgtgtcggcggttcaagtcactgatttcttctccttttctttggagcgtcctcgcgtctcctgtgtccactgcagcttccccttagttcgtgaatctcctccgtacagaagccgcagtcgccggctgtcggtgaggtcgcgtcgggtgtcgagaagtctttccccgctgcctctctgcgccgtcgtccgcagttctccgtctcactcctgcctcctgcgctgcgaggaagccaactggcaaggcacttcgtctctgcaccaagagagtgcctccccgcctccagagtcttgctcccgcttgctgtcgagaacgcgcgcgtccgctcgtctaaaa

SEQ ID NO: 2524 - DNA, 3018 bp, Toxoplasma gondii
  source 1..3018: mol_type = genomic DNA
atgaccgtttcagcaatgaaaacggtaacagcgcttccatacatacaaaatgtgttgtgtatacgaatgcacctgaaaatacgtatcaagtcgcactgttgcgtttccgacaggacataggaaagggatcgactcctcagcgcacggacgaagagataactggcgacatgttgccaccatcatccccaaaggtggtttttcaagactcgcacaccctgagctgttcgtgtgggagtgtagatgcaaacttatggaatcaatgtagcgtcacagaacccgatggttgacgggaagatactcggaagctgtacctgcaaagaaaactcattgtaggttccttctcctcgtttcaatcctccttcccccgtttcgttcttcttctccctctgctggaacaagacgcaggcctcggccatagcgtcgtatgccgctccctcattccatgagtcaaacagcgaagaagctgaaggggtcgaggccggtgtctcccgatatgaataacagctttcgtccagagccatggggctaccacaagagcactaagagtctgaagaagcataaaagggcaagccagcaacgacgccagcaagcagacgtagagtggaggccgacagtgaacaatccagggaaaaaaacgaggcaagccgaagccaagacaggcacaaccacttcggttgcgcgaattgatggagaggcgcggcagtcgagcggcaaaaaacggagacagaaggacaggaggcaaacgcgaatgggactgaaaaagtgaaactaggggccccggccctcagcgcaggaatttaccttcacagggccgtttcctcattgcagctcgggttcgcggttctcgctgtttcccctctcgaaattgttgcagaaaacaagagcgattaaccgttcctttcacccattttcactctgagacaatcccttgggttcgctatatttcctccttgtcttttactcgctccaattcccacatatctgggtgggcgccgaagcgcttcggagttgttgccgtggccgtggtcgcctctcacgtcttctggccccttcggaggttgacacagtggcgcttgcataaaagtagccttaaacggccatcatctaagggagacaaatatacagaatggacgcgcctctgggcggcacgtctccttctgtatttctgcatgcggaatgctcgagaaatcagcagacgctcaaccttgcgactctctgcacaccattgtgtgtggtaacttgcgaggaaccagcacgtttctacagcccgcttcgaccttgtcgacgtgtatctcctctctgttctcttcatcgcgagaattcttaagtttctctcgtattatttgctggagaggatctctgtacacttacgacatcatgccgagtcgggcctctgcgcgcagcgtccccagcaagtgacgcgagctcctttcacgagccggatgttcattgtatttcgccgcctcgcaaacgcatcgtgcccagaaggcataagtcaccaaggccaagcattcttttttacgaaaggaaactcttgtggcaactggactctgctgaacaccctcggtgccacttgcaagtgctgagcgaggaagaacaactccatgggcgttgctgtcgagcgagacctgcgtcaacgcacaacgcaagttgagaccggttctgggtcctctttatgcaacaagatcgctcattgtgataatgtctggatgacagtgacagaactcagctgtaaaggcaagtgtttcctttgcggaggagagtgtctttagttgccggcattcctgtctaaaaagccgccgtaacgtggctctgcgttcggcgggaaggggcagcagcgcgttgctgcacgggaactgaacaagtgaggtcgggcaggcgtttgggcggccataccagcagcgcgtaagaagtgccatatttttatctgtaggaatgaggctctttctggattgcctttatttgtcgtgtgcatcttcatttgcgtagggaactccttacagttgaaaacgtctgacggtgcagaagaacaggaagtcatagctgtaattcaaagctgtgtgctccgctccatattctgcgcttttagctagaaaatacaccgtgatattggagcgaatatctcaaaccctggagtagaaagatgtacaagggacacggcacaagagaaagagatagctttgccaggaaataccccgccaaagtgccgtctataatgtgtctcgatgtttcaggagtcgtccgagggtggcagctcggaaaggcgcacactcactttttgctggctgtatgcgtacctgcagccgttccgttttgcatattctcatagtcaacgaatcatcctctgtgcacaccagcaaaagtgagctttctcattgtcgccgtctgcctgttttggaaacgagcgcgtttctccccttgtgttactgtggaggaggaaggcccgtgttcgtatctcgtcgtgcttgctagtcagcacccttcgctctgcgcaaagcgagacagttggcctccaacggcagacagacaacagatggcaagacagcctttacagcaattctgcaatttgcgttcactctttcaccaaaaatccttctgccactcttcccactagtgaacggcgttctcgattctgccggcgcgtgtgccctccctctcttttgagcatttgcacgcaacgagtgaaaatagatgtggagggcgaaaccgtctgccccagttcagacagtaaggcaattctttgcaccagcaaatattcttgttcgttcgctccgtcatcttccgttcactttcttttgtcgtctgtgtctcattaggaggagtgtgtgtttccgcagttacccctcatttcgttgttggcggctcttgcgcgcactccccgacctgccgaccttcctctctactatcgttcggtctgcctcccaggcaaatcttacattctttcaggtgaaacctttccctccgttttcctctcctactccctcttcttcgcctccctctccaacgaaccgtgcaaca

SEQ ID NO: 2525 - DNA, 4470 bp, Toxoplasma gondii
  source 1..4470: mol_type = genomic DNA
cgtttaaagaggcgaggcaacgcagaacgcgcgctacggtgtctagacaccggagatgcagactcggggcttccgtacaacgttccagcgcctccgacgccccgagaggttcgcgggaccacgcagttccacttgctgctagctcgacgagaagaagaagtgaggaaaaaccgatctggtctgcagtcggagctgcaaggtcttgaactgagcgacggaagccgccttgggtcgaaaggcacttcgtcgctgaggttcggagacgagaagactcggcgaggaagcgagggagcgaggggggatggaggacccgggagcgaagtccgagtgtaggcggaaagccgagcagcgcctagcctctcactcccccgcgcgtcctcccatctcttcgactgaaaccggctcgggcgtctgcctggtgaagaaacaagtgaagagaaggtggaaacaggtatgcgcgtctcttctggaggatctgagttgagtcttttcgccgctccccggaaatccgcgccggcaaaagagtgcctgttctctctcccatccttctgcggggtgtctctcgcagaagtcgacgggtgcggctgtctccacctggccgcttcttgactggcgagaactcgacggctctgaaaggggaacgagtcgaaggcagacatcaaaaaggtcttgcacgcagagcctgacgggtggccggatccgttcttgaggccgcaagggggtaaggactgaacggccaatggcgcgtttctccaccactgtgtctccagtgaagaagctgcgagtgtctgtggagaggcatgttgctgcggtgtcagcggggatgcggggtagcacagggaatgtaagtgccattttctttgcgggtaaaggacgaaggccgaagagtctatcggcgagcctcggctcttgcagggcacagaggcacccaggctggttcgcggccgcagatgcgatggaactccgacggtaaatctcccgtttcttcgaacgagactggcacaaagggtaagcgaaggtagcgccaggcaacggaggtcctcgggagaacctgcctcggtcggccgccttttgaaaacaacgcccgggaacggcagagaagaattgacacggcgaagactgttgaaggtagtctccggcgaggagaccggagtgccgtgtaagagagggaagggaggcggtttgcctggagaggacaaagccagcgaggcgcgaaagtggaaacccacaccgagaaagaagagaccgaggctccggtggagtgacagcctgtatctacaagacatagaccgacgcagtccgttcggaggtgaagcgtttgacgaaaagaagaggaagtctgaagaagtcatgagatggaagagacaaaagacgagggcctgtggcaggacaaggagacaggagacacctgccagtggggctggcgatggcggcaaccgggctgtggcgccccccgaaaaaacgggggggaaagtctcccgtttctgtgacattatagtctcttgccgactcggcctccctctggaaagttctgagctcgtgcgacggttctgacaagcagctttccccaggcagacgtcgattgctggcgacgctcgagaacgaagacacgcgcagggcccgcgaacatgtcgggactgggttggctgtctgcgcgtgcatgcagaagctttggactgaaaaaaaatctaactatccgcgacagaagaaagctgaacgtggcgcttcaaaggcattttcttcgttccacaacaaatccttatttggaccttcatgcatgtaccacgcagtgacaggatacttccatgcaggatcagatccgccgtctggcgggacagtcacttttttgtgtcaggaggaggttcggcaagttgtgtcagtgacatgttttggcggagaagaggcaagaatcctcgataaatggctgtttagcaaaccgagaagctccagcagtccctctttcaactcgacgtagatctgtaggcggcttctgtcgttgccgcacccaacaagggagggtattgaccggagtggtagtccgcaggaatcgactctggaatgccatgataatccgcccaagatgcgacgcatcaagtatcgattcctcgaatcttaacttgaccgtgtccatagcttttttagaagtctgcaggattccatatccttctggagaagctcgatgagttgggatgggaaaagtgaaccttgacaggggtgcagaggccagaaaaaggtctcatatgtgatgagatggtcctcagtgacgcatacagtcaactaccaagacacagaaacagtgtatccgtgtggcgacgtcatgcgaggagctcagaacgatgccagacttcttggacgaaaccccaatggtacgcagcaataggatacttcttgaagtagggtccctggcttatgagaagaagacctctttgtatcgatggtcgccttaccggtattgtcaaggttgcagaatcaaatcagagctgatcaggccaccgaacgcctgctgatccacaggtccatgtgcgtctgcgacgttagtgtccgaacgctcttcgttgccgaggaaacactcggcgtctgttgcattcctggaatgctgacctcccaaagaagaccgcgagccacccgcgcaactagcaggaaagacaaaaccgtcgcagatatgtaaaagcctactgccggagtcgaaccgacgaccttccgcttactaggcggatgctctaccaactaagctaagcaggcgttcagatgccttgtgagactctgtctcttgcgaggctccaccaatgaacgtaaacacccgattcacaaacttgcaggcacgtttaattcaatcagttttagttgctgtttcgccccttcgaatagcgtggcaccgtctttgggtttacaacttactgcgaatgtgagacaggcaccttcgccgcggacgtgtgctcccgcaagttatgaggtacaataaatgcagaagacattaacacctgtacggggagatggggagtgaggctgaaagcattcttttctttgcgcagcactgaacagcagacgtcatcagccgcggcgatctggataaatgtttacctctacactgagcgggcctataagactcccactaatctcgctagtttcttttgtcgtcgagcagctttcccgtcctgtactgcaccgagaagaaggaaatacagcgaatcatctcaaaccagtaccagcggaaaagcagtacatcttaaaataaagcctactgccggagtcgaaccgacgaccttccgcttactaggcggatgctctaccaactaagctaagcaggcgtgatagcagttcgtatatgagccgacataagcggatagcctccattgccacgaaaaaacattctcagggtttagaggctcccctttccagagtgacttgaaaacgtttcgtgtaccaagttattaattcgagtttttccgcctgagccgcaacagcgaaggatagaggatgctcctttgcatgcaacccgtatctacccgatgaaagttgggtctaggtcaccatggacggctcgagcacagatagcagtgcgaatgatgtacaagtgtgtgtttctatcctaatccattctggcagtggtcaatgatatgtcgctttttccgtcgtcgaggcagatacctcctttatctcctttccctggtctgcgccttttaactgcccgtaacggcgtgtcgagctcacgcaaaagatcgggggacaatgcgagtatctactcgcgggattggttcacttggtacacaacctattcgctgacaagctcgtgagtcccaggaagacgtgacagacgtcgacatccactttctgtgtattctagaaccgcgcatgcgtgtctggtgaccacttgtgtctcgtcattgtacgttttcggagcctccaccccgccgttttttttcttttcaatggtcaacagacacacctgtcttcccatttatgttggggagcgcttcaaagtctatcttcgtcgagactccagtgtgtcggctttcgagtttgggggtcctcgcgtacggcgagttcaccgtgtacaagctgacacgcattttcgtccccgtaacacggttgacggttccgttttccttgtcatgacgccggcgatgcatgcgccttgaagggagagtcggtgtctcatccctttccgtgtggtaagacatctccagttccaggtcgtggaagactccggagtcgtgagccaaacgccaatcgccgccggtggcaagggcatttcttccgtaagcgtccaggaataagtccaccgcgtgcatcttctgtcagctcatcttcgatccttcgtacggttcgcactgccattgctacttgcggttcactaggaaggagagaaaggcgtgaaagcacgacgtctcgctggtgggaaggacgcgagttatcgcgcaaaaacaaccacggttccttgtctctttcgaccagaaaagatacccgaga

SEQ ID NO: 2526 - DNA, 3071 bp, Toxoplasma gondii
  source 1..3071: mol_type = genomic DNA
atgccactgtcagaccatgccagaggtcgacccgcggtgtttccagcttcccctgatggcgacaagaggccagatacttaacgaagcatccgatgcaaaagatcacacggaagaaaagatgtccccagctccatggtggccgggcgggagactaaaaaacagtgcattgctcaccttgcaaggaatcatcctcgtccctattcacgacttctttgcaaccaatagctgagcacacgtcgcctctgctcttgtatcctaggcgcggagcgtcaggatcgagtggcgcacgcccgccctttctttcgtgagatgcctgcagcgattctgcttccttcgcctgtctttcactgtgtgctcgttttggtggaggcggactctctatcacagaagacgacccgtcctcttcctttcggtcccgacgtctgctttttttccccttcccggtttggctccgagcagaaccggcgctcgcattcgacgagaccgtcattgactcttcatcctccgactcttcctccgttcggtccttctccgacttccccccacgtccacctcttttcgaaacgcctgttgactcctcgacgggcggctctaccttcgccgagccttcttctttccaactctggctcccgtgaacactgcccccctccgcttcatcagcggctgcagcgcttcctccttcatcaggctcatttggcgcctcgcttctttccgcgatgccgctctccgcttcactattcctggtgtgttcttcctctgctactccggatccctcaccttgttcttcatcgaaggcgtctgaagatgacgaattcgcagttgaaacacttttcttcgaggatccctgtctcccggcagatatctgggaccccttgtcagataccttcttctgcgagctgcttgctccctttcgagcgaaagcttcctcctcctcctcttcctgtgattcactttgactgccctgctgactcccctcttcctgtgactgagactcttcactggcattcgcgagttcgctgtctgcgccttcgtctttttccttcgcacgcttcttgcttttcgactggcgacctttcccaagttcgacgaaactcaactggccttgagagtcgaggtcgcttggcaaacctcctttagaaccgccaggaacgcgaaaggatagttgcctactacttccagcagacagcgtcaccgggtgacccagctgcagagacacagcttctgaaagcaaacagaagaggaaggaactcgccaggcccagcggtatactcgccattggaacttgaatgatgaggttgaagaacgactgagatgtcagtcattggacccgcccgcgtgatccaagatgccactacgcctacagcggtacttcagctagaacggtgactggcaccggacagacaaactgggaacttgagtcccagggtgtgccttcgagtacaggaaacggttgtgtaaagtcaaaacgatattacctttcaaagtgcagaagcacgaaactcgaagagagcagccagcttcgttgccacggttcactgccaaattgtacgatcagtcagatcaccaaagcagggctgggccggaaggtcactcgctgactcgcagccgaaaactggacagtccttgtgccgaaaattccacaacttaagatacgactcccacaagagaaacaaaaacacattggcgcaccactggacacaaaactaggtcggggacctcgattcagggagatgatggtattcaacaccgaactctgttgcggtcccgcctagcgcgtagcgagtcttcaagacacgcacggttccaggcgacacgaacaggaggaaaatcaagattctggctccggtatatcccaacctttccgttgcaaacacagaagtactttgaaaatcgtcagtcgtggagttcaatgaggaaacaagtgcgagttttccggtttttccccttcccgattctccaccgtggcacgaccgacccggcgtcagcgccaaacagctccaagggggctctctgcatggcgacctaacggggaggatccagaccccagaatgttttccagtttccaacacaactaaatgcaactgagtgtgacaattaaatacattcgatgcatcgcgtaagtggaattttatgttccctcattttctctgcttttccctaacttgccgcgctcgccggaactcggcacgcgttttgaggatgtgcagagttgatgtggcgcgtactcacaaaaatatatcagttctcttgtcctgttgaagatcttttttctgtcactgaaggtcagacatgatatatcttcttggtgatcgctgattatcgtctctccagcgtcacttccgtctcgtaaaggcacacctgtctcgaccggactccagttgaggaagatcccttgaagggtcttcggaggttcctcttgtctgcttcagggttccaacatttattttgcttcgcgctgcttatctcccagatttttgtttttcctgttaacaattgcctgaaataagcttgtctcgtacccaccaggaagcacctggaacgactgaataacttgcgaaactgttgtttcttccaggatcggccagagtcgttggcggggcggccgcgctggcgtcaaaaatcacttgaagtaacaccccccttcttctcctctaatacttcgctgttcatatctccagctccctttatacccgattgttgctcagattcggccacaactgagtttcgtttgaatttgcgcgtcgcaggaagcatttcctctctaggctttcgctagaagtcgctgccggactcagccccttgaaacccgactgtttcaagcacaaggacgacacagagtgacctgtcagagctgaaaaaaagttcgattactccttaggcacgtgcacattcaagctccctcttaagcaacagcatcttggagacttcccactatcgcacgacttttcccgccgtatcgctttttgttctgcgctctgactttcgccttcttctcggatgtcttccaacaagttattggcagacgaaggtaacggccttcttctgcatccccttcagcagtctgtcttcta

SEQ ID NO: 2527 - DNA, 2023 bp, Toxoplasma gondii
  source 1..2023: mol_type = genomic DNA
tattcgttacatgaaggatatgctgatgttaaacgaagcaacgaaccgccacatcaaactacaggttgctggtttggacggagtcgaaaaggaggggcacgctttcgctgttgccttggatccttccacagcggagattgccaggatttcaatgacccggaaacatatattggagggcgtgagggcaggcttcgctcgtttgtacgacgtgattgtccccgacccacagaagaggggccgcggatacgaggaagcattaaaggtaaggaaattttggaatcccacttttgtaatgtatgttggtggacgtaggttcgggtaattcgtcgaagcactatctgttaccgacccggctttgcttctaacgaaaacgtactactgttggcgcttctgtggctgcttcgacctatgtggtacaggtgtttcctacgaatctaccgggcgtaaccgaggctttcacttcatctacttcgtctgtctcttcatttcccttggtgccaccactgttcgacgattcatcggaggtcacaacagatccaaaagagctcgaggactatgttatccgagcggcagccagagagcgggagagacggaatcttctcgcaaatgatgcgaactcctaagcgtgcccattttcatgcaataactaagagggcgagtgtgggagaggggcccgaaaattgcactgctcgcccagagtgactgtctatgcatgtatttgcgtactgtaatatacaaattgtgcgaagttgaatatatgcatgtatatgcgtacatctacgtctccgtataaatgtttcatgatccgatcgtggaactcatttcccatccattttgcaggagggcgagtagtggatcctagaaagcttcacaaataacatactcctacaaatgagtgatccaatctagtgtgggtatagcgcatcgactactgcaggcactagggcacaccccttcaccgacgactagcagcggtgacatacaaagaattgcgaagtgacacaagtcgattcagcagagaagcgacggtgtcagagcatcttaccactaaggtcacaaatcctatttgtagggacgtcagacctcgaagaagtgtgaggcatcactaagagcccggccaaattctgatatctgccagtgttgtacagagagccaataatcaaacgtggttcgtagccccaaaattttttctgaccgcctgagacgttataccattagagagcagctggaaatgcttgtgttacatgcgagaagcagtgcgcatgtcaatttttgtgcatagtgctgtcgccaagacagacgtaatttgcctacgctggaggcgcaggactctttaatccgcactttagcgacgggccaccctgatttccaccgttctcatgaaaactgcaccttcactgaaggtttgcgctgaaagtgtcatccagaatgacaggttgacccttaagggacataatgcataaacgcacaccatgagtgcatcgcgactgctttcaatcaatgcattcgctcagtctaatgtttatccatgaaggggacgtacaatgtgacgattttgtctgcccacaggagaaaatcgctggcgtgactcatgacaacatggaagccagcttcacattgcaaaacgtgcctttctggcgcaaaaaaggggtgcaagcggtccccgagttccgcagtagtatacgatccaactgtgggaaactaaccgcaatacgtagtaatccagcattcacatccgacacagcatgagcaggccgtgcgcatcccgttcacagcccaaagagcatcttttggtccaaggttgggaggcgattcgacgctgccgcgcgtagagagatgctgcgttttccgggcacttacagacaagacgagcgtctatggatgcgaatgttaccgccaatttgtaactctactgacgagtctgtcgattttcgtcttgtcgagagaaggggcgttgcttttccgttgtaaccgccgactttcttttttccgaagaagacagttgtaaaggcagacccaaaaa

SEQ ID NO: 2528 - DNA, 1574 bp, Toxoplasma gondii
  source 1..1574: mol_type = genomic DNA
agtaatccactacgtggaaccgtgcctgggagagaagtcaataaccaccaggatggctgtacagctgaatctaatgagcaggagtagtggagaatgtcatccaactgacttggatcgtgtgattttgctcacacaccctcatcctcactgtgtctatcctaagggcacatgggcattcgaactgattctgaaactcgaagcaatcaaaccagagtggttaggattatgagatcactttgttacatctggagcggcgttcgtggccgtggggatgttccaaattctaaggactaatcgcttatcatggaaacgcgccaagactaactctagggcactgtcgtgccgtgaggctgtcaccgggctgccttcaagtacgcgttcataatcatgacacaacagtgtggtgttagcaaacggatgcgtcatgataagtttaatggtatgttgtgctggttactcactttcctctacacagcaggcgccggcgctcagaggtaatagatacgtacgtgcataggaatcatgtggatcgtttatctattgctggaaaccgacaagttggttgcttatcggtgaaacgccgtgaatactatacaatcatgacgaggcaccacacacggggaggtgcaacatcgaagttgaaaatgaggccaatggagcaaacaggagacacacccagaatcatgacgtcgctgtttaaaagtgcggagggtctgtgggcgatgaaaactgtttttcgtagtttccttgatgtttcgtaccaaatttgacaggcagcctggagaccagaatccatagaaatagccacggtgtgcaaatgtcaatttctgccctgtacagagatccctgtgtcggggaatcttacggccgttgagaagcacggcctgagagtttgcacgtgattggggatctttttgaagtttgaatgggcatcgtatggcttaaagtttagacatgtaaccactagtcatctgaccggggaacagatttggaatactggtgccttgttcagaataaagattttgatttcaatgtaagtcgctgttatttcaaaaagtggagtccaactatttcgctaaaattcgttggccgccgacgaaagagcttttcagtgtcgttaaggatgtggcagcagattcccgccatattttcaacatgtgcctgtgccattgcaattacagattcttcgcccttgcctcagccgccaagcttcaacgatgaaatccagtaacaagacagttctttaactgacggtaatcaggggacaaagtgttcgctttttggttcatctttgaccgggtaaaattgttctgaatatcatacgagcttctccagccagagagacatgtgcgcttgcggggtgcgccccaccaaagttgcctgctacccggcttcgctccttccccatttatacaaagtacgtgtgggcgccgtcttctctacacgtgacagttgtagttcctttgcgtcgaaaaacgtcctggagaattgatatacatggtggccatgaatccgatgatatacacttttctgcagaactgcctagccgcgctaagtcatccgttccacagaaa

SEQ ID NO: 2529 - DNA, 1363 bp, Toxoplasma gondii
  source 1..1363: mol_type = genomic DNA
gagacagacaagtgtgcttgcagagatgcagacacagggaagaaggcagccagcaccgggtaagcaattcttcacaggtcacgagtgttcatgtttcactttgtgctgcggacaggtaaatcttgtctctcctcatggcaaggggcttgtcccccttttgtctcaactagcgcgcactgaacacccacgggaataccaggtgagggtacagtgcgcctccggaagaagccacaaagtttgaggcagaaaatgtggaaacgaatagtagtcgaaagagatgaagaaggcaaatgggtgttaccctttaacaaagaagcaaggaacatacgatggagaaaaggttttggaaaaacggctccgaattgccagacagcgcaaaaccgttttcactttagcattgaaactcgtgtctagtgaaagcaagcgtcgcgttcgacgaacgacgaaagggaagactcgacaaggataataaaagagactgcgcccagaaacccagggcaaaacaacgtgcagggttttttcaagaagcagcaggacaaagaaaggagtcgagagaaggcagaaaagaactgttgacggtttccggaatcctagggaaagcaacgggacggagaaagcggaacgaaagggaaacccgacatgacaagcggacgacaaaagacggacactgtcgacaagcgaaagaaaagggtgccgctgatcaaaaaggaaattcgaggcacggacgagaagacatcagccgtcgatgctcaaggaaaaggaaacgacacacgcagagacggccaaaaacacagagttcagccagaaaagtcaggcgtgacagaccgcagagaaaaggaaaactaggaggcgaaagcaacgacaaagtaccgcgttgttccttgccagaatcaaaggaagaccggacgccgtgggagcgccaagaagaagcggactctgtccatgaccaagccgaaaggcgacaacacttggggacaaagaaacggagaacacgaccgagtaactttggcggacaaattaggaggacacacgcgactgaggacattataaaaagctggaaatagtactcgcgtgggtcggtcgcacaaaataaacgttaacgcatgccacaaacactacccaccccttgccgtgtcacgccagcctcttttttgctcgacgcccgctcccctttgttccacacaatttgttatctcattgctccatataccttttcttttttccacttgttcgactgacagccatgggatctctaccctactctgggagtatgagttgcacgcgttcgcctctttgcgtcttggaggttccagctgccgaccgctgagggcggcacaatctaccgcgtcgacaacagcgcaga

SEQ ID NO: 2530 - DNA, 3842 bp, Toxoplasma gondii
  source 1..3842: mol_type = genomic DNA
gtcttcaagaaaagacgctggacgggaggaagaggcagcactatgtcgcttggagagagcattccctcggggcttctgcggggtgcgcagggacagggcgaggagaatgagagactgcagagactcaatgggggggaacttgagcagacgacggagacacgacgtctcgtcgctggccaagagattctctcgaacaaacatgagcatggcaagagcaaagaaatccgttagcgggagacgtgaagaagcagcagctcccagtttctcagggacatacgaagggctggaggacgacccttggccgagcggcgaagtgccgcaggcggccgacaagcgactgctgctcatgagatctgtgccttgtgtgagagaaacgccagagcaactgggagagggagcagaaaggacagcagttgaggaaggagtggaattcaaggaagacttcgagttcgaagaggacggagcaattccgttgcggaggtaggcatccgcaaagatcgcatcccagatgaagatcgtgtcttgaacgtggaactctcgactgaagaggagtcggagccagcgcagaaggaagagctgcggctggacgtccatctcgacgaggtgatcgtagagcgcggtgtcgctcttccgcagaagcgaatggaagatgtgactgcatctccacaaaacggcggactgttgcgtctgcggggccgaagaggctacccccacaagccctcctagagcctcccccggtcctttgcccagaatgtttaccataggagatgcaacaggtttcggcggagtcgggggagggatataggcggcgcgcatgaggaaatcgttcatgagggcgttgaagagagagaaggcgtcggcttcgatgtctgtgggctccgcggaaagcaggacacgaacgtgtgtcgccacattttccgagagggtgtccgcagaaaaaacaggcacttgttctctgacgcaaatgagaaacaagatcgcaaggagctcattcattccctgcttgtacgacacatccggattctgccggctccaggtgaagaggatgcgctggagagccttccgtgtagcgtctcgacagaacagtgcacgatctgcaaaggtgcgttcgacgtctttccagatttcctccatcaagctgtcgttctgctgcttctgactccacggattgtccgctgtcgccgcgagagggtggaacttctgcggatccagcgcagtgagcctcttggtgctcagcttttgttcctctcgcaactggaaatactttttcctgttcacttcgacctgggcagcccactccgatgcctcctccccttccaagaggccgaggtatcgctgccagacgatgcggcgaagaagcggggaggacggcaccgggaactcctcggcgcagacgcccgaagcaggcggcgcctcatccaagcggcctgtcgcaagcactcttctcgcttgctcggcaaggggcgaggatatgtgggagtcaaacaaccgggaaatatccgagaccgtgagcggcggcagcccgtcgtcgtcgtcgagaaaggcgccatctacagaacacgaccccaatccgctctgtgcactcgccccaccttcggaaaaaattgacggagatgacatggcgagaaaaacggagggaaaatacgacggatggaggtgctcgaaaccgaaaccctcgaaagagccgaggaaggaactgcgcaaatccaccgggtttcggatcacctagcccctagccctgtcttccttggggtgtacctacagaagcagatcctaagtcctgctctcgagagcgagtagacgggagcctgtgaaattacgctatccctctgttaatgttttgaggaatgaactctgcttctctccgatccagtttcgtgtctacgctcgagcctggtttcagagagaagacggcattgacagggcgaagctatctcagaaaagtgtgtgagaagagagtctttttggtgcagtagacggaggagaaacgacgcaacaacgggaggaaacaatcaccaaatttgccgccggaaggaatcgacacatgcggtcgcacgaggaaacgttcgcagcgacagcaaaacagttcctcagtcaagtgccacaaggccggctcccttcacacaaagtccacgacttcgcgacagttttgcgccggtaaaaccaacctcggcctcacgacgatgtgcgacttccgcatgacctgacatgtatatttcgaacaacaacggatgcggaattttcggcgttctgctagctcctcgtcctgggcaggttcttcgtccgctgtaggttcggtaaccaacagagaggcccttccacagacttaaaaaaccggataaaacatgaaaaagccacagttgtagctgtgcataagaccggatagagaggaaggacaaacgttaccgtttaacaagcggacaagccagttacatctgcaggggtgccttggggcagaaacaccacagaggaggcgtcaaggggggcgctgcttccttgctgcacactgcactgggagttcgtttctcttccactattgaacatacttcccagcataccattttcatatatcgttttatcttaggagaatgctactgaaaacacagaatgtttctttccagctatggctcgtctttctccgtgcctagacacatgcctatacccgaaacatcgagggctctacggtgcagggaattcacggcttattttcgaggcttggtgggaggccgccagtctccgaacacttcatgtctgctttttctgttaatgtcccagattccaggacattctttccatctgtccacaatcaaaattgcctcgttttcgctgagcgactcgcaggggtagagaccgtgtcctatttcacagtaaaccgaagcgagacagctcaagggaagtgtagctgccagtttgtttagtacgtgtaaagatacggtaagagtgatgcagcagatagtggatagggagttagtgccaaagatccctttctaggcgatactgggctctggaaccacaaaccaggaaatctgttgcggtgctcgtcccctgtaccccgtccgagcctggctgaaccaaagagcgacacctcggaattcgaagcacccgctagagaggaaaacgcagttatacatattagcggacttttccgctttgtttcgcccgccacatcgcgctcgtatttctctcgtttcggtcactgatatacaggggatccgttttgttgatggctggcaccacgggtagcccgggtgtagaaaaaaaagtaaatagaaccatagccagtaattgtatgaactgcataggaaatcgccacctcagcagaagtcttctcccaaagcacaaggctgtttcgcgcgacagcagtttgagattggacccagaactgtgctctgcggttgatggcgtgtgatgcaaacgaacgcacggcgttttttcaccacagcgggaaattcctgtactgccaaccgtgtcagaaacaggtcgtctctaatgtctcttagataaaactggatagcaatcacggaggaattcatacgacgctgtgcatcagtgcagtgattttcatgtcccactaactgagtggtttgtactgacttcgaggggaaagacagcgttgcttgtccaacctcacaacatatatagcactactgccggaaaaactggatcgggcatccgaaggtaggagatgccatatcggttcgaaccgtcttcccacaggtaccaatgtatcaaaggaacatcccacgattcccggtgtccattccgttaattttatgtccagcgcatctcctcagaaaggcgtcctagaagagtaacccccggatataacgccatgacacccg

SEQ ID NO: 2531 - DNA, 5022 bp, Toxoplasma gondii
  source 1..5022: mol_type = genomic DNA
aggctggaaggtccagtgctactcgaaatttgtatagagggtagacagaagaggtgcgcaaaaaattgcgcgcatggttgtcaagcggaatcttagctggctttggaatacagattcaatacactgtagacagggtcgagaatgtgtcagcaaccaaaataggtccgaagcgaatggaaaatgatgacggctattgcgtgtacgaagccatcaccaaagggagttgtgcgcacatatgttaggtaattcacaccaccgctgttttgctatgctcgttccaaaaaccgcagtgagtgaggagagtactcctgtcagtgtccgtctcagcgcccgaggattcacagtaatgattaatgctactcacctccttggcgccaggtacctcctgaggcacaaagatattgtcctacgagacgggagtgggttcaaacctgtaactagacataggaaaggaggccgctcacttcagccgctgtcatctcctgtcttccccatattgcaaacgcatatcgtctgatgtagagtcattttacctcaggggacaggcttgtcatggagctgagaactccctcgtacgacgcgccaagctcatccggaaacaagtctaaatggaagcgtggttgagaaaatgctatagctgctcgtctgtcctcttaccgtcatcctcgtcatcgtcatcgggctggacctcgagagtcttggagccaagtgtgtgttaggcaccactatcatcatcgtgaagcagagcccaccaaaccagggagggtttgtcttgaaaattggctagcctcactgcctagtccagaggaaaactgtcctggttcgtttattataactccacgccgttgactcgagtgacgtcgtacctaagtgtttcttaccacttttcgtcttcacactgttcacctcaacagctacctctaatccagctgtcagtgcgacaatcaaaaacagtgtccttctgctgaccttcattgtagattcgctcactcaactgaacacggctgcgttggagaagtacgatgcttcctattatgcagcatcgtggaaacattgaggcgtgcgatggtggccggacagtgtacgtacacaaggaggcaaacaacgcggcctttcagctgacagtgctcacttctaaatgaactgaaaactgttgttggcgcttcctgtgttgataaccgtggcgccaagatgagacctttagtgcttgctgcctgtgtggcggcagttgtcatagcgttcactcaatcagttcaatgtctcagccacgtgcccaagtgggttcatgatatgcgggtacagcgtgtcgcagaactcaaagaacagatcgcgaaggcgtccgaagtaagtgtgggctgacgtgtcctttttcaacggacaaagcaacgacgatccagagctctgccagtagttttgctggagttgattctaacgacattgcccgcctagccgaagaacttgcgtgccttcaatcagaggaggacaggtagaagcgtttttaaatgtgcgctatatgattcacgctaagtggtaccaataggctgcaagatgacaagcgatcagttgctctttttgccactatcgtcatggtagtcctattcttgctgttcttcctcacaacggtggtgagttattcctaccgatgaaagtgcatttccgatcgccttatgtccttcatcagcacatggatgaagcaatcaaagacgccaggtaaaagcctacctcaaacctagtcaccagcggcaccattccaccgtatcatgcagcatttttcaaagcgggcgggcagatctacttcatcttcgcctctgaaactccagcccatgctcggcaacagagagaactattcgaaggctgcagactgcagtacttgagtggttctagtcttgacgttgcatccctatatgtgcatcgactgggtattcaagtgttggatccggaagcagcttggtaagcaaacctcagattccgattagcgatgcacctaccgctggacaatgccctaaaaacatcaatgctcgagcctgacacggaacagtaacgtagaggctatccgttgctgagttatgtgtatggattctgctgcggcgaacatgagcagaattcgaaacccacaagcggaattcagcagatattctgaatgccaactttctattcgcacccgtatttctggtacaattattgtcgctccacaatgtggcatagttatggaatgtgcagcgtttacaaagaaacacacgttttggttcctctagaattttcctttgcgcgggtatttgttagttgcctggcaccacagcgactttgtccggtgccacgatgtccctcaatgccttcacacacaagcaacagagacctgcgtcaggcttaacgatagttgctgttaggagcctcaacctttatgacgaagtacagaagccgtgattcagtccctggcataattcgccgcgagcaggtacctcacgataaatgtgcagagatacgctgctgtaccggtttgaattgctgcatgcaatcccacagccatccagaagcaacagagtcagacatgtttgcttttatagctttgcccctcaactgaggaacgacagtccagcttcgttgggttgtggctcgtcaccctggagaatcttctgacggtgacatcgagccccggtgccaggaaagtaattctctgatgtcttccaatcactaggtcgccaggttgcacccgttatcctttccagagctgttctgtatatcgacccagtggtctctgggtgtgctgcgttgatgatcagcgacatgtacctgccataatggatgatgccagtccttcatccgctactagccatggaaatcgtggcttgaagacattaattcgggacgccgaagcgaaagagagcccgtttactaggaccgtctacgctttgaagctcgagtcatctggttgttctcggggggcgggccagccccaagaaaatgcttcaccgcagaacgccacagtgcaaggaatatcttcaccacagcgattggtggcctcacagaaaccgtctgcaggcgacgagagacagaagactttccgatgtcggtctgcactgagggatctgcgagatttctgcaggagaaaaaagcatagagccgaaggcaaggcaaggaaggaaagcgggtaccagttatattctttggtagagcaacaaataaatcctccagttgcaggatcgtctcacggccactactgcgtccatggtggaaacggacagacaggtgactgctccagagagatggacaatgattcgaacataaggcgtgcagctgcggtattactgctaccgctacatcacaccacttcttcccttagccgactcggctccgtcacattcgaccaacgcgcggcatcggcttctactccgagttcgccacctgaacatccatttccgtgtcttcagccgtgccgctctacatcgctatcaaaagatgttggcgtccgccaacggtgcaaggacgcagccacgaaagcaatacctagtcatgtcaccaattctgaagcaatttttcaggtgtgcgaggagttgaggctgctacgaaaggagatccagcagcatcagcggcaaagccaaccacccagtgtggcaatcggcacacctctcacttcgagttgttgcccaatgccacagcctgactgtgggcatgcgtcattttctgacggcactgcaacagtcgatccatttgccaaagaacaggttcagtccacgttcgcgtctcagaggcaaaaccactgtgcctctgcttctccagggcctgatgtgcagtcttaccaatccatgggtaactgcgtgaatgctccgcatacacattcttttgctggtgggccggtggggtgccctgccactgttacagtgagtgtgcccgaaactcagcagccagtgaacacgcagaaatcccgcgaagagattagtcaggcatcgtcaccgcaggaggaaaccaattctaagagcccccgcttgttacccaaacgtcagcaaacgcccgcgtcttctctacccttgaggagcagatctagatctgagaccgcagactcattggtggcagaccgctctttcccagtcccgaataattcatgccataatgagttatcgtccgggtcccggtcaccttgttgcgttcttcgtcggacaaaggagagcagttcgcctgggaacgcagcagcgaagcagggggtcaagaaagcaatccctgacaaagctgtcgtcgttgaatcaagatcatgcaggcaaatttccgagctacagcaccagcctcaatttgcctatcgaaacagtgaaccacataactccccacctccgtgtgcaagcgcgttcgagtgggggtcctgctcatggcgggcagtctcacggccctccagtgaagcgtcttcgaatgcactttacagtggatctttatcaactgactctaaaaatttcgaagactttaagccactggaagtagtccagcggagcgcagtagagaaaattaccaacatcgaatgttgtgcagcacagtgtctaccgaccgaaaatcggcttcttgcaagcatgaaacaggaactcccagaatcaccgtccgcggtggccagagcacgagggatacacggaaccgagcgcactagtccacgccacagcacttgtaatcctggtattttgtcttccgccgagaccacgctaggaatgacagcaatgcgagacctggtttccgtacaagggatgcaaaggcaggagcccagccacgtcagatgcttagtaacagggcctggtggcaacagtgagagggcagactctccgcaatgcagactggtagaagacacctgtcccgtatgttcaattatggtgtctatcggcgaagtgtctttgtcggagtgctgctactgcggaaggattgcaaaaccttcaggcaatcttcgacctgccgagagtcgggtacagaagtctcttaatgcagttggcgaaattaattctctgaaaatagctggtggtaaggcgatctcgagtcaggtgaaggcagaga

SEQ ID NO: 2532 - DNA, 4076 bp, Toxoplasma gondii
  source 1..4076: mol_type = genomic DNA
gtgtactgaacggcttctttgcgcgtttcatcgctgctcgacttctctcttttttctggattcgcgccccgaggacgcgcagcctctccatcgcctgcctctcgtcttctcttgggcggcgcgcaaggccaccgcgatttcgtctgtgtcgagtctcccgactgcttgccgccgccaaacgacgatgtatggcgcagcgcggctgcccttgtccgggcgcgcactgccgatctgatgagtccgacgcggagaaagatcgaattggaagcgcgatgcacaagacgaacaccgaacgccgatctcgctgtagaggtcagcgaaaacgcagacattttgagagcggggagtttccctggattcgacgcagaagcgcgacacacggaacagagctgcccgtcagaggaaagctcgccgattcctgagagcgcgagtcctcagcacatcagctggcggtgcagaggttgaatgcgttcccggccgcaggggggtccgaaaatgtgaccgagagatccctcgcgttttaggactgtgcccagagtcagttggacgaatcgtttcgttcggcagttcgagaacagtgtagaagaaagagagctctttctctgccgctttagcttgctacgttgtccccgcttctccgcgtcgtgtcgactcttgtcagccgctgccgggaagtagccgtggaggcaccgcggtgaattcttgtgtccggcaggggagctctgcagaggtgctcgttcattcgggctccgcgctcgtcgaagcatcttctttgtaaagaaagcggcgcgagtttgttgcttgttgactgccgtcgaaagacatccgttctctcgtcgctgcaattccgttgttcaccggcatacaaggtggacaggaggaaaggttttctccgtagtaaatggcgtgtgttcggtgatctggcgcgccagaagccggggactgtggcagatcgcggaaaaaaagacacccgactgtcctgtaggaaggggcttgcatcttactgtttgtgcctcctgcgcagaacactagaagctggtgggaaaaacggctttgtcgggtgtgaaaaaagccacgagttggaacgtctggggtatgcggccgaagtgttgagagagtgtgtgtgtggagtgtattggagaaggagagaaacctgttccccaaacgctttcaacatccatttggaaagcgcgtcgctgtgttaaggtgccgcttcagtgtctgtgtcaaacacacgtctcactttggaagcacgccgttctcccggctctggcgactccctagaaacttaccgttcggttttcgggcatttcttcgaaacgcgagtttacccgcaacatatgtcgggctcagaggccaagatgctaatcaggcagaggaaacgcggcttctgcccgcaaaccgagctgcttttcggcacgtatttccgttgttgagcacacacatggtcgccggcgggacacctagggtctcttcccagttctcacatgaggaagtcgtctcaccataactccaacgatcacgatgaaggcttcacagtgcctatcacgatgtgcagcttctaaatgtttaatcgtaccgcttcaccccgaacaggtggacgctcacaagccctgaaggaagcttacaggatcaatttcgactacggaagctgtctgtccgttagtaaagcatagagatcaagtaccattatggaaatggtctgtcggttagtaagtcattcggatcaatttcggttatggacttgattgtccgtcactgagagcacagaaccggatggtgcacaattttgactagttgctgtctgcaacggcctaagcttctctgagttttctcattttggcattcgtcttgggtcctgtagacaatcacttaatttgttccgccgccaattcgccattagcagccgtgttttcacgctgcgccatctccacggcgtccactccggagaacttcgatcccgagaggaaagctccgagaaacaagtagccaaccgactgcgctataggcccgtcacgccgctgtgaaattgacggcggccacgaaattacactgaaatacagttttcgcaattgctcttactagccctttgtagtttttttcaacgcgccgtaatccaagggaaccgcaagttgtggaggtcacttgcaggatccggctgcccttgctattcaggttgggaaacgctagattgtcacctgcggcggttcgcgcgtggccgcgcttaagagcggggttttctcttcatttctgcttgggaatgcctgctttctgtctgcctgtgtctgcttttctactgggtcatcgctggcgaatcgtttcgcaggtgttttccggcgatccgcccccaaccacgggactaggaaaaggtagcacacagcaccgcaggccgcgtagatccttcccgtgcatggcacctgttgctgcaccccttcagtcgtttggtatgtatgaagagagccaagaaagagaacatgagagcggattccccctgtggtttttcgagagacgtttgttccttctcgctttctaccccgcgttccttcacgtgctgtctcagttcagggacccaattgcacaatgcgctgtctgcgaaaagcttacgagcggggccgctgtccggggccgcgcgcagtatttctgcttggccgaaccgcctgagaatggcacagtccgtgtttctacctcggcgttagctgtttctctgttggttctttgagtccaccgtcaagcgcgttagataaagtgtcggcggagaaaggtctgtgcccgcgacaatgttcggtgttcttatcttcacaatcggttctttccgcagtttctgcagtacgcagaatcgaggtttctacgcgaccttgcatggtcgatagagacaccgcccaggcagcgaactaaccggcgccaaggcttttgcggccgtgaattttctttgctcaggcgtttcccctgcgaccctctacacgaaggaatttctttcgctatgtgcccctggtgacagccgaagtcgcgtaactcggagttttgttgcttgccagagtcgccgagtccgctctgtgcgtgtagtgtgagcattgcgactgttcggcgcggcgcaagagtccgttacgccgcctgctcctcttcttttcttttcagattcggacggcctcaacacggatcgtgcgctttctttctcaaatcccgcctttctgccaggtcccttctgttcaggacctcccgtccccccggtctgtgccccgctgaacgcctgggccgcttcgctcgtcacaggattgggcatgtgctgcaggggcgctcgacgcacattcagtcgactttctgtgcgtacacattgcattgtgtcggtcctctttccgtctgcagggcgaactttccgtccgccttcgaaatctggggccgcgacgccttttcgagcgaccttcgtttcccgcgatagccgcctcgccagcagccccaactctgcgggtgatgtgcccttccagctgggtcacgtctgcgcgcggcctgcatgcggccttcacaaacactcaagcggcggcgtccgagtcatttttttgaggatttctgcgcagcccgagtgacttcggtctctgaaacacacggcagtaggtgagcttctcccgcgcccccgacagtttgccgtgtctttccttttcgcccggacctcgtcgggttccaggtcgaccttgcgcaggcggcgggaacacgcgctcacgcgggtgctctcgacgacgactgaaaaaggcggcaaaccacctgcccacaacgaaattcagataaaactgcgcgtcaggaaccgatgtgtggcggcctttattggcggtgacggaggcgagtgcgggcagtgggactgccggggccactcgagtcgcgtaaagtgacccgccgagcagccttggcggaagacagtcgtcacggaggaaaatctgcaactttgtgggaggccaacgatctggttcgagtgtggagttctcacaactgtttctggcgcaaatcgcggagcggcgcagaggcacaagtagctgaaccgtcgcgcaagtcgcggaccggcttcccccaacgacgaccaagagaaa

SEQ ID NO: 2533 - DNA, 4052 bp, Toxoplasma gondii
  source 1..4052: mol_type = genomic DNA
gctccaacacagtccgagcggcaggtgcaccaaggtggaaaaccacgaggtgcaggcaccagtcgcgcgctgcaaatgcgggcagccctgtttgacgacgacagcgaggacgaagacgacagacttcctccgtggccacactcagctcagcagtcacattccatttcttctccttcgccttctcgggcgtccgtcttccgtcgcgacagcccctcgctcccgaaggcgacgggagccgctggcgaggcaggcgcctcgaagagctcggtggagagagcgacgagggtgtcagcaggcaacaaagtgtggactgaagaagaatacgaccaattcgttgtgaggaggtttgagacataccaaggcggccggcccagtcgagcccggggcgtcgactcacgtcttgcgtcggtgactcggctccaccaaaaggcggcagaaatgaggaccaagatgctcatgaataatctcggcgcaaacgacgacttctttgacgaagatctcaaagtttagaccagagatgcgagacacacaaatagtgggacgaacgaaatcggtgtttctcaaggaggggcaaccatacggagaatgaagcagcggcgaagcatcgttgtcgtatccgttttccttggaactcttttactccatgctgctcttgtccttcgcacacttgcacaccgatattgtctccgttgtgtgcctttgtcgcatctgtttcattgttttcgcactcgcttcgtcatatggaattacgattcgtgtgtcttctcttccgtttgccccggtgctggagcaaccagaacgtagtaacagacgtgcgtctcagaactttgcatttcccctgtgggttcctagcgttttttcctccagtgcttctacttgaccttgccactcctgtgtggtgtcaggtggctttttttctgtgttggcatttactcctagtgcctgtgtcagtcgtttgtattttcgttgcctttgctctcctgcgtgcctatgccgctttctttctgtggagtgattaaaggctgtttcatcctgcctgcttcttttagcgttctccagtgatacgcacagaagcaaaagccggaggcgggaacgtggtcacccatgattcatgccgtacaccaccgttgtgatgaataagtctccggttgttgtgtgctcagtatctccaaatactagtgtaagatgtggcattcaagagctttcagaaccggtacaaactgcggatacacgctctgtaacatctatgatagtcgcagctcttctattcctcccggtatctatcttcgaattcggttgagaatgagtgaaccatggattctgactgccgctttcgaccattgctaccgaattgcggggtcgtccgtttctgaatttttttcatgcacttaatataccactgacatggtgggaaaaagttcatcgtgggcacttctaccaaggacagattgtttctcgggcgtgaactgcgctgaaacgattcgctttactatcaaacacaaaacggactccggtcctgaaccccgtgttgcacctcgagattgggctgcttcctcgtgcaggatttccgtatttggttcacacacagtgacacggcaattataaggcatgaaccgtggcctgaatcatgttgacatattgtggcatttcaacaggtttcatgaagtccgtttcgtagccgtcgaaccatggacgaccgtcacaggtcaggcatcgcggtcttaaacattggatctttactttccatttgcacgattttggcgcgtgtgtgaagcggctacttctctttccgcgcactcacggatgttgtgaacgcaaaacctgtgtgttttacttgtttctctccgtcaacagaaatgtgccattctctgtcgtcacttccacggatcagcagcagcctcatcataaagaaacagatgttgctgccagttgaggctgcagctaggctcccttttccaaattgtatcgtgcttgggaattttccgtttcgagaggaaatctgggacacgtatagagaaagattttcttgcatttgcaggatcgcagacgagtaaggtacaaagctgactctacgttaaccccgaacctcgcctgacccctgcgaatataccgtgcacaaaatcatccgattagcttgtttcgctccctccccggcctggatccaaacattactccgctagagagaaactggtctacccttggttttcgtgtctcgacctccgtgccacaaaaatgggacaagcctgtcgttcacacggtatgttttttcttcgcgttgcaacctctcgatagcctttcatcagccttgaacggtcgacgttttgtcttttttctgcatatttctccacggaaaagccttgtctgtctgctaggtttttgggtgtctcgctgacttgccaacccccgatatgcttgagtttgtgcctacgtgctgcgtgtgcctgtcgtggtggctactgggtttgctcattagcaactttctttcgctgtgaggtactagctgcttaaggcaatgaacgcaaaatcaccagaaccacacctaacagacctgttttatacttcttaattcctttcaagctgatgtaaatgcaatggtggaggcaaggaagcgacggtcgacacacagtacatctagcccgcatacgggcggaaggtcaccaagaatcgagtctgtccgggagcggatttggccctgtgaaaggagcggattatttatgcaaccttgtcgatcgcgcgcagctccacatgttccttacgttgtccgtccttttcttccgttttctttgtttcctccacctcgtcccttctcccatgtctcgcctgccccctctgcgccctcggtcgctgccaggttgctgcgtgccgggtccctcgcccccccagcgttgcccaggggcattgaacagcatctgagttcccagcttgcctccgcgcacctgattgccattttgaaagaggtgtgggttaaaataggatgcaccgagaaattctcgactataggcgagaactctgaatgtggaaaggtgcacgacgtaggtaaaggtctgtgtgtgtatgtgtgtgctggggcgacatgtgtttgcttttctcggtttgttttgtcttcttcgcgtgtgtgtgtgtaagcaaaaagtcagccggaacggaaacgggaccacctcgtgttgcgacgaagtttttttatgatctgttcaatgctgtagacgccatttgaggcacgattgcagtgcccccatctcccgtgctcaatgccagtcccaagtgactcggtttcacgcctgggacaaatggggagctttttgtaaaaaggtatgcctcccctctcgctcttgtcagtttcgttttctcttcgttttcctacactcagtatttgtacatcgacttcaggctgcgagcgacatatcacatgtgttggtcctgtgtggtgttgcccacttgagtagggtcaccctgtcgcaggcgacggtcgccgccctttgtgtggtttttcgccttcagttgcctcggtgctatcttttgtagctcgtgtttcaccttaagcgggtgctctttgcaaaacccgatcccgagcttttgccgggtgttcgttacggtgcttgcctgtttgtgacctgcctcgtcagcgcggtgtgtgtgcagcacctctgtgtggactgtatcatcttttgagcactctgtgtgacttccctatttgacactgcatttcttttttgaataaggacgcaacaggaagaagacacgaagaacgagtcagagaatgtcacttgttatctctcggactccctccaaaaagcatttttccgtcatcgtcaaacacggtcgtcatctcgcttgactacctggagatgacgtagatcggccctatgcgccgccagccgtaggttgactcgcctgtgtcgattttttccgacttcttcgtagcgacagctcctctggctttttgatgttccgcgcagaatcgcctattctcccttttgttcctgttttcctcagggccgcggcgcgcgcctcacccgtagcttgcaagagggggaaacagcaataagcccgga

SEQ ID NO: 2534 - DNA, 1832 bp, Toxoplasma gondii
  source 1..1832: mol_type = genomic DNA
atcggcatcgtactgcagagtttctcatggtacagcaacttgtctttcgctcagtgacccactgttgtaaccctgtggctcagctggtagggataagtgggagtttgcattaaaagagaatgcctgccgccgcacttgcgcagcgtctggacgggggggcgtatctctactttttccgcgtgtgtcgtgagcccacagtaagctgatccagccagcagcggttggcccacacttcttttgtgtacacatcattcaattatttctttgggaaacggtgtcacgaccgcgtatgtgcatctgtccttgcttacagtataggcccagtagatgtgtaaccggggggcggcacaggagcggctcagtttaaaaaagtgaagttttgcttgtgctggcactgagatatgttgcaattgctactcgaaaacggatttctgttatgctgctaggttcgacgcagaaatccagtgaacacgcttattcaatgaatgcggcaactgtggaatgggcttaaagccgtaccagtgcagcgtacggagggatgttcagtagtgaccacgaggatttaaattgtcaattccgttgggctgtatgcgaaaaaggttatgcagtgcaccatgaatgtgttgaagtgcgcacatgaactcattgcactccaacgatatgtgcatttggtgggctgaatatcaatccagatgttccacgcgctgtttcagtggtcaaacagctacgttcgcaagtttgctaatgaaaaagaaaacgtagtggtagggtaagtggactatcgtcaattggtcacgtgtcgatatgtgtgttgctggagtgatcgtgatgggctgctgtaggcgtatggcactatcctgaagtaaatttgactgccagtgttttgggctgctggaaagactttacatggtacagaagcaaccagaacacgattttgacaagccatattggcaagcgattcccacgccttcaggtagtagtgaatacaacacgaccactctccataggtatacccctacagtacgatatgtcagtcagtgagcctgtgcatttggaggtgagttagtacaagggatttttggccctccaatgcccagggcaagtctgagaatcaaaatctagtgatttgcctttgattctcgtttcgtcgttctagcttgcctggaaaagtacattttaatagcggtcagaaggcagcaggggtgggtcattacgcccagtgaggtttatcgcggtcatgaaagaagcatacggtcaatccttaaacaaaaagtaaccggccgctctgtaatggagcaaaatagcgtgaaacgtcctctccctggtagactaaggttggcgagctataatcgtaactacatagctcatgagttgaacaacaagggtacagcaccagactgcagactaagatgtgaaatttaacgaatgatcgagcactattgttgcagaagtcgttcacgggggtgcttctatcttctttgagtactgacagtcacaacgagtgagactgagaaggtggagggcgcagcatgcaaggtggtggtcgaatcgttgcaaatggagaacgcgtcccgcaagcaccaaagtgtgagtgctgcgcggcaaaccgtttcgcagaaaaattgcactatagatatcaccgacgaatatgtagaagaaccactgactctcataataccgaaacatccagagcactactaagacaaacgccatggtaacaagtgctgcactaggagctggagcgtcagcgttagtagcgtgactggtctcagtttctgcattttagaacgtaacacgggccgatacggagcacttgtagcactatacgaaca

SEQ ID NO: 2535 - DNA, 3002 bp, Toxoplasma gondii
  source 1..3002: mol_type = genomic DNA
aaataccgcccagaatatagccgccgtcggccggactagaacacctagcgccgccaacagcaacgcccacatcaagtacactttcgaagtgaagcctttcgcagtgttcgagctcccatcggaactacagtcgtttttttccgtaggtcgccccgtgtcgagcaaagtcaccttcgaacggacgcgatttctcaatgcgtaaggggatccgtgaagttcaaaggaacccgcttcgtcgggtgtcagatcgagggaacacgtcggcgtccctgatgcgcgattgtgcactctggaagacacttgaccaaagaaaacgaggctccacacattcaaagcagcctcgatacaactcgagtatgtgcgcggcagacagaagaactggaaccagctgaagacgcaacagagaaggacgtagaaggacagaaaacttggttcggtcacagttgtgcctcggacggtcccccgctttggaaggctcccttggagagggtaccagacttgggcaagttggaatgtgccgtagtcagtgaagccagcgataatgctctgcatcacacgcggagcgagggcgatgacagaggggctgtcgaggctgaaacgaccgagcagccagtacagacccgcaaaaagagcagggtgaatgacacttcgcagcgcgatgcaaggctcccattcccatgtaaggaacccgtagccaaagacaaggtggtgggcgacctcgctggactgccagtgttcgtccgggttgaacgacgagtttaaaaccagcccgttgacgatccggaacgcaatcagccccgcaaggatccacctgacctggagtgtcgcgagcggcttcttgagagcgctcaagtggtgcaggcgactgtgcgaatctcccctgtttcgcgaccgctcacgggcgagttccccttccactgacaccattttcctggcgactgcttgacactcacaagtcagatgcaagctagctgctccgtgccgacagcatcaagacacgtttctaaggattccccttcagatcaatgcacactcctcgtgaatgcttaaaaaggcagtttcacaaacggggaccggccactccggcctgtccggcggcaagtgtgtcgagaaaatgtggcaccattcggaaagatcacctgaatttatccgcaggtgaaacagcccggagcacgaaccagtagcatactcttggacaagtaaggatatacggcggcaatgcacaaagacgttcgtcaaaacactcggtacccaaacaccgcaccgtgtacggatatctctccatgcggaggaggcaaaagccggctcaacaacgaacggctggcggccacaaaaaaccacgtcccggtgtcaactgttttggggtaagccggcgagctttttcaatcaacagcggctcataccttaaaaccaaggacgctgccgactgtcgactacagaacagatgtgcaagcgccacacacagtggttttgcattggagaggtcctttggacccgtcaggccctcaccatccgctagagggaaaaaactccaaggaagggtgggaacgaggaagaaaaagtgacaagcaatggaaccgcgatcggaacacggttttggaaatggacaaagcagtcgcgggcgtgtcccggcggtgtacatacagctaacgagaaggcaaggacgccgcgaggacgctgtcgatctcatcatcgaaaagaatcgctccgatggtgactctgtggcacttttttgtggtttcttcaaggacagttttctcgagatggactgtcctgtcattccctgcatgagtcctggggtacgctgtgctgcaacgtgcaacacgctgaaggcgccatcgctcgattgttacgtcgtgtgttctgtctcgaagtgcgactcacccgcctctagtcacagcgtcagctgtcgtcgtgtgccatgctattcttccgatgttccaaggaaaagccgttaacttgcaaaaaagctgatgcgtcctacccgtgcccacctccgggccgtcagctcgaggtgcagcgaatcctcgtttctcattcgcggtcgagtcgtcgaccggtcttcctattgtgtgcgctatcgagagccgtgctgactaggggtggggaaacgggtgcacaaaaaacggttcctgagtgttttgtgtttatgaaaggcagagaaacagctgaaatcgacgtatcgatccaagcgtttagggtgtccgacccgccctgctgaagtggcccacgccctctcgagcattggccgtatattttctttgccactcagtttcccccacaaaccattgccggtgagcaagacttttggctgtcgactccccctcgtttcctcgtttggacggtagagaggctttgcctgtgttttaaaccagaagcaaactccctcaactgcgccgcacttctcccgcagtgtacttgagatcgaggtgtgcttaaagcattcagctgacaatcgttttgtgtcgtgtgcattccgaaaagtgccaacttgctgcagtcgccctgcgctgtggacgaagctgcgtaaagcggggtggccacgctttcttgcacgtaggccagcctctctgtctcacccctcacagcggtcggccgggcatgcaagatctcagcgcgggggtgcaggcacacaggtggagagcgctgtagggaatgtatggggacctggatccaggctagtatacgaggcgggagagcgggtcgaattctcgacctcctacttgttcgcttctgcattcttcgtcccgaggctcgtattatttttcgagggggcactactgcgttttttcgtctccttttctccctcctgttgccgcctcctctctcttctgctttgctgtcaattcgtctgtactctctgtgctgtgctgcgttcgcgcattgtttgcggaacccccgggaagttttcgggtgatgcgacgtctcgttttcgacccggaacggccaatatttctcccttttcgacgtggtttgacggcgaactcagcgagtctctaaca

SEQ ID NO: 2536 - DNA, 1757 bp, Toxoplasma gondii
  source 1..1757: mol_type = genomic DNA
cccactttatagaccgaacacgaatttgctctggcgattgccgctgagtcgtgtcagaacgttagctgcaataggccagttatttttccgggtttgttctgttctcacatcgctttttgttaaagtgcgcgtttcctctgtttgttgggggccgaaactgatattacatgtctcgtcagatccgactgcggtatgtttcgcgtttcctgttaactaattaaccctttccgcgcgtgagcactcccgttgtaccctgagggatacggagggtgccacggtcgcactggagccaggagcaacaacctgcttgagaaaagaattgactctcaagtcgtctttaaatggtgatagaaagtggtagtcggatagaacttccccaagtctaatgacgtcgccaaacatccatctggcatgtgatgcctctttccgccgatctgcttctggtgcacaagcggaagtatgattttatctagccctccggacgctcgcaccagtgtcacgagtagttattagcaaggtgacgaatcttttgttgttcatgaatcaacgttctcacgggtgtctgtgtcaaggtttcctattcatctcgcgaacggttcagagtccgtttccaactcacccttacattccacatttttcctaaactagcactgctgttgtggcatctctagaaacatcgtactgaggaatcgcgctcatgtttgagtggatatatcgtcctgaagatggacactaggatttaaatggaaataccgtcctgaagaatcgcgcttacagcctgccactcgcacacttgtttgtatggcatctgtctgacgttcctcacgaaattcctcctcgctaaccgtggagacacgaagcagacattggtagcaaaaagtgcttccgttctgttgaatggaacactgacacatgtgtccttgctgaagcattcccttggtcgctagtagcggcacgagatggaagctgtgtctcagctccacagacttgtgtagggacatgtagctgcggacgtcgtactgacccttcctcgagtgtgtaggcccgagcaactgcagtccacgtgtacgccgaaacattcagtccgcaactgtgccggcaagcatatcttacagttccaagttcgggtgaccgtctcctcatgaaggcatcagagcccgtccgccacctagaaagcttcctcactgccgacttttcacagtatctgtgactatacggaaaacgcggacgtggcaccctgaagagtaatgaaaaaccatgccaaagcattcctagacgcatcccaatcggatgtcgatgtctgaattgcatgtgacagaggtgaaaagcacagctgttcttcagaggctcgaagatgtgaatcgaagtcccgttacttgcatgcatcaaaagcgcaacagaatgccagtaagttgccgcgccactttgtgggcgtggcaagcgtcgtcgttgcgtggaacattccgtcgaaaagacgcttgagatctggtacatacgccgctgtaaacgtcctcttccttgtgtgtccgacgacgcacccagacaccacaaaccacttctactgttttcttggccgtgaagagccttcctccacgaacatcgtccagcgatttgctccgtgtacccaccagcgctgtgcacgcgtcattgcgattcaagaaacgaggtatctgcttatcgattctccccagtttcggtttcagaaacaggcttccacttacacacatcttccaactggagtctcgccggcgaaacaa

SEQ ID NO: 2537 - DNA, 1338 bp, Toxoplasma gondii
  source 1..1338: mol_type = genomic DNA
aatgatgcttgatgttatcacgaatacagttttgtccaagaggttctttccgtcgagacgcaggcgttctcgagttctcgagtggcgcaactgtgctcttcaggcatcataatggggcccgccaacgtgcgagctacacattcagagatatgcaaagccttgcaaataatgtttgtttctctcgtcactatattactcatgcggcagttctctagttggagagacgtttaagatgctagcgactattcaacgtgtgcactgcaaatctgtagaggattcgtcgcagttcgatatacaacagccaaacaagactaccactgccctgctgtttaagaaaagattttcttgaagtctgtcccatattcgtagatggagtgtacgagtaaatgaccactcgaagttgcgctagcaacatatttttctagatcatcgacaaaacgttgcattacgcagccaggtctggaagcgccgtaaaacgtctgcccatccctcgtacaactatttgcgtaaaatgcgcacgtgttaaaaacgtggtccagatgagcgtcattgcctgccgaacgccaaaaagatggctttggggttagaacgtgtaactaaattggatggagatagtccagttttgcgacgccacgtctgggactttcatgactgttccagggccccctgttcattgggagagcgacacgtcacacgaagctaaagcgacctacactcaataacactggtttctgggcaatgtgcatctctgcgtcgccgatggttgattagtcacggataacagtggaaggtcgaaaaacaaggtagtccgcgtgtgctcgtagcagtggctggctgcgtggcatggaggcgcctggctggacggtgactgcaaatcagactgtcagatgaatcggatgttgaacgacgcgctgcacagccaccgggtttttggacttctccgtctcaattctgatgattcccagaggcaaggcctcatttacctcagatcagaagtgttggaagccaaaagacttccactgaggctgccgttcaatcggtgaccattctgtgcctttttctggattcgacccagccacgtcgtccgacgtgtttgacattaaggaatatcatggctttcgttctatgccttgacagtagcgcatgaagtccgcagcaggaatttcaccctgcccccttgaagtgtttgacgggctacccgtgactcgatatccagaaaacttgtttcacagttgcaccaagtgaacagatactgtgacttcattgtttggacaaactcttgcctgacccttatctagctagagggttactgcaggagcgggtgttagcgaaacaaaa

SEQ ID NO: 2538 - DNA, 2459 bp, Toxoplasma gondii
  source 1..2459: mol_type = genomic DNA
gagaatcaattcacgagatccacatcgacacggatacttcgtgcaatttccggtctttgtggccccttgaagatgagcaagtccagaaaatggattttgcccctccttttttatcaagctcgctaactttcagtttggataacaagtcggctcgctgtcgtaggcagtcaatgttcatacgcgaggggtaagtgtagcaggagagaaataatgcgatccgtcactgtaccacacacgttgaatttcgttcagaggatcacatttaagtgcctgcatatcgatgtaagagatcgtttgtggcccaagcgactgtctctacacggccatctccctgtttcttatcagtaagccaccgttaacacatcctgcatctttcctatggaattcatgtctgcgagtcctccaacccgataaacgaccatggttcattcatgcacagcttggcacagtagacctattcatgatgtttttacagtagagaattcactgcggaaaggatatgtgacacacagaactcattctacactcagaccacgcgtgtgttcgtgtgcatgcgcgccgttgttgtgtagaaccacaggatgcgaaatggaaaaccgtgaagcaagcccgacaggagcaattcaagtagaacccacctcgtgtgtcttgaagaatttcttcttccacttcatcatcttgttcagcggtggagtgggatataagctgtcgaggtacgcttgccatttcgcgctctttgcccagtcgtaagacagaaatgcctcctctgccgggctcagcccggttctagccgaagcttgcgacgacattattgtaaactaacaccgattttaggtgagaatcgtcagcaggccttcggcgttgtctcatgcgttagtaggaacgcctctgataccggatgtgctatggcgcaagccgtgtgcttttttcgtgtgtggcacactttatggcacggcaattgaaaacctctggggcggcaacggacagagcatgcactgttccctcctacgtcgagagaggaacccgcaggcgaccaacgtacaaagacaaagaacgatttccagggactgcgcacactttctgcaaatttaggtaagcggtgctgcaatagggactttcgcgatactagcagctgcatatgactaggccactgagcgtaaaagcacgcgcttgttaatgggagacaacaaaggggatgcgcaacatgtcaaggggccaggaaacaaggaagatgtcggatgcacatgccccctgagaagggaccagcaagaccggcaacaactcaaggatcccctctgttgcctttgcatccaggcgcaggcattcgtcaaaagctgtcttgttcgttctcgaaagaaaggagactgtaaccttcagaaaaccaggggccagcatggtgacatacacgagatcacacttttcccgatgaaacggcagcccagaaacagacgggcttcgcaaaggtgacctcgagtggttgatcgcacgctggcgctgctagcagcgtgtggcgcctgaaccttgcgaaaacgcctcatggggctccgcgacgagcttcgttctgtctgactttgttgactcgtagaatatcctttctttcaaaaaaagataactgtatgttgctatcaagtcaggctcacggggtagacggctataacgcgagatggtgcacaaagagcgtctctgcaagcagccgcaaacacgatgtgtatcacaaccaagacagaggctgcaacaatcgggcagcagtgcttcatttctggatcatattcatctgtaaatatgactttgcgtcaataaccaagccagctggttgtggctgtgcttaaaacaacaacgatagcgtcctcaatgcacacgaatgggcctgtaattgtgaatacaccggagtttgttcctccctgctgaatacgcatctttgcggtaggcgttttacccctctagggtatcattgtaacaaggaagggaaaaccgagacttctgtcctgacaaccctttgtacattcacaaagtccagagtgaaaaagaggtagttcaaggcgtgtactctctagccgtcttccgtggcattttaggaaagagagtcccaccgagccatgcccaatttgctgcggtcacggctacacaattttgtctgcagtttgttgtttgaaagccatggcttatggacctctgaattatcccagtgtctagagcctcgttttggcatcaagcatacgacccagacgtctctgaaacggatatccctttttcgtcagcctcgcctctgggtcataggaaagctgggcgtcggtccttcacaactgctacatctcgaagttgtgttcaagcacccggacagatgcttgcagtctatctaagcattcaagcggcataagaagaaatgcccaggagtatgggttccttttacagaggagactaagcaagactcttaagcaaaatggcctctagcaagtcaa

SEQ ID NO: 2539 - DNA, 2044 bp, Toxoplasma gondii
  source 1..2044: mol_type = genomic DNA
acagtgattgatcgtgccaaattctgcacatgatcgttatgctggtaggtaaattttccattttgcatgaatgcgatgttgaactcccttgtcggtgtcatggtgagctcgtagcaacgttttgttttagggtctagagtcccgaaacacgaactgcgtaaaacttccatcaggcttcactgacgaatgagcgtaagcaaagatgtagcgttcgtctaacaggaaatgctttttcaggaactggaacgtcccacgtaggaggtttgggtactcaagcaagcccttgcaaacatgatatctactgtaagggcactagaattcaagacgaaacagtggaatgaagcgtctgttacgaacgacaatgcgactgatactctacttcttccccagagaaccggcttgcgatatcatagctcggttctatcgtatcagctctcccctgataaacaacgcgcctctgcactattgaagacgatgcattctgtaagtccaaattatttcttggacttgctccagaatatgcgtatgtggttcagcagtagtgaccctagtttgggtactgcgagatatcctgaagaaatagcgaaaaagagccgtatatatattagagggcataaagcaaatgtaagtgttttgacacttgcacattcgatccatatgcaagacaagggaagcccaatttgtcgagtagagctgcgtatctcctgtcgctctcactagtgtgtgggaggcatacggcaaggaagatgccggtttcagcaagcaacgcttcccccccctgtgaatttcgagcatccgaagatcgggtactggggcaatttaacgttgccgtctgcgtattacgtttgttcgttgatgtgtattctgtacacacttcttgtgtggctcaccgtgctttacactgagtcctctgccagagagccaactgcgacttgtgcgttgaattttaaacctacacttcggaccacgagtgtttctaaatggggttatcatcctcttgaaaaagagaatagaggtggagctcatagactgagttccgctaaaaatcgttttcagatagggagtctgctttccgtagctatgtcgggattgacgtgccgggtgatactgcccgacgtattcatttttttcagtgcgattttttcatgctgccacttctgttctttttgttggacacttcgtggcgaacgtgaaaagaatatccacaatcaactcatttctatcaagctgtattgggagaggctcaagaaaaggactgcagtctataagggtactgcttgccccctccagtttgtagaggcggggctacgggtgaggtatagagtggcgacgaatatacatgggtggtgacccgagggaggacttattctcctttttgtgggctgttggcaacaaaacgaaattcagattgccttcggagttagctgcatgcgcttcactcctgtcgggccccaccgtaaaatctgtcgtggcatcgctttcctgtatcgaagttgatggttgtggtagccccatgctttgaggcctagttcccaacccggatacttgaccatgagcacgggcaatcaaatggcgttctgttttggaaaaaatgttacgcccaaaatgcaagtgggcttcaaaagagtaacactgtctgcgggtagtcagcaagtttgtagtagatacgcttaaggaaagtcctcaactgcgaaagcgcattactgttggaacttactgcgccagggagccgggaaagaggctcgacagtgaattgcgaatgcgggactttgttaggtgtgctgtttgtttgccctaacagcgattcataggttttttggattaaaattggtcctggaatgacgcagtcacacaggtggagaggccgtttgttggtggaaaagacaaactcactcgtagaattactttgaatcaacatccccatcgttttccatatctagacgtgcttgtccagttgcgcagtgtgttcgcgtatcgcaccacgcatccctctgcagacgaaaacgggcgaatgattcggaaaacggcacaagtgtttcaaaca

SEQ ID NO: 2540 - DNA, 4804 bp, Toxoplasma gondii
  source 1..4804: mol_type = genomic DNA
agacgccggtaggagtcgctgttcgctgtttcctatccaatgactgcagctagctctgtccctctctctctctggaacatggactgctgagattcggcatgcgcttcgacttgccttgagcagtccagtgaggtggcggtgcacggcagtcacagagaacgagttggcgaggtcaatttctcacgcttggtagatacaagtagatacaacaagtgaaagcttgtttagattccctgatcggagtttcagactggattactttcgcgcccacttccgcactctgtaagggggggggtgagctctctaaatatacttttaaaatacgtgcgtccgtattccacctcacggggaattgtcgttttcaacgggatcgtgttcaagaacaggggagacttccctcccgagcctagatcactcgtgtagagggcggtgctcagtgacgtcctccttgtacgctttgcacctgcttgcttcctcgagaacgacggctctcgtatggtacggttgtcggtcccccctcggactgggagaaagcctctcagacaggagcgactgtggcgcacacacatctgtgagtagtgagaggaaatgcgaacccatacagtgcggccctcgttcgtttgctcgaagcatcggagcagtgctgcatcctcgttcctgcgttttctcttgctggtaacacgagtgataacagaactactaccacgcagatgacaggataaaaccgagagctcctgaacgcaaccttaccagctggtcggttccgttccacacagttaggaagtgcaaagaataagggaacaaatgtggtggcacttgcagagagaatgctgatgtgtgtgtcgactgtgcagacaagatcgtcgtcctgagcaacgaagataaacgcggaagtcaggtggtggaggtcgggacgcacgacgaacttatggcaatccccgacggggtgtaccgacacctcgtgaaggttgcagagggagggaagtgaggatggcttgtgttttgcctctcatatgtgctgccgagaactgcacatgttgggaggagtgcagtctgtcggtcgtcctcacgtttgctcgaacacggtagcacgtctcgatgtacgtatcatcatgaaagtcacctatgtgacgaaagttgggtctctgtgggaaaaggtttctccattgttcgtgtgagtgaatgtccatgcaatggtagcctcctgtcagcattcgctttcctctctggatggccgtggcagacctgcgaagtgtgacgggtcactcggggacaatgaactcctgtgactcgagtggggagcggcgttcgctaaaagcggttgcacgctgtggcatcaacggggaaaccaatttcgttccctcgccatccgctgtgagtccccatgttttgtcatgctctcttgtggggacgcaccagctccaccacccgttgttttggaggtgcaggagaggggatacgtttcctcagaaacgatatccacatactgactcacacgagactgtttctcagggattcttcaaagaatttgaatccgaaaattgtgatgcaattgcaccaagacgcagcgacgcacggatcgattacgtcgcgtaaagtgccagacgtagagggcctccaagtgcagcctggccatgacaagacaaaagcgttcttcgcatatcattatatagcgtccatgctcgttaccgcaaactcgaagaggtcctctttcgtagcagtgaataatcaaagcagttgaagcggcatcatgagctgcagcgcgtcgtcgagttcgcatattgtcatttaccacgtagttagcaccttgcaagcacgagttggccgacctgacaacaaataagcgcacacttttggaagatcggtgtgcaacagcatagccgcaaaaaacttatgcatcgacgggcctcgctgcgctctgcatggctttgaaaaaaccacatgttgtttcctgtagtaggcaccggtcgatggcaataagtatggacagttccgtcacttccaatcgctccaatccccttctagaaactaaaatgtcgaggaattcttgcaaatcacaaagcagaagaaactctcagacactaatcagacgtgcgtggcgtcgtaggtagcttcagaagcccgagccaagcagtcgatcccggtcacgcaacgaatgctacctttgttgtctgaagaaacagtaggttttcccatcgtggcgcggttcaatgagcaccgaagaaaacacgctgaagtcgcatcgatagcgcgttcgatcgtcaacgcggcacaggatccttcaccggtgtcgggactgttgtcgcccacatttttcggcttcttccagatgggtgattccatcatcggcgaaccggttgggatacccgctcagtacgatacgtacagacgtgccaatgtgaatggccaatctctagaatgcccccagacaatgccctggtttggactgccctgaatctgaaaaaaagggaacccctgtatcatgtgtgtagccccgtgtcacaccacactcgaagcagcgttcttcagtatttagcggctttggatcctgtcttctgtacaaggtagaaatttgaggtggctcagtgaaatgaactatgcagcgatagatatgtatatggagattacagcgcacttaaacaaaatccccatggcaagagatccactctagtcttccgagaagtgtgccgaactgcagatgacaccccattaatcggcaacgcgaagtgactccgtttgacggaaagtacacgggtgtgatcgcagcaccccgtttgttttcgtctgagtgccagaatccgaagcaacagttaatttgttcgcatgtacagggaatctgtgttactgatcaatccatcacggatgtcacagcagctcggtatcagacatcgcacccgaagcacgggaatgaaagtctcggcttgcggatttgacaagcggtccagcaggtgaacgatcacctgactgacgtgtcagaggtaccccactggaccatccgaagaaatatgagcagtggagtcacactacaccctttcctttcacgtgattttttagcctgactgttgagttttcgagctactggatacgtaaaggctgtccagcgcgtttgaaaatcgtgagactagcgtccttcaacgcagcacaaataaacgttcacagcaagctatccgctcagaatgctatatctgcatgcatatttgactggatggagattatgctatgttcctccgcctgcggaccttcttcgggtatctttcctcaaatcggttcgagctcgtagcaccagtttaggccaaaaactgcacccatccggtgaatatgtttgagggatactaagctctcccgcgtgtccgtcgcataaagcgtcaatcgtcttccgggggccacctgcggatatgtataaggatgcttaaggaaagtacaggaaccatgcagtcccaggagaaggttttcacgctgcatcttcacctggtgcatgaaatatcgctgaggcgcgtaaaaggtatcaccagacgtttgaggtggagatgggacagacgcttgcgtctccggccctccaggttgaatcttcccggcgaaggcgaaaggggagtttctttaaaagccttaagtatgcattatctgacagccagaactgtcgttgttgtaggacgtccagatgcatgacgcttgacgtgagggcgtgttgcatggcccacacagcgttgatgccaacactagcggccgtcggagcactactgtgtgtcactttcgtttctactgactgccacaaggcgcgacgcgacagcggcccgtaagatgagcataaatgcaactgcgtgcgaatctctcatttttaatgtcaacgcttcattatcaagtgaaacgtgaagtgagtgaaccgtcggttcttgagaaaacaggcactcacgttcttcaataacagacggctcgagaatgtggggatggtttaacgacgcaaatggtgtgcccgcatggtggcgggtgggaggaccccacacccgatatgactcaacagaatcgacgcgggaacacgtgaatactcactaatacgttctgttgtcagcctgttttctatccgttgtgaaccattggtccatgtgtagggcgcgtcgctgtgacagcccgcaatcacaaatcaggagggtcttttagacctgttacttattttgaaacagttgatgtcactcatgtgctgctcagtgcggcattcatgtgaagagctggcggtgtggtatcggcaacccgagacagcggcgcccttcgaatcattgtgatgaggagggaccagcatcagttccgcctcacttcccccccccctcttcactttcctgttaatacagatttgtctcaagtaaggacagcgaataatccttgatgcaagttctcgcctgccttgcacatcaggacttctttatgtttccgtggaatacgccgtaagtgtcgggcgaacaaccccctgcgcagaagcctgggtcgaccttcgttgggtaactcaccggcgtcgctgtgcacggatgtgtaggcggaatatcttcgtccaagtgcccaggaagcgccttgcattccagttagaacctgcagcattgcgacatctacctgattttgcggaacgcgtatgtcctcacctcaagccttttctgcttgtgtaggcagtctcaagcacgaaccatagaaaagtaggaaagacttgtacatcccacggagtatcgtaggaggcctggaatccagagcacaggcaatggtactaccatttgacctccgaaacccgatctcgattcttacaaaacttggttttggataa

SEQ ID NO: 2541 - DNA, 4514 bp, Toxoplasma gondii
  source 1..4514: mol_type = genomic DNA
gaagaagaacttcatgtaaggaattcctaaacggctgtttcagatgcctgccccgtgagaagggactggctctacgtctctcgggtggtcgcatcagttcgctgttaatcggaattcacagtgtcgttgaagtagcgcagtggacgagcagagtctgaaacttcgtgatctgtcagttccgctgttatgctgctccattcttgatttagagttcgacaaaagtcaacactgcagacaaaggacgcgaggggcttcctcctcacccgacatccacgaaagtggactctggaccggccggcagcgtttcgccgcctttctccagtagctcgtctctccccacagcattcgccagaggcagagatgacgaatgcgacggcggagaagagggagactgaggagacaaagaagaaaaaggagaacgattggaggggggaggactgaaagctgcatggttgtcaagctcgtgtggctccgcctgtctcagtctccttttctctgcttcttgcgtcaggcgcgccgcagcagcctcgacgcgccgcagaagttcgccgtctcctacttggccggattccgaggcgaaggagcaagagggcaaagagagagcagagcaaaccgcagagaagccaggggaagcatgcggagaagcaggaaaagaaaagagaggaaacagacgagcagggggctgtcgcggaagccgaggagagacacctgggccaggccatgaacaagcagcagcagaagaagccaaatgggaagaagacgaggaagcgggcaaagcagaggcagataaacgcgaggaagataaacgagaggaagataagcgagaggaagataagcgagagggagggaaggaggaagataaacgagaggacgaggaggggagatgtaagaaggacgctttcgtgtgaggaaggcgagacagaagcggcaaaccgcgagaagaagacagtcggcgacccgccattgcgattcgacgactgagcagacgagcgcgaaagaaagaagaaagtgagggagagaaggtggagcgataggtcgcaagaaatgcaagaaatcaaagtgtggaggagggacagggttgaattgatgacgggagaacttgcgttgaagactttcagcagaaccgtattgaccgacgtgtctctcctctctcggatacagctctgcagcagagatgcttgagttccacgcaagcagttctcttcactgcgtttagctacgcaagggcagataaaaagctttgccgctcctttctctctctgctgcctctcagtccctctctttggcggcaaagaacgagagcgttaaaaccgcgcagccaagaacagaccaacagacacggcagctggacgacgactgcttttcgccgcgaagcgaaaaaggctgctgcatgcagagaggttttctggggcgcctgagggtgtctgtgcactccgcgaggcaggaaggaggcaggccctctccggcctgcatggttgtttctgcttttcaggttttctttgttctctttgcgtagtcgcttttttgctgctgttttggcgtcccctcttggtgcatcggggaatgccacgaaaaatgcccaacaggaacataagtgcggtcaggctgtttagtctagtggtatgattctcgcttagggtgcgagaggtcccgggttcaattcccggaacagcccttttggaaaaattccttcatccttcaacaaagcaatgccttcttctttcttcctcgcgactctcgttccggaacagagagttgcatttccaaattgcgcttcaaccgtcactttcgcatccacggaaaaaggtagaggaagcaggagagagagagagagcaagagagagagccagagagaaagagagagaaagagagagacacagaacaagagagggagagagagagggagagcaagagagagaacagaggcaagagaagaaagagactcgttttttgtcgagatgagatgtgccgaggattccaagtcgttctgttttcaggaaaagggggagacacacatactgttttctttgccggtatgacgcaaatcgaatatatttacgcatcagaaaacctagctctttcccattggcttcctccgagggcggcagagaggccagacgccgcacgaggcgcgttctcgaaacggtttcgtccggtttctgctccccagaaagccagtcgacaaagcggcttctctgacagacagaacaagaacgctcgacctttttttcgtccatgctcaaggcgagagagcgaggcgcttcacctctcaaggttgtctcgacattaacagagagaacaacaaaaagtgaaaacgcctcagcaaagagaacagcgagaaatccttttcttgtggtcggcagaaatgcggcaactcctctttttgtaggcaatgaagcaggcgtttctatgttacttgatagaaaaagcaagagttccaactttgctggatgcagactagcgaccgttcccccgttcttcgcttcttcctctctttgaggaccagaatcagacctgtgtgtgtctaaacagcagagacaactctttccatgagacctctgaattgatgcgtctccttgaacgtcgaagaaagtcgacagcgcttcttttcagacaaagcctttaccggactatgttcatgccccaaagacaccaatcttaacgcctaagagaaacaagttccttgagaatccatagatttggacgggcatattaacggagtcgtagacggaacgcgtagtcatccgtatgcatgctcggagaactgggcttgtatcgaagcgagctttcagagctctgctcatctcacacaccttagggggccagttctgaacctgtgatgattcgtgtcattcacatttctatacacagacatctgcgtataaacgtccttcgatgttgtacctttttctacagatacagagagaatacaagcctatgtctgcgtatttgtgcaaagatacatttcgatagctcggttgttttccgaagggtctggcagcaggacttgacgattcgcgaggattcggcaacaaacggcgtcgagtcgcgtgaactaagcggatttaaaagcggaaaaaatcaaatctttctctcggcaaaaactcggcaccgggagcggtccacttcgtgcgagccgcgcctctgtttctggcgagtgtgcgagagccgcgcgctttttggctgttgcttcctcttctcgacggtgttctctcctcctctttcttcagggcgcagacggggtgtcggaaactgaactggaactcgagcaaggaaatccgagactctttcacggcttctgtcgcctcgtttccgggccttcgatgacgactttcctgcaatgtaggcaggacgccgcgcgcaaaactgcacaccctcgcgttctcattgcggcgccccaagcggccgacgccatgcaaggctagacagctgtcactcgcgtttcgtttctgttgccgggccgcggttttctctcgtggttctccaggtttcaaattcttttctgcggagagatcgagctcctcgagtagcgaacgcgccttcagccgcctccggaacactcgagagttaccgctgacggagagacgggtcaaatgcggagagcgaggcaggcagaaaaagaggaaagctcgctgttcctccgcttgctgcttccttcgtcgtccacgcgttttccactctccgctctcctctctctccgcggagaaaagagcgctgcgccgtcgagctccgagtcccatctagctgctcggcttggcatgcgccctcctccctcgtctcggctctctcttgtcctcttctccctcgcctctctctctcgttttctctctctctctctccgctcgaccaccctgagtgcgtctggcggcggaagcgtcgcgtctcctctctgcttctctctgcctctttctgcgtctctagctctctcgacggctccctcggacacagtcgctctctgtgcttctctccgcttccctctctgcttctccaggcttctctcttgttctctcccgccctctccagttttctcttgttgtccctcactctcgcgagttctcttgtctcctcggtctcctggcctcgctgcctcctgggagcggcccaggagctgcagcgtgaggggggaagcttcgcttcgacgcaggttcgtttctcccttcagacaccatgaagcgggaggagagaggtctctcgtctttcgccgctgagcctctgttctctttgcctgctgctcagccatcgggccttcgcctctgctctgcccgccggcaccatggggtgtctgtacacccgaagacgtagcgcgggcggctgaagcgttgacgccgtgaggcgcgattcgttccttctccagcagattctgaaggtacttgcttgaacgcacactggaaggcgccgtttctgtgtcttcgcgtctctctgtccgtcctctctgtccgtcctgtctgtctctgcctcgcctcgacctggctgatgtccgagcgacgcgcgcacccccaaggagagcgcaagga

SEQ ID NO: 2542 - DNA, 2041 bp, Toxoplasma gondii
  source 1..2041: mol_type = genomic DNA
tcgatgaagaaaacttgaagagcccgaatcgtcaacagggagtccccaaacgtcagttcggcagagcctttcgtgcagttgcctttccatgaaaaaaataaaacttcgaagcgcgccttccactcacctgtcgcctccgccatgttgacgagacgcctggggcaccactcgctcgaaacgaaggaaaacaagtcccagagacttcctgagggtttctcgcgaaccgaatgtccttccaggacgcggagagaggtttcaagggaagtgtgagagcgaaagactgccgggcaactcacgagcgaccgctctgacgcgaacgcgtggtgtgaaatgcgaaggctcccgagtgtacagacaccccgaagatttgtcggagagcgagcagaaaggcacagcccggcgggaaaggcgaccaccacaaccaagcgaacagaggtgagccagtctgggttccacgtgatgtcaaagccgtggagcacagagggaggaccgctcaacagttgctagacaaagactcggactcgaaagtgaaagaagcggcagttcggacggtcgcagccagtgggggacaggagcgtggggtgggagcaacttgagtctttcgagcgatgatgttttgagtcttggcgacaacagcggtgaagctagccaaacaaattagacgggaaactcgtgaaaaggacgagaaacgtgtgtccagacgcgagccgggagacgccgaaatggatattttgactcagagagaggaaacgaactttctgtggtcgtccagcaaccaaggaagaaatacaagccgtcgcagacgagcgaaacgcagccgctctttgacccgcgagactgcccccgcagcctgagaagccaggacccggcgctcgcggtgtaacgtgagatactcgcgacagctgagtgcgtgttagataaaaaaaccgaggaaatcgaggagagacgcgaatgatgtagaacggaggtccgactgagctggagaagaagggctggagagggcgcggtcagagcggaggcggaagaactcagagagacgcctttttgggtttaggaaacgcccggtttcttgcgtttgaaagagggtctttcacgacggaggctacgcaagatgcagacagttctaccaagcgttttgctgcgcgagaagtgggaaaagaaggaatcgagaggaagtgcggcgtcctcgaccgccttgcaatgcgcgctccagggaagacgtatccacgaccgagcggcaaacaaaaagttgaaactccgctgtcttactttgcgaggcaaagaaatccacaaaagcctttcagcgcgtacgcaagggaagcagcgagacaatccacgcgacccagtgcagtcgacgggggagtttcttcgggacaccggattcgctggaaccagcaacacccgagagagcgcctgacagagaaaagtctgatgtccagaaggaagaggtgtgtgaagtaaaaacagagaaacaaggaaaggaaagtgtgttcacagggcgtggcagcgagaacgcaccgaaaacgacgtgccttctatttgcgcgcgccagcgacaagactgaatccggagctggcctgcagtctttcctcccaacttttgcatggacgcggcgtctatcgttcaaacgacaatgcacgcaaacgatccgaagaacaaacagagaatggtgtcaaagcagacgaaacacacccccgtttcccgccgtaaacacatcctgcgagacgagccgtctttgcgaaaaaagcacgaatgcggctgtgccgcgccttgcaggtctaatgttcgcggcagagtcagaccagttttggtctcagggaacaggggccttcgcctcttaccatgacttacgaatccacgaaaaaacgaaactgtgtcgcgaggaaacatgtcgtgcggtcggacctacttcagagctaaaatttctcatttcttcagggctatcggtgtgacacccaaatgctacgtctggtcattcattcctaacctgcgccacgctctacctaaaaactcaagattcgtgagctccgtgacctcagga

SEQ ID NO: 2543 - DNA, 3788 bp, Toxoplasma gondii
  source 1..3788: mol_type = genomic DNA
gaacactgggtggatgtttctatgtgtcaaggtcggagttatgttccccagttttctctgactccacttcatccaaaaagtacagatacctgtatttccataaactttactgcgtctacgaaagcgagcatccacacccaagaattgctttgctaagaacgagggttagcattatattgtttatgggagttccagaacgcgaagcgctgtgttgcgttgtctcgatacgacacatgtgtggtgctctctaaatgctatctacaccattggtattcaaaggataacaggaacacagtctccatcctctgatcacatcgtgtagatcgctctgtagtgcaaatacgccagtgataacagacatcgattttctgccggaaggagaggagatccacgtcgtcgcaggcgacagagattgagagcggggacgcgacttctcacacacacacaccgttccatgccacagtcaaattaaacaagagctcttgaaattcggcggtgtgctccataatggagatacacagacattagtgagcagtacgtttcgctgtcgtacaaacgggggtagcgttttttcttgtgtaactcgtatatgacgtgacaatgattttcccattgctttgcctactttgaaaaactcattggacgcagcacccttgctgctgtggtaactttagttttgaccgtccgtgctgaagagcaggtgtacctgtgcgtgcaggttcgcagaaagtgtatctggaaggagcgtcagttcgtgtcgacggaatcgtccgatttgcttcgactccctgctgcttgtttggataaggaggatgtggttcaacgactatctctcctccacagttgagtaaccttgacttctccgtgctggcatcacactcgttttgcgtccttccgagcaaaacggaacatctgcctcatggtcgagggacacttagtttcctttctttagctactcatggctgaccagacttctacggtctataccacggaaacagtgaaacagggaacgataagacaaatgaaaaaagaaccggcgacttgcgagagaaggacgggtggaaagtgggggactgcggtgaggggtagagggagtatgggggcagcgcagcgggagaatcgaagtatcgtggattattcgtatgaaattgatacgtgcatgattgcgcgtgaggggagggtgaagacgtcgtgactgtacagtattcgtgaatgaaaaactttgctgtgtctcgaaaacgcacttgctgttcatattggatccgccattccctccgtaagtccgtttgttaggtgtcaccatcagacgggaagaattctctcatcagcaccagtttccacgaaaactccattaattcttggatacccgtgtcatggcagaactcttgaggggaatgtatgggagacaagtcttcgctgtgtcacgagggaggtgtgtaccgtgcagtagactgtgcaaacaggcgagcctcggtgcagaaatatcaaatggtgcactgcaaagacaacgtatttcctgtcccttcttcacagcggctatccacacacgtgcacacttcgacagagcatggacggaacttaaaactgacgcactcacaccaatctttgaagccggcgttatacacgtacggtttgagctagaacccgcgcacttgcactccgtatgggcctatgctgagcgataatgatacatcaagagagaaacacggaaatgcgatgggaaccacactgcaagtcttgtgcgacgtggcccaccagttccacaaccttgaaccgttgagaatcattcatgaccacgaacacacccctcgattgtgagttaagcggccaagactaccgcccttctttgtattgtgcgagaaggcctatctagagagaagcggcctgtcctacggactgcgttgcaaattcccctttgtgcttcagcttcctgttcactgccgtgctacgtgcagtcttcggtccctttcccttccaagtgaccgcgcccagagttttcgaggatctgaatttctcggtttttgatgaaagccggaagtttctgccccgacttttcatacgaatttgtctcgagcgtaccttcttctctttctctttctctcttctcttcttcctacttttctgattgtgttttttccttcttcctgcagttttctcgtcctcttttccggctcctgtaccaaggctgagtttgatctgacgctgcgttgccgcgtcgacatcttttcttgccgtttttcatctgtaaggttcgtcgctaaacgagcatctgggtccttttttcgtccttcttcgtgtgggggcgttctttcacccatctctcgtgggattctttttctctagcagtcggaaaaccacgtctgcgcgactttgcggctgagcgaccctcctctgtctcctctttcgctttttcttcgtttttctcttttttctaccgtcccctctccctggtggacacccatgctccttgtttcccccatttctttttttccctcccttcctcagtttcgaccttttattctgcacacccgcgccaatgcccctctattgacagataagctgtctggtggagaaacaaacagcaaagctacatgtttcgtcctacacagatttgactcttgggtagcagttgcgtggtgtttggcgtgaccgtctgtgcgtcttccttctttcgcgtgtgccaaatgctgtcccttttttcttcgtccaccaataaattccgctattctcgcagtgagaccgatcctgcagaacatgtatatctgtgatgtgtatgggaatatttcccattcttcatcattttttccgtcttttgttttttccgtccccgatgaatggcgcaagggcgcccctttcccgtgtgcagtctactttcttccttgagcaaaacgaacttccttctgtctgaaaattctaggatcatcttcttcccttcttcaccttttctgcaaacgtgaccggccagcctactctgaaggcatcctgtcctttatttccgcggtagtcctttccattaatccttggagttgaagaaagtggtcgcacaccacgacagaaaacgcagactgaagtgaccctgtttttgtcacttcgagagagccaagtgtcgacagggaagcgaccaaaaaggcttcccttggaacgtctttctcttgtagggcatgacaccccgcgttttccagttttcaaggttcgctcacagaacccgacgcagtcttcctcatttcttctccgtagaccaccttcaaattttaatacctcatttttccctttgtcacccttctggtttgtggcgtttctgtgagcagggagggacactcggcatcaacgcgagagagctttcgtttccacacgctctggcacccttcacgaagtccaacagttgcgtgctgtccgtacggttccttttaaaacaatttcgagaccagtacaggacacagagacggactgtttaggagagagctgagaaccgcgtttcccgttttttcccctcggcagaggaccggaaattccatcttttatcagaacgaagaggcggtgtcgaagtcatggagattgcaggtgcgttcgcaaccggcctcccagctcatttcccgcgagagcatgctggagattttccttgaaggggtgcaattgtaaacagccacgtttttctcccagcagcgcgcatgcaaagacactcttcccggcttcgtcttcaaaaacgttcttgtgtccgcctgcgaagaacaggaaactgggaggcccggggtaggcgtggcccgtggagaattcttggcgggccacaa

SEQ ID NO: 2544 - DNA, 2473 bp, Toxoplasma gondii
  source 1..2473: mol_type = genomic DNA
ggaacgaacagactggtcaagtcgaagatgaccgttttgtctctgctcaccagcttttaacaagtcctggaaagttttatttgcggcgatttcaacgatcggattgaagggggcacaccgtactctcaggcggtacatagtgggtttctcttcttcctctggcgggggattgtctctgttctgctcctctgtctctctctgtttttcgcattcttgagttcccgtcgcctcttctgcgcgcggcttctctcccgcagactgaactggagaagtgtggggtgtctcgacggctttgtggccgccgcgagtgctctcttcttcgctatcgccttccgccttctgttcctctgtcctgcgcgcttcgctggcgttgcctgtgtcggccttgccgccttcttcatctgcctcgaacgacgcgtcctggggtgtgacgcgagacgcctccccggtacggtcctccattgcgagggtgaagcggagagcgcagaaggcagaagccagctgacgaaggtgagcagggagaagcgtttggagtctcccttcgtgcagaagaaggcaaggcggagaggagacgcgcaggcactgcagtagcacttgagagactgctgaagaggcgaaacaggttgacaacgagagggaggacggccggaagaataattcgaaatggcgagacaagaaggtggtgaatggttctgaagcggagagcaaagaagacggtggaaggagagaaaccgacgtgccaatacagtgcgagagagaggagaccgaaatacagtgcgagagagaggagacgagagagagagaaaaaaaagccgagttttacggggagcgggacatgcgacaaaaagcagcaaagcgtcctcagagaaacgcacaccctttcgttttccggagacagacagaagacgacatgctcttctccgaaaaaacatcgctgtctctcgacttcgagggtctctccggtgtccgctctcccgttccctgatcctttacctcagctggttggcccagtgtgagagacggacaaattgaggaagtccagacacacgccgacatgcggcgaacgctcagacgcgttttgttcaggaaaaacgcgaaaaaggtatggacgcaaaagctgatgctctgcggcttgtctcgtctgcctcgtgtgccgacgcgacactccaactctctctcgaggactctatctagacgacggacgctgtcgcagctggagaagaaggagactcgaccccgacttgttcttccccgtgaaagagcaagttgagagaaagacctcgaactctcgatgacttcacttggcaagagttctcgacttagtcgccactctgtcaaaacgtccactctccagaggactcccagtgtcgcgtcgcccctggcgttcaaacaacgttttcagcagagagagcgtcgttcgcgcgcatgtcgcgacagcctctgccactctgtttttcgtcagcacggcgaagaacgttgaaagcaatcagtgtgttcgctcgtttaactggagagctcgaaaaacatgcgcgtctgggtcccagttcatttgcagaggaagggcaagtgaagatttttcgaaggggagaaacggcgattctgcgggtgttccaagcaacggcgacttggcgggtgcacacaacgaccggcggacggatctcgcccgcgcggcctcctggaaaatctcccccgcaacatgtggcgagaggcagaggcgttggccgtcagacacgcgccggttctcggggaaaagcgaggggaaaaagaaactgactcgaggcaaggcggcgctcgaagaacgagggagctcactcgacgctggtcctggctctgccccccgtgctgagtcattcgcacaggacacacagccgcccggaagctgcgcctccctgctagcgctccagtcgaggtagacgaactcgaacgtatttcgagtttccgagagtcttcccttaccttcggtcacgcgttctgcttcagcgaacctgctgaaagtcaaaatgcgctcttgcctgcaagaactggagaaaactcatgcgattctccccgccgcagccggcagctgggcggcgcaggcacgggatgtttttcgcctgagcctgtgacgcacaccggaacgaaggctgaacttgagtttttcgcaactctgcctcttccacatgactttccacgacccgcatgtctttgccgagttcatgcaattgagttccccgccaagcggacccgccaaaagggaaacgtcaccactgccggtctagctgcgcgttcgcgcggctacctgtcgaggctgtttcctcttgtgtactacaaaaaagcctggcgaacgccggccacgcagagagtgcttttttcaggagccgaacgcgactgaaaaagagtgcttgccaactgccattcgcttttctttctcgccgtctaatctgcgccaaaccgagacgccgccttcctcttgtgcctggacacgcgagcccga

SEQ ID NO: 2545 - DNA, 3908 bp, Toxoplasma gondii
  source 1..3908: mol_type = genomic DNA
ggatacccgcaattcgaatggcgttttcctctctttcatcgcttttttactatcccgacacacactgggaagaccgctttctttgtctcttgtcaacggggctttcacacgttgaggcactgcaggcggtaggcgtcgaggcgccatgtttcccgcgattccggaaaagatgactgtcgctctgagttaggacaaagatacaaagaatgcgtctacaatcgaacattgtgctcatcccacgactggaatgggtgaggcgacaagatcgcaacacagaaacagcccgggggttgtcgacaacccgaaaaacagggagacacagaagagctctgacgcagtgttttacgatcgctatccgaaaggcatgataagaaacgcagaaaggagggaggcgaagcgcacttggcgaaacactgtggcaacacacgcttactgccagacggacacccggcacgctcgacggacgctcgacagccacactccgcagctgcactggacgaccgatccacgacaaaacagcgatctttctcgcaagcccaaagacacgcaagaggcttcacgcttctgtcctcactccagcaagcaagaaaacgcctactggatggaccccgccgcagatgtagttggagacagccaaggcgttgagtgcccgtaggcgtgtgatacaactgggaaaaaaacagagatcaagttcgacaaggacttcaaaaacgggatagcgctagcgaacgcgtccaatgctacaaatggatcgaaggggagagccgaatgaaatgaagcacggatgcgaccatgtaaaaccgaaccagctacgcttcttcagttagtttgcctcaccgtggcaggtcgagcttcgtgttcgtgtccagttttccacagattcagcgagaaaagcttgaattccttcacacagcgtcgagaaagccgggcagcgggtggtcagaactgtggcaagccgagataaggaagtagatatggacttagaaacagaagcttttcgctcgacagcagcgcgacagcggggtgttgttctcagccgttccaccggttgtcaagccccgacaggagaaaagggaacaaataacaaaaaacgctttcgatatgatgcagagccaataggaccagatttggatcctctgaagctctgcgttgtacgtctgtaccaggcacacacaattagatcacatatactcgacgcagagatcatgttgttgttgcgtgcaggtttcaaggaagcgagagaccttcctctgcagaatcggtccgataacttcaaaaaaacccgtgaacttgaaaagaaaatggtactagggtcgccggcctcggctccctggtacacactgggaaacaaccgagcacgcctgaacaagccagcatgtgaacagccgtccgcttcgatccgcgagtcctttgacacagagaccgaaaacgtacggcatacctgatgggcttatcattccatttcctgcatttgttctccgtctctcgatgtcatccctcatccacgagcaacaccctgcttctttgcacccacagaacggcgttccacttgtctctctgcgcgtagccgaggccctcccaattgcttgttcgacacgcgacaagggggaacagaggtgcgccagcatagagccattttgaggtgctcgtgacttttgcgattcaaggaaaagtcccgagtgtgcttcggtaggaagctctaccccgaaaaacatctagtccgttgaggcttgactgtcgcaagtactatccttacaccaatcggaaacgggggatgttccttgggcgaactgtcttaacgaagagaagctgatcaaatctagaacgttgttcctctttcgatgaggcgcctttccaagtaaaaaccggattgtttcacgtgtaaagtgcccggatggggttttcagtatcaagagagttagctggagaaaacgccatcctcgtcaaaaacagacaaatgaagggtcgacgcctccgccacaatgttccgttgctctcagtgttggaccccttcattgtgtgcaagccacagaaaacaatctacagatactttgagtcacgaacacagaattcagtggtgcacagaagtagacgatcgcggtagtttttaggaaaacgacttccaacctcccaatatagattggtacaaagacgttacgatatcctccgtacaaatccggcatcaagaaggtcggcggcaaacggcgaggaagctgtgccttctgctgcaggcgggtggtcgctgtttcctgcgttctctcgtgaaagcaggaagtcatagaattctgtatttgtatgcgaatcgagtaggctcacaagaaattctcctgttaaaataggtaaagcaaatcctggcgtaagagctgcaaagacataaaccaagtatgtccgctatagtttcgcaccccacgccaagatcccgcacgaacacatgtaccccggccgaaatagcaacagacacccacctcgttagccggctagttggcaagcggtgaatagtgaagtccgtcccttttaccatcgtaagcactccagcgaactggtcctgtttagcggtcacaaagaactcggttgtctgctgcacgcaaaacgtatcgatgtacgacagacgtaaaccaccactgcatggtttgtacctgcgccacccctccgtttcagttgaagatcatttgcgtgcaacttgtaccgtacacgtgagctgggtcgagaacgatggcgaaacatggtgcgaggggaaaccgacttttctgggcttctatccgttctctgcagccaacaatgaagcaactcttaaccttgaaggcaaagtgtgaatcgggatacttgagtcggagagaaatccgacaatgccgctgtcgaagtgtatagagtaaaacatgtgaacagggttgcgctttgacggtccagaggcagaggaatccttgtcgagcaattacggtcatgccttggtgtgcagcagcgataaaaaccttttttctgtatgcgtcctgatcagtatcttaggtatcatgctgttagcactgataaagagcatctttgtgcctatcgcgtaactggagtccttttcagtatccgaggtactacagtgcctctgttaacaagatcccacgtaagatttgagagaagtaaaggtgctcagggtctaacactcggcccgtgtctatccttcaggtgctcctgcttgcttgacagctgcagccattgacagtgtcggtttagtagactcatagaacaagactttcctccgttgcccgcgcgatccagagaatcctaacgcctcatcctttgtgcgttcgtagtccgtcgctacagagggcgtcgagttcgtgacttgtgatcgatcaccatgctcaatgagctcaatgagtgtgtccgggggtgcatgcagtacggacgacactagatgcgctctttgtatcttgacacaagtcatcgtcatcgcccagcggatcaactttctttctcctcattgtgtcgcaggcttcgccttgaaaaaacaacgtcaccggtaactggcgggtctcgcgttcatggcaaaaaaccgagcttttgcccgaacttttcgcctgtacggaagggtcaacagttctctcggcttcagcagtgatgaaaacaaatgctcttcagttcacttcctcgtctttttcgacttgtttcccaacgcacgacgtttccttacaccgtctcggcggactgaggcggatgcccgtttctgcgagagcagcgaacggggtgtatgtacacctgtttgcctcgtttgacttggcctgcgtcgcacaggtgaacgactgaaaatgtgcacgactttttctcatatttcgttcgctgtttggaagcaactaaattgttcaaatttccgcccaggggaaaagcgagtttctttctgcgactttccttcgccctcataa

SEQ ID NO: 2546 - DNA, 1799 bp, Toxoplasma gondii
  source 1..1799: mol_type = genomic DNA
atggaaataatggaaacgcaggatatggacgtgggtgtgtgctaccgcacaggaaggcacaataacaccgaggatgtctccgcaccggcagggagcctccaaatattgagtggcaaggaacctctgtgaaggcgccgcctccactgaccatgcatgtgccgaatactgacgctgtgctcactgcgtggtatatttagttcgtcggcacttgacacatcatcatggcgaagcatgtttggttcccggtctaattccacctgccgctatgatgcctgtggttccgtagtttaggactgagctgatgccagttctttcggtgaacacgccggaaaagctacagatggctcttgtataaaagtaaccgccccagagtgaaacggaaccataaagcatctgagagtgtcttcagcacttactccacagtcatgcagtttttgtggtgaatgctgatcgtcatactgtcaaactaagagactcccaagaactgaaggatacttatttgagcagctctcatatagtagagagttaagtatggtggactcagtcttgcgctcgagaatgttcgaaagctgcctttagtattttcaactggagtgagcgactcggtggacaaactgttgggggcacctgccgtgtggacgactgcgatccccactgttatttgctataattctgcttgttatagaggaacacatattttgcctgagacaatcaactcagcaaccacgtccgaggtagttcttgactaggggagagaaggaactaatgcgtctccctttccacaggtgaaccactcaaatcgcgcgcaagctccacaaattattcatcgcctgcaatagctttcatgcacttttgtttttcacaaaaatatgcagtccacaacttgacgcttcaaaacaggggttcgtaggcgtcgagtatctgtaggatggcagtattactctgcatcgtggtaccactgtttccgctggtactctgacatctttcgcaaactagctttctacgcataatcacccccacagtgcacatatggcagctgtgatgttcacactattttttctgcctcgacaaggtgtgcgtgtgctgccttcaagtgtgcctgatttcggagaggaccgatgaacgaaattcgttatcgtctgtgtgttctccacctgtcctggtggaacgataattccggaatcgcgaacacccgtgaaccactgtcgttccttcagttgtacgaagtgccatgttgctaaaatggcatcgccgtttgcatgaagcctgcttcctgtttttctgatcagaagattaacaccttaggtgagtgaaaatgacacacaacaagtactcacaagccctccccccaaagtcaacgcacgtcctcacgaacatgagtgattcgagttaatgctgtggccaagcatgcgcgcacgagggcaaacgttacacggtatacacattcgggcactgtggcacccagtactagtggagatgcttcgtgccccgtgtttttgaacgttcaccgccaaaaggtttttgactagcgacgcacaatgagccattgtcaatataatccgggccacgctctcgtgggcaaattcacaaacgaatcaattaagatgtaaaaagttctactgtgcctaaaatgctggagttattttctgaaaatattgtttcgcgtgctgtttcagaggggcggaactaagataatatatatatcgaagcattgtggcgtgaccttcggaagagtcaacgaatctgcaggtaaggtgatttcttgcaattttgccaacttcatttttttcccacaaaga

SEQ ID NO: 2547 - DNA, 2706 bp, Toxoplasma gondii
  source 1..2706: mol_type = genomic DNA
agagaaaatgcaggaagatctggtccacctcatggagcaaacaattgaccgcatcacaacatctatatgattcttgtctcccagaaacactctacctagagacctcgcgagtgatcgcctctgcacctgtcgggatctcaatctaaatcctcacgtgcctcagtcacaaacgcgcatagggatgtagatatacacgtttctatttccagctgtgtatctgcgcacaacgcatgtgagataaatgcccataactatttatcaacatgaacgcaacgacgcactgctccgtgacgcggaaggtgcaatcgatattgcaatcggcatagggtcatggagttcacccaaacacagtgtcagttgccgttctccaaaaaaagaaattccggtttaccggaattcgcaaacggagcggagacaaacttcgctggaatggttccacgaaaatgccgaagaaatcctggatcagtgtgttatttttgttcgcgggggcccagttgtgtttccactccggaatgtcttctgtgggtgtcttctcgaaaaccggaaccctccagcacgagtgggtgcaatctcgcgtcttttctctgttcgtttcatttgtgtcttgtcaaggatcgtaaaatccatgatttgcttctccctagctacccgacacatggtgttcgacgcggctctttcgaaactaagacgagcgttcgtcttcccaagccccttggtgcaactggccactacggatacagccgcctccgcagacagccatatatttatgcattcgttcattgatttgcgactgtttgtgatcttagtgtaggaaatacgtgggtgccagccggaaaagcaatcgggagaatttctcgactatcagtgcgacacagcactagagaaaacattgaacaggatttgcgaaagtgatacgtgtgtccgccatgaaaggccctcgaggtgcctgccgccacacgaagaaaagcaggtgtctacttccagacctcttaccaagactgtctggaggcagattgccctataaggctaatgcgagagttgtgagagaacatgtcgactcctcgctttccgtcgtcctcacacctaaggaaaaggattcgaataagaagtacgacaacagcaagtgttgcggtgcctcttcttgtcgacatttccttcagaaatgtcttcacaggattcttttcggatggtggttttttccgcagtgtggggctttcgtacgtctgggaatcgtgtggcctctcagatctgacagggggaaggttgccgtggttagtgcgaatgataacagtagtcaaggtattgcgcgagaacaaatccgatgtggaagaatctgagtgccgtaggatactgaaatcccctttcttttgacgaggcatgtgctgacggacctgtcgcacattctctcctctaaagcgtagattctgtacctaactactggaacgggcgctttcagcttgtgacgcccgtcttcgtgatgattcgtttaaagatttcgtcacgtgtactctatgtgttcgagtttcagtctcgcgcgtggtgtaaagatgtgcccggcttcgaatatcctacttccttcgcaaagacctagcttggaaaaaaggactctcagtgaccggttctggacacaggtggttttcaagggcgaaaagcgccgtctctggccgcagctaaaaaagaataatccgcgggagatgcggaaggatagcagaaaatgcagcagtcaatgaagcaccaacggcgaaaagcaggaagaaaggtccgactcaagacgaagaaccggggcgcgttggcgggaggttgcgcgtcgaaacggagaggaaaccccgcgagaaatataccagagaaaacgaaagaaaagaagaactcgttcgaaggaagacgaaaacaattaaaaaccacttctatgcatgtcttcgaacagcctcgatctgcgagcagtttcttcaccctccagcagccaccccccaccgccacactcttctgtctcgtgtgacttgagattttgcgtggaaagattcgagtaacactgcgaaatttggcgttgactggcttccctttttctcccgttcaggcgttccctcctcgtcttttctcttccgtcttcttccggtaaagtccgtcctttcctccgtttcctcctgtcgcaactgcctcagctacagtgtgtgcgggttccggcgctagcacaagcaagagggctgttacgttagcttcaagtggtctcgaggaagagaactcagaagaaacaagacaaacacttcaaggaaaacaaagtggagaaggcaactctgaagctgaaggaggcaggataacgcagcaaaaagctagacgaattcaagggagaaagggagggcggaggcaagcggtgccgagggaaagaacggcgaaaaagagcggtggagaatagttgaacgtggaagaaaacgggcattatctgtcttatcctttgccctctaatgagaatcagtacacatctgccgcggttgttacgtgtaaggcacttccggcctctcccttttctacggctttacctcgggttcctccgtacacgactttgttaccccgttctttgggttctcacttccgttcgtcactcttctgatttttcggcacgacaagctccttacttccttcctctccccctttctttctttaagaaccgggtcgtgttggcttggtgatctagtcgccacttcctcgcca

SEQ ID NO: 2548 - DNA, 3300 bp, Toxoplasma gondii
  source 1..3300: mol_type = genomic DNA
gatgagtccgaagactgtcgcgccgaggctcttggtaaaccagcctctagcgaagagaaggccgtaatgcgccatcgcggaaggtgataagaaggaaagcctttgttttctcactctgaaaaaacacaacacacacgagtaagggtgagagactcctgggagagcagactttctctggagtccgaaagaaatcgatgaaacgggagaagaattcggcaaacagatggagagaggcaacgtagaactcagaagaagggagggcaagagaacgacgccagatagttttggagagaaaacagcagagaggcgaatgcggaacacggagaagaagagagaaagaagagaaaactaggaaaagagaaaactaggcgagaaaaccgtggtagagagcgacagagtccaacgagaagagggaggaggaagagcgaagaagaacgaagcctgggatgaagaaagaggaagctgatgcagaggcgggagagcgagaggaggaccagtgcaccgaagaaatggaggaagaagagaactttctagcggccgtagacgatgaaaagggggagaaggaagagagaaaagatcgaacagaaacaggccaccgccaccggaaggacctgagggcagactcccgatatatatacgtctgaaccgagtcaagaaagaagaaatgaaggcgaagaaccattgaaaaaaacagcgaaaaaagggacagaaggaagggaggaaacaaaggaaacgagaagagaggaaggagaggtactacacaaagtgctccctggtaagagaagaaaaaaagccaatcgggggagagtccattgaggaagacgaaggagaaaaactggagtttttttcttctctccacgtcgcctctccatcgtttcctttgtgcattcatatcgcgtttctcctgatttctttgcaaagattttcgtccttttccggggaatttatgatgtgcgtcacgacggcctccctcgcagaaacgaggaccctgtcgcgcgatccacacacaacgctgtcgcgaagaagtccacatttgttcgagaacttgtttatcatctgagaagagagacttcttcttttctctgccgacaaaaggttcgcgagaaagcaaagaggacctccaagagtactcacggaaatcctccgaaggcgccagagagccttgtgtctctgttcttgccctgaatgcagcccagcgtcggcgtagttctctggagaagaaaggacaaaaggaaacgaaaactgactgagaaagaccgtcttttcacttccaacattcgcctctcttttctctctgttcgcttctccatctgcccttatatacggcggcgcagcgaccgtctcctcgcctcgccgaggctcttcggctgcgccatttccccgaaaaattcatctgacctcggattatattcggagaacgcagttttttttcgagccaaaaaacagtcgtcaccatgaaacggaaaccgagttagtgtgtcgcctttctgtttccagattgaaggtgcatggagagggaaactgggtgagtcacttcagaggcttctgcatttcgctctagaggccttcgcagacagggagtccccttgtattggtttttttgtgtacgagaatccaggagcagattccgccatgtcgggggtcttcccttccagattcagtcaaaaatagtagacaagaaagatcgctttgtagaggcattttgtgtcttgtccttcgtgtctgtcctgctcaaagtttacgtttgtaaaggagatccgtacgcaagagaaaagagcaaaccacagtgacgcggcgacagtcggagaccccccatcaccccaactgacagaagagacacagaacagcctagaggaacgcgttgcattccgtttgaactttacactgaatgcgttggagtctcaacttgctctggacagtgagaacacagagcgcctctcacgtaacttcgatcctgcaccagaaacggaccttccacgttagccgccgcaaggcctgctgcctctctgaaggaagacttgacctcggtgctgatttaaagcatgaaaaggtcaagaagaaaggaagcagctgtaaagactaaagacaagaaccgaacacgaagagagaggcgaagtcggcaccgaaaaagcatgaaatcgacaggcaggctgacagcggtttttgccgacgccgtttagctttggagaatcgagagctgcggtaaatcgtttgcgcgggtgtggagtgagagtgacgaatctctcttctaaacagggcgttccttcttttttgggcgcctcgcgcgctctgtcgcttcttctgtgtttgatcctcggcgcaggcaaggagaaaagagaaatacgcagacaggggggtcgaggaaagaagcaagagaacgaggatgagaaagagttcgaagagttcgaagagccagcgaagatggtcggcaggcacttgagagacagagaaaccgaaagacgaaaagggaaatcgtggcaaaaaggtgaagaggtttgtggtgagctagaaaacaacaacggaggaagagcgaggaagcaaatacacagaaatgagaaaggcaagagaaaacgctgaataggaaagagtcagagagacggggagagagaaagagaaatggcaagaggtaggaaagagagaggtatatatatatatatatatttctctctctgtgtctctctctctatatatgtaattatgtttgtatatatatatatatgtatgtatgtatgaatgtatgtatgtattgttaggcaaatgtatgtatatatacgtatgtatatatatgcatatgcaggtgagcatggagaaagacacagacagaggaagagatgcatatcggaagagagagagagctattcaaagagagagagagaaacgaagaaagagaggacgagtccttgagaggaagtgcaagagagagaggcgaaggaaaggactcgcaatgcactgccggccactgagtcctcacggacgttgtcctctccttctcgcctcctctgttgtttctggttacggtgtctccacagtgtgaatcaagaaggaattaagaaagcattgcgttctgtggggaaagacacaaaagaaaaagaaactctaagcgcttacatctgggccatgaacgagtgcacacctgagagtctccccaggactagagagagaggccatttttgggcgtttctccggcggagtcgactcggagactccccaaaaaagtaaagaatgttcttttcttcctctctctccattctctgctccgtccggtcctgtttcaccaccctcagtttctctcccccagga

SEQ ID NO: 2549 - DNA, 4246 bp, Toxoplasma gondii
  source 1..4246: mol_type = genomic DNA
tcttcaggtagataaaccaagcgtgaaggagtgatatccaggtcgactatgctcgtttgactaagcgtgaaactcccccttctcaatgtgcactacaaagtcttgcgtatcagcccttatctgactggcgctgcactcgtccacctgcatgcttccgtgtgcgctgggttccccccttcccctgcagaaagagcaaagacagagaacgagaagacgtgaattccccgtccccctcacacttacttttgtaggctctgtcgcgaattttctgtttcattttatcgaagaacatgggctccttaatgacgacgtagtagtcggggacgagggttttatcgactgctgctgcgaagatttgtttcttgtctttcttctggaggcggttcaaggcgtccgtcagcacctggcccacccggtagggtgtacatacacccgaagcggagtccgactgcgagggctgcagcgcgccgctgtgttgaaggaaagccgccgtcgcggctcgcgtggatcttgtcgcgggtacgttgttttgagctgcagagcgccggctcttcgtcgggagagtcagcgcagaagctgcgttgccagaccccggcggagggcgcttgcgtgatccgagagagacaggagagcacactcccggtctcagtctcaaggtcgagcgatgcccgccggcgcgcagatgacccccagagttcagcggcgctggagacgaaaacgtgtagccggcagtgcttcctggaggcgggaagaggggaatactcgggggcgcgctcatcgtggtgtacatacaccggagaggcgtgccgaaagcagggttcaaggcactgggcgcgaagcgaacgcatgcgtctacaagaagcctgggcgtttcatggcgcggttcggctgcaagtgcgggctgtttgggcgaaaaaggcgaaggcaaagaagaaaacgtcgggacagtcgttcagcgaaaggaaaggggatcagaaagacgctggtctctgtagaaaaccacctctgcatgcgagagccgctctggggtgcccaggcaccgacaacgcattcgccggcttcgtcgagtttccacgagtccctcaactccgcaggaaaacgcatttgcccttgtgtgaggacttgcctccgtggataacgaagcggaacttgcgaaattgacgcagacaacagctgaaatctgcgacgaaggaaagaacgtgaacagactcgaacgcacggcggactccaaacagcctctgcaggggctggagagagaaacgccaacgggctgaagacgaatttcgagaacgcgaggcttcgaaggatgaaaaatcgagacgcaaacgcctcgggagtggagggagaaacgaacaagaaaaggcaggacacaccgcgcaacgttagaactggaaaaagaagcactgagcaagacgtgcatgcaacgacgcgcatgggggtgatcctgctgttctgcgtcggaaacacacatctagatacgatttcctgagtaaaaagtttcgcgatccagatcagatatcgaccggaaaatgcgagatgtccagacacgtaacacagctaaacgttgcggagttctcctctccagttgacttgccaaatgaggtgtttttcgcagcgctgcaggttaaccagtgctttctctacataaacgtgggaagtttccgacgtgagccgtctcgtcaaaaccataccgttgcaatcgatgatcttttcagttcacattggtgcaacgcacttcgaataaacagaaaccccgtagtaccttggatacgctgaatttgaatcccgctgtttcggcgtgaacacaacaaagttctgcatgacttctggcactctagtacctatattgtgctgaacgtgactccaactattacgaggatatgacaacccagtaaaatagtttgcgcatggttctgctagactcaagttctatcaaatgttttctgactttctgtagagctgtaaccggacttcgcgtggatgtcagcaagatctggggttaaaagctgccgaaaacgaaagagcactcttctctacagagttcagctggcatctgcgccgtcgttggcaagcacttccaaaactgccgttcctgctgaaaagaatgtgtcgtgatggtcgacaccaagcaagactgaagaaccactctcgcgaactttccttggcatctgtgcaaatgatcagtccaagggggatcactgactggcgtttcaccgtgagaaacggacgcagtagggaaaacagttttgtggagcctctttgcgacgtttttaaaccaagcggtgcaccagcaaaggcattcatcctcgaatcaaaagcgaacatgtagtaattcgcctctagctcccctgactagtggactggagtacctgcactttttcgtgcgaactcaaaaagcgtttcctagtgtggtgtcgggagacgggcgcaagaaaatcagggacttcgttgccgagcagaaagctgctttccgccctttaacagtacgggaaaaaaggagagctgaagtgctttgatttgagttacgaaaatctgagcgccgaccactacgagaaaatctctgtccacgaaccgactgagtctcgagtgagagctgtgacctctatgtcttcaaaacgcgtaacttagtttgactgaaacgtgtcctagatctccagaaatatcagcagaaaagggttcagggaaacccaaggagttcgtcctgacgacgaacgaaaaaggctcagcgatttgcactgtttttttcgttagagtaactcagtctgttattcaaagtgaaaacagatgcagccttccggcgcagcacactttcgctcgcacaggaaagttatctgcattcgagtcgcctctccctgaactcacatctacacggtagcattccgctggaacgcacacagatccgcgagacaaatactcactcctcaaaaaccctgtcaacaggtgtacgcccgtcaccagtttcttcgaagtagtcacgcttcttctttttctgcttcttcttctccttcttttcttccttgttgtccttctctcctttctgtccgtccttctttttctttcggccaaaaattctcactgcttcagccacctggacagagccgtcctcactggagaagagagagagcgccagaaaactgagaactaacagcactaagcgtccgagtttcattgtgacgaacgtcagtctgggaaatcaaacagtgaagtccgtgtcgacgcgcgtcaaaactggagttatgttgcttttgtctgcaaacttggagcggagagagaggtcacaaccgcattgctcggttctttccacgcagtctagctcaccgaaggggatgatcgacttctcagctcgctgactacgaactgttccgcgcgtttttccgggagaaggccggttgtctccgcaaaaagaaatttcgaggcactaaagacgagaacgaaaaaagacacacacgcgttgctcttccacgcgaggtttacaccagtgaaagccgtcaactctttgcacgacagtgtcttgtcgccgcgaagtggctagaagcaagtttccactatcagataaaatccgagaagaatctgctctacctggggaaaaaagacatcgaggaaacgtggaggaagtagccgttctgtttcagtcgttgaagatttgtagcaaagttattcactcgccttgtcagctctttcgtcttgtaaccgcttgtaccgttgcttcagcgaggctttcaacttcaggcgtgtctgaagatgacgacggaggatgctcgacgcatcttgtctaccgacggtctagcaaaacgcccgggcgacagctagctctggtaaagacccgcgtagggtccggctgatatggggcagtctcgggcggatttattcgagtgcctttcaggcggccgagagcgagacgtgaagacggcaggtaaacagccgcacgtcactcaaaaaaaagaaaaagctggcgctgcgtggggatgccgtttagagtgagcggcccggcaacagagctctgtagacagctgcacagaaagacaggtttcttgcaatctcttttctcccaagccctcccgcgagttttttttcgggaacacatctccgccttgtgcacaccctaaagtgtttttactgctcacgcgaactgcgaaaccctgaacgctctgcgaggcacaggtgtttcagcactcgcggcgaaagaggtccaccgaaaagaggtcacgggacagctccgaacatttggaggaatcaaaaaggacga

SEQ ID NO: 2550 - DNA, 2244 bp, Toxoplasma gondii
  source 1..2244: mol_type = genomic DNA
tgcatcttgtcgatgtcgatgctcaagccgtcgattttgattccgagcctctcgaaatggtcgcgagcatcctgagaaataaggaggcaaaatgtgtgagaaaaaaggtgcgatcggataaaagaaccatgcgaaacggcgacagtcacgcagagattcgcacctgtctcgcaaacgcgtagtgtttctcttctctcccgaggcagccgtctgcgcatatttgcgtctctcctttcttctctgtgtttctgtccaccctccttccatttcctacctcctgtcaggtttgacacccttctgatctccgttcttctctttctcttcgtccacgtttttgttctttgttgccttcctgtcttcgctgctacaccttcatcccgctgttcacatcatttctctctcaacgtctccggttctcccctttctcatgctcctttcgccatcttcacccttcgtccgttccctccgttctgcgcttccttggattatcttctcttcttcctgtctcccttgctctcccgtcacatgcgctctcccgcgttctccccttccttctcctctgctgccgtctcctctcgagatgacttacgacatatttgttgctgatgttgaggactgccttcgaggggatgcatccgacgttcagacaggttccgccgagagttccgcgtttttcgacgcatgcagttttgaggcccagctgcgccgccttgatggccgccacgtagccgccggggccgccgccgacgacaacaacgtcatacttgcctcctgcactcgcgaaacctctgcgctgcaccgcggaaggcagcagcgagaaagaaaggccttggtttttctgcgacagaagaggcgaacttcccgccggtcgccacgcaaccgccaggttccgaaaaaccgctgccttcatcgtgccgagcagaggacgaacaagtctgagccagccggggaaaccgcgaaggaggcaggtaacagcagaacgtggcggaacgcgtaggggagtcgagatcaggaagtggggactagccaggggtgttggaaaaagggagggggaacttggcggcggagaaagcgcagagtttgcgatgccacgcgaaaggaggcagccaaacacagagtgtcgagagtcgacgagaagagaagccgagagattccgtgacggaagactgacagagggacgcgtttcctggtttttaaatgccgggcaagctgcgccgccgtgactatggaaaagagtagctgaaacctagcgggaaaaaaagagacggggcgccgtacatacacaccttgacagaaaatggtgcctcgctgcctcgagacgccgagcgcgtggcttctcgccgcaaacaaagttccagactttcgcccaaaaagaacgagctcaaacggagtccctcagagacaacgtgcgcggcttcttttcaggcgccgccggcgaagtctggcggcattttctgcaaggggcaggcgggcagagtcttttcacggggaacttggcggctttgcgaaaaacgctgctggaggaaacgctccggaatccgtgcaggagagaaattctcactatggcggacctaggaaagaaaggctggagtcatggttaccgaaaaacgggttctcactggcatcttctctcgaaaagcggcattctggccaaactgacgacgacccacgagaagcggctgtcacacgcgaggggcaacggaaccgcgggagttcaccgtcggcccggaaagtatgtccggccttctggagtgacttcggcatctctcgacagatccgcgtccttcgcggagcgaaacagtgcaattacccgggaaaaccgattcctggaggcagtctgtgagacagacgtttgcaagaagggggttcgccgacatcctcgcccgaactctgggcgttccaccgcgaaagacgcccgtgtaggaaggcgaagaatcctattagccagaagagacagcctgggaaaaaccctgggttcttcctctcggaatgcatctacaagtgttgaactgacggagtcaacggtccacatttggcggccacgcgcacttgcggcgtctcccgggtgtatgtactgctcagacctgcgcgcctccggtgcttgcgttgggcagctgcgaacggagaggcgcgaaatcgcctttgtctgactttcgacccggctttttctcttcgccttcgttcgctttcccgccttttctgccttcccccccccatttaccttctggaaccttcggggcgcca

SEQ ID NO: 2551 - DNA, 1505 bp, Toxoplasma gondii
  source 1..1505: mol_type = genomic DNA
tgctcagttgactgaggcctgtgcgtggaaaagtgatgacgttcatgttccatgtgaaaaaaacgcagaggcttcggatttccgttgttgacagacgctttcttcttgcatctgagtgtcacgaccaagcacgagacttcgaacggctttccctggatcgagggaaacgactggcactcgcttttggttcacgcgacgcttcaactgagatcctcgccacatcgaaagtctccactctcctctgtatttagctgagaaccggcacagcgtcaggcgagagacccgccatgggagtgtgccgcctgctcggcggtagtcgcgtgagaaatggggcatccggcaacgcgactcaaaacaaggctagaaggcatctgtaatcgcggtgtctacatctgctcgaaacattcatatgtgcgtgggaaacgttgccgtgttcctccagttgcagaggcacgggacttttgtcaggagtgcccttttttggcgtttgagaactgcagcagaatagatcaatgacaggtctgcatttttgcacagtctagagaacttcagggttaaccgtacccgcttccatcagtcccccccctttcctccccctccccccaccccccccaacgctcagagcatatatgaaccagacatacacacggttcatgacgcaagaaccgctttctaatttgcttgacctgaggatccaacctggtcctaactgacttagaaaatagtaaagggttgaactgtgtgcctcctcttcgtgtttaatagccgcctgccatcaacacagggcaccaacgcgctctccttgttacactgcagtagtcacaatctgctgttccagctattcagaactgtgcacaacgattaacgacagaatgttttaccaagacggaaaccagattaccgtgattttcattgttactttaatacatggcgttcaattggttctattatcaccttaactatgttcctctaacacaacagaacacggtgcgacgttaaacttgctccgaaccctctccgtcgtttatgaagatgtggatcgcagtggaggcatagccacgacagaaagtcttcttgagatctcgcgtgtgtgtgtctcgcacgccacccgtcaaggcgtcgactgtcagtgaacgaatgagcaaatagacctggctagtgaagaggaattgggtgtgaccactcaaaccgttttctgctcatcgatcgaacgggttaatcgcgtccgcaatggccgtactgagacaaatttaaaatcatccgtgaagttcacctggagttagcacagaatccttggctctctgcaacgtaaacacgagcttgcatgcgcggacacttcggactcttgtttacgcgtgcaactgttctgcggcgtaagttgccggtttctgacgacgatcaactggcgtatgcttgaaactggatatgtgggttctctttccccagagtggctcggccgtctcctttcggactctcgaatggatcccttctagctgagatcaaca

SEQ ID NO: 2552 - DNA, 1845 bp, Toxoplasma gondii
  source 1..1845: mol_type = genomic DNA
cccgctcgattatgacttacttatacaagtaactacctacagatatgcatgtacacatatatgcatatatatatatatatatatatatgtatatatatatatatatggtcatgcatatttgcaaagacagaaagaagaggtcgatctacacagacagagacaaaagacagcacaaataagaagagatcaatagatgcgtacatgcggatacgcgaatacctgagaatgtacacatagacacatggatatgcatatgaatgtgagtatacgtgtgtagcgatatttaaagttgtgtgtagatggatttacggaggtacagctagagacttcgatctgtgcgtccatgcctagagatgttgttccgtttttgagtggaaatttgacggcgtgcctctacacacacacacatatatgcatgcgtttctgggagtcgagctgtctccacgcttttgcgtgtttcttccagtttctctccatcaacattctgaagaagaaaccgtttgtgtacggcatgcttcgaagtaatctcagcaacggcagcctggagacgcgccccctcccgcgaccgcccgcttgaggtgtatgtacacctgggggtttgtccgtgtgtgtttcttttgtttttccccttctttgctgaatgcaagagcgacaaccttgcacactttggtctttctacggagggcgtttgatttccagatttcgaagtgcatcctttcctcggtcttcgaccgcacggcaaagagaggtggaaagaggcattttgtttctttagagaaggctttttcgtttccctccttcctcgctgcctccgtccttttttcgacatcttccagagaaagtcgcgcatgcgcgtgctctcatcacgcggtgccagtgcgcgtggtacccatctagaagtcggcgagttgtcttgggcgttgtcactttccgagctcgtttttcttttctttcttcttttcctcctttcttctggccgttgccgctggcttctccaatttttcctgcttcactgcctgcaagtttcaccttgctgataccccggcgcatccctccctcctccagcgccggctgcttgtgtctccaccaaccgtggcaaagcagggcgtttcttgacagatccccgagagagatcgaggcaaacgagaaagaaaatcgcgagaacagaagaagaggaaaggagaggaggagtgaagaaagaaaaggacaaacgaggcaggaaggggagagaaggagagaaagacccttcgcgacgcggagtctgtcgaggtccagtgagtcttcgacgcggcgacttcactgcatcgcttcttgttgaaaaatgttgaagaaagatcagaaagtgtgaattaaaaatgcttttaaaaagacacacacgtgggcgtttctctggccgagctggaaagtggagaaagagttaggcgtccatctcttcatctctgtcgagacatccgagacagtcccgctctgttcgctttgtcagcggctgcaagaaacgatcttttttcggaaaaatcgcctcttcttggaggacatctccacgttttttctcctttcctttcggagcctgccaacgatatcttccatctccttccttctctttgtctcctctttgtctcccttcgctattcgtataggaagaaacccggttcctcccttttttggtgtcaagagtcgtttcggagttaggcaagatacctttctccagcactgcgactgctccggcagcgaacaatgctcatcaggctcaggttccgaggaatatacgtttctctgccttcttttttcgccttctcggagtcgctgtgtgaaggaaagtttcgcgtctcttcgcccaggccacca

SEQ ID NO: 2553 - DNA, 4813 bp, Toxoplasma gondii
  source 1..4813: mol_type = genomic DNA
atacaaaagagaatgcctcgcggcaagcagagacaagacaagtggcacgtcaggctgacgagcagaaagcagcaggaaatactgacagacatttcgaagacgagggggacacggcaaactctacttgtaataaaaagtgtaggaaggagaactcacagcgtgaggggtccttttcgaaaggcaatgcagcaaagtcggaggccgataatgctatgtcaaagacaaaagcgaaaggaggtaccagactgtcaaatcaaacgttaatcagttcgttttttcgaaagaaacactgagtgtgtaactcctctagtgcgttttttggaagattcggtatgtggattgatgggcagtggctgggcgggcattcagaaactgagtaccgagcaactgtggcaggatggcatagggaatcttactcggtgcttcgtgtttgccgagacctgtgaaaagttgatgctcctgttatggcgtacacatgatcagaaccttgcacctttgctttggtgcttgctcgcgtgttcggtaggaacaccacgtgtgtaagccgtggacttgttcttgtatcatgagaattgtgttgaaaaaggttttgatatacgatgatggactatagggggaacggcgtggagcgccggcgcgcgacgagtgttttcagatataacctaatgtaaaagggttcattttctgttggaggtctcctcgtgcgtaggagaccgatggacgaagttttgacgccgagtgtgttactgcgcttgtttggcgcgcgctgcatggaatgcagttctgctcacgctttttctgcatggaatgctgccgcgttgcaaatttgaaactactcgaacgatgggaggaactgcgttctcatctgcacaccccatctagtacgaaaagaacggttacaatcgtaacttgttacatactgaatttgttgcggaaagcccgaaacatgaaatgaattgcggtcggtccacatacgactgccacggtgcgatggaccggttctagaaacggcagggttcgttctatcaagacacaggaaaccgtcaccagtcatccgtagcagcgcgacacagtggttggttggagacgtttgtgatattgggactgtgttacaatgtgagaaaaccaaaaagaaaaacaatgatgatgtgtaacgatgatgcctctattgtcagccaccgtgaagattgaaaaaagcagactgccaccagccgagtacggtagactacagaattgctgtgatcgcatcgacataaaaaactcgcgtatacgtagatgaaagaaacctgtgatttgttgaagacatgcggctcttctccttgcgcccacctcaagatacttcatcgaagtgatacggacggttgccgagtttcctgccacggctcgtaccacaaaagaaacagattaataatgccatcctagagattttgaactcgctgtcctcttgcactgctatggctaaacctgtgccgtgctctggcctccgcttcagtttgtgtttgccacgtattccagtgtcatggagtagaacatggcattcgtttgagttacttcggacagagccgaacaaccgtctcctcatgcgccccccaaaaactcgagatgaaacgcttggttctggtgcgctctgttgaagaaggtgctggaggccacccaattaccaccatcaatagcgaaagcttccgtcagaacatcgaacgcttcatctgcttctcgggaggcgacgtagccaccaccacggtcacaattgttcaaggggttagtcgttatcattcgtccgttcgtccgtggttgctagaagatgtgtcgcctcactgaccgacggtctccgaagccgccgcagggcgagttctggctgcacccgaatcgcggaacaacagcctgcatctctgtacccgtgtgacgcgggcgcctctaggttgaacccagcattggttcggcgaagcgactgtaaggaacaaggctggcagtcagggaaagggtgtcttgcgctgaatgctggatcttcggaacacgatgtgctgaacaatcgtgaagttctcgcactgcttggctctcttgttccctgtcactaccgtttctgttgttgttgttcctgaagacgtttcgccttctccctcttgcgcttgtcttccggactttcttcgtccgcaccaagaaacggtgtgtcctcaggcatatgtccagcatatgcttctttctccatgcgcacgagcttctgttgaagacgttggagtttctttttgtaacggcgtcgttgcaactgggtgaggccgacaccgattgcgcctgcaagactactagcgatgaggcccatgttattccgcttgtgcactttacggtcctctcgctcgagaaattcgccctttttgtttgccatccaatacactagcatacctgcggatgccaacgccatgctgacaatggacgcagccccagcaaagctttttttcttctgcagattcttgaacttctgtaagtctttgataactgcaggacaacgtcgcatccgatcaagcacattccacatttgacaataggtaaaagagcacgaacagtctgtgacatcgggcggtttttcggcttctttgcctcgaacacgtggcggacgacttgtaatttgcagccctgggtggccagatcgtcctttatacctactcttgggcagttgaagcatcaacagagaaagcgaagaggcagcaacacctactttacaaagaaactccacagcggcattcccattgtcaagcgagtactggaacacttacatgcgggcgattcttctgggtccaagtcatcatcttccgattggtactgttgcagaagtttttttctctctctgtcagctgcacacacaccagacccgcgcatatccaatttcacatcgaaggctctaagacacaatttttagcaagcggcttcttggcgtccgacctccgtgctactaaacgtgtccacagcagaagcgtgctcgaacatttgaatgtttctaccgcagacgcaatcacccagttgctttcaccagctggacacaggaccaccactgttactggctccagagttcaggcaaggataaaggtcactaggatgctaaattccagcacctttcacctgtcttacgcagtccagtgtggtggtggtgcagagacccaagagaactgggctgtctgtatcccgtatgtggaaccgcatttgcgcctacgtttcgttcaccacgaagaaacgacctcccgtgcctcccgtactttgcccccaaagtactctccgttcgatccctacctttcatcttgcggtattcgcggttctccgaaagaagctcgttcatcgtctcgagaagctttgtctgctgctctttgcgcatcttgcttcttgtagttttctgtgcattttcttctccatcctttgcgtcgtcattgtcggccgttgtttccactgattgctgattctttttcgtatttgctgcctctctccggtccttaataacagaggggccgttatcagtcaagtcgagttcttcactgcctcctgcgccttgctctgtagcgacatgcgctccggaagaaggaggtcgcgcagctgccacactaagaaacaagattccgagagcaacaaggattgcagctctacggagtaccgcacaccgcacccgatacagtgcccagatgttgggttttgagccgttcggggcctccatggcggcaagggctgaaccggaaaatgaggatgtatagaggtagtggcgatgatggagtcctgtccagctgtgtggagatcatattccgcagttgggtgtgcactgattcttaaaaactagaggcagacatgcaggcgggcgcgagtggagccacagttttcttttgcccgaaatatcgaggcgtccctgcccgccggaagtgctagctctcatgcacaagaccttgactccaaactgttatttgtccaagatccaccactccaacccaatacggacaacatgttatcagtctcccgactgcgaattaaccatgacagtgaatttgtccctgccctccaatttgccagatcaccacactaataacctctccgctgaatgcggcaccggcagctactcaacggtctcgactcttgggcctcatctgagcagcagctttcagaagcgggctggcatccgggaatgcccctcgacaattcatccctcccgaataaatacagaataccttcagaaaaaagccattctgcgccatcgcaccactgttgattggaacttcgtattccaggtactccaagacccccaacgagttctcggtcaaaacacgtggctcgaacccggtgtactcttgacatcgcctcctttaaggcgctcgtggcgaaccaccaccgcacgacgattggtgcctgaaagggtaccgccggacataaattaaatcgagcccaatcaacccggcttataataggagaaacccgaggcagcagcggttctgcaagagaccgacattgccactaagcgcgatggcgtccccagatgcgcgttctcggaaggagttgcgagggcgtggacactagttcttatcgtcgctcctgccatcgccacagtggtggaggattattattcggcaaacttgttgtcacacttgcccacttcctcagtctggaaccttttggttcgcacgagagtccgtaccgtcgtttcgctgccttcccactcttgagttggttgtttcacgcgtttctgccgcgtgataggtgtcgactaaagcggtgtggggttcgtcatatctttcccccgctcggacctacgcaatattttgacagtcacccattcatagacgaagaa

SEQ ID NO: 2554 - DNA, 4376 bp, Toxoplasma gondii
  source 1..4376: mol_type = genomic DNA
gaaacggaagtgaagatcaaggcggtcgtccgtaacgtccttagtactgcgatggaatgcagaagacgcaacatgtctgtgttacttccgtttatcaccgcgaggagaaactgcaaacttttggagaaacgtgttgtgttccgtcggcaaccttgcctctatcatttcaacgagctgtgtcactgaattataaaactgatgggtctacatacttgtgtcagtgtaagcagggttcgtctaaaaccaggatgtaacaaagaacgctcgagtggcaagtataaacctctcgcaggagtttgctcatagagccgactgtatttattcggatgtggcagcgtacattgccaaaatgaacgaaggttcaacaaacgttcagatgtgaaaaatctacattggccggtgtgaacggcattgcacggtaaaagacgaattcagccacttcagctatagatggtcaagtgacgcagttcacgctgtacttcgcagcaccgtgaggacgttttgagacaacccacgtgtaccttgaaaaaaggcgtcaatatgcgagtcagaggttcccagacattgagagtttctgttctgatgccgtagatcgagccaattttcttcagacaggtcgcctttcaggattcttgagagaacgagacgttagcggaggtcacattatgtactgcgtgactttcgcattgctcctagagtcttcgaagcattgtgcatcgcctgaggtagtgaaaaaaagaggttcccacaacaccttgcacacgcgtgacgatcagggagctgatgccgcatggcgaagagagtcaaggatggcttggtgcagtcgctcaagattagcaggaatttcgatcaactcgggtcgctctaaaagaccgggaaactcaatattggtgaggtttccgaaggcgctgctgccgtccaatttaggcagctccagagtcggtaagctggggagtgccggagcatcgctgagctttgaaagttgtggtaggtcgccgaagcttggtattgtcggtaacccgctgattattggaagttgaggcaggccactcagacctgggactgggggtagctccccgagggacggcaatggtgggaattcgcccagacttggtagtgatggtaactcgccgagtcttggtagttgtggcaactcgccgaggcgcgggagttgtgggaaaccgcccaatcctggtagtggtgggagttcaccgaatcctggaagtcctggaagttcaccgagtcccggtagtggggcgaagtcacccagacctggtagaggtgggatgtcacccagacctggtagaggtgggatgtcacccagacctggtagaggtgggatgtcacccagacctggtagcggtgggatgtcacccagtccagggatccggggaagttctccaaggcgcggcagctgaggtaagtcaccgatgttcggaaggccagtgaagttaaaacctgccagctggctggggattcccggagttggagggaatatggttggcggaggaagggacggcggcagtcctatatttccaacaggaagtgggaaaagaggaaaggggatcggtagtggctgggggaccacgactggaaaatctggggcagaaggaggtcctatcggcagagggaataggataggcggcaaaacagggaggccggggggagattgtgccggggtatcacccgcaggttccggcagcgtggtaagaagagccggaattccgggcagtcttgtcaggtctggtatcatcgacgaatgcggcagtcctggcgatgcagctggctctggtgccgcgactgcctttggcacgtcagaaacgccatctggatcgcgagcgtgagcgttctgtggcgctgcaggcgcctcggttggtgtgtccagttcagttttcaacggcaaaaattgggcccctataaataatcagaattaataactgttgttgtttgatacctagtgacgggcttacttgcagagacgaccgctccaagcagagtgaaggaaactatgaccctcattggaaatgtgtctaaatcagaaaactgaaggaaagtgtcggcagaaaggcgccttaattcaaggtacctggagtttgtgtaactgcagtgccgtcacgatcgtgctgaacacgaacgtttgcctttggtttgtatgtacacccggagttgatccagacactcagatatccgcgaagggatgttatgtacaccacgtttcggcaaccgtgtcagaaaaacgtgtcacgggcaagaagatcctgcaggaaaatgaacatgtaattgaatctcaccgtgtttgcgtcattaaatggtatatcctcgctaatggcgccaacagatttgcgtcagcatcagaatcagaaacatccaggaaaaagcagaagtgaacgcatgctgagaaaatccgcttggcctggacacttttttcacttgtactgttgtcattaaccaagaatatgcattgcatatttggctcagcaaattacacccatgttgctagttggtttttattgagtcgtgtgcttacggatgcgtccggttctgccacgcaacgatgtgtcgtcgggaactctcctagcctgcaggtagacagtttcctactccatttcattctcagaaaggccagcaaagtggaatccatgcatgcaatggcaaacgcgtcttgctgtcctgtcaaggacatacggctataatgtgccttcatgtgactcaatgacctttcgttcgtctcaaaaaaaatctttactcccccacgcaaaaaaagcattgttcaagacagaagctcgtcacataatgtgagagcttggtctttattgaggctcgttgttggcagaacgaggtggaaggttcagtgatacatatctgaagtatattggctcgatgtccgacgccgccctccgttgcgtatgcaaacgtgggcagtacgtgtgtggctatcgacgttggcggagtggaatagcacaccgcaagcattcgctctctctgcgttcatgaactccttctgcgcatgtaatgggtatagcaatctgtttcagtgaagcgatatcgatgctacaactgtctgagacagggattgagtcgtccttgagcggcggtgcagctccgcaggaaatacagaagatgaaagggacggcggacgcggaagaagttacaatctaccgcagaaatggtagatgagctactagttaagatatgtcttggtttgaccgaaaagaaaactactaaacagagcttctgtggggggagcaaaactggcctatttcatagggtgcgtggctggaggcccctaccacagtcactgtttagcacacctttcacgctctctgtaaagctgctggattctttctgacaagctttacctgtgctgtagtaattggagggctgcccatttctggtcagaaggatattacgcaaggtggcacaaaaaagctcactgacggcgagcggtgctacccgcctcaaacgaatctcagcagctaggacactgcaaaattgacagcaaaacgggcgcatgcagaattcagcagtctctcttacgatgacgcatttttgtgtctaagattcatttgaacgctttcggtcattgacaactgctaagacagctacctggttcaaaaaacactcgttaagttgagcaatctccatcttgtgcgagttttgagagagcatgcggagcccgtcaagtcttggttttacatgacaaggcgggcggttagcgattgtttgtgttaacgttccgtctcgaatggaaatttgccgccagaaaagaaggcttgcctacaaattgtttggcaagagtttacatgttgaaagtcaccatcctctggaaaaaactgtgaactgacatttgaagaggcgctcgcgcccgccgttacacaggcacgacagaacgcgctcctgaggaggcacggcgaggttcgcagaaagaaacgccttcttaaggccgaagcaacgagagtcttcatcggcacactaaatacagctgtttttcatatcttgtgtgcgtgcttgtctgaaggatgcagcgaagtaggttgataaatttggggccttgcctcccaacgacatcgcggcgctacctccctccataaccgagcatcgcgggtagccgagtggcatgcgatgtgtgcacttgtgtctcgtccttcgcatgtgacttccctcaccgtttttccatgcgcactgcttttacacgggcctgaaggagaatctgcctcgacgagggagaagcttgcgcacacttcccggtgacggtactcttcgtaaagaaaaaaccgatgaaacgctgtgactagcttccagcgcaaatactgctgggggatcacatctttcactccatctccaaagagttatttgggccgaagctcatgagctca

SEQ ID NO: 2555 - DNA, 2278 bp, Toxoplasma gondii
  source 1..2278: mol_type = genomic DNA
taaactttccatatttctcgcactctggtgtgttgtcctgtgcatgcatcggttgcccgtgaatttgagggttcaggcctttctacgtccttgatccgtgagcacgctgagcagacagcgaatgcagtcgtttatctgacagggatcttacgaaaagcgcaaggctagtgaggtgaatcggcgatctttgccggagcaccgaggcactgaaccctacaaggagcgaccacagcctctgtgaagaaagctggcactggaaacgcaaagatcaccgcaatgctgtatgcgaaggctctgcggaatcccccgagcgtcaaaagggaagtatagcgtctcgtttccttctgggtggtactttacgtcgtccaaaatatctttcaaatcctacgggaacacacaggcctgcagaacgcactggcgttccttcttcgaatcgcagtctccttctcgcgtgctgtggctcgggagccactaccattcgctcctttatgtgtcagtttccactttagtcccttccgcaaaaaagcaactgtctctgctctccggatctgacgaaacacattctacgcttctttcgcgccgcgtcggtctgtccaggagcgcggggatgcatctcgcaaagactgaggagctctggaagtaacctgttaaacattcatctagtcgagttgacgtccgcagtgctacacaagagaagatttttcagatcctcgtttcaaaaaatggccactggtttcctctcacaccgccaagaaatccccctagacgagtccccccccccttacattcatgtatgcatatatacacacatgtacatatacaatcatatatatatatatatatgtaactatacatggaaacaggaccttcgttttcactgctttcaacgtggatgtacacttcagctgtggagaagcgagcgtgccttgacgagaatgaggccgttttttcaaggctccgtcttgtcgttagactaaatccttgatgcagggccgcccatttttcagagatgtggaggtcgagaggagtctgcagacttgcgtcatgacacacacaaatgtttatagttcttattgactgtttgcctgcatccgagcatatctagaaaatcatacagttgctcgaatcgctgtttgcatgtctatctttgcgtgcatgtgaaatactgcgcgagagctgaacttctgcacatgagtgaaacaccaaaagatcgacgaacatcgcttgcagaagtttatgcatgttttgcgtcgacttcaatgtctaattttcgatagatttattttcacttttgaatatcactgacttgtcaatctgtgctgtgctgcctctgtggggtgttctgggccgcgggtgatttgtgcatgcgcgtttcttttttcagagactcgaggccagaagagacatgcaaacttgtcgcaaaagaaccttctctcccatcgactttcgacttgatcttttctcagcgtaaccaaccggaagaaaagaaggagagcgctcgagttttgcaactcagaggccaatgcgcgagtctgttgttttcgaggagactgacggcctcggctctcgttttctaagggaaagaggaactcgtcctgtctctcttttcttccgtgctgcctttctctcaggaaccagcgcggtcgtcggtttctgctctcctttagagaaaaacaggttctttgtcttttcgtagagtctccgctgtcgctgcccagcacccgtgtctcgcgtttcacagttccttcccaaagacgaacctaagtttccttcttcagtctcgctgcatgcgtcttcggagtgctcaacttctcttcgatgcttccaaacagggcaggtttttttcgcttccttacacgcaggtcgtccccgcccgcaaggccgaccttgttggctagtggggagcctgaatcttcagatgttgcaaaaaatggaagaactccctcttacgtctggtagcgaaattggattgccgttttttttcggaaagcatgaacgaggctgaagcacgggcgacgtttcttctgctttttggggtgcttttttacgcggactagactcgcccctttccaggcttttaacagcggtcaccgctggaaagggagacacttggttttctgtcgcaaagaattctttttctcgctcactcgaacggcatctcactctttctcactcttcgcttcgcctgaagactgccggcctttctctttcttcttcctcttcttccccccttccgtttttctcccttctcctcgcttctgttgcctctcctttgcaa

SEQ ID NO: 2556 - DNA, 1861 bp, Toxoplasma gondii
  source 1..1861: mol_type = genomic DNA
tgtctgggcagtgaagaggcggttgcgagagcagagttctttcggcctctctgtcgcggcgacggcggtcgcggcttgcttccctcatcccggagagcagagacggaagagacaggcgagagcgatgagggcgaacggcgatttgcggggagagaggaagcttctttgctttcggccttcgctcgtcgctgtgtctctcggccgccagaagagccagaggcagatccttgtgggggcgctgccagtgcggcagaagcaaaggagacagaggcagagggaggagagcggagagacgaagtccgaacagaaagagaagggcatgaaggagaagaagaccgaggatacgcggaggaagaagcaaaggacgaaggagacggagaataagacgtacaagcagcagaagaagacggagaagcagcaggagggtaaaagcaaggagagagagaggaagagtacgcgctcggcgcgcaaggcggataagaagcagacgaataaagagaagaggaagaaggattcgagaagatagggtggggaggaacagtgtttggctgcattgcggaggaaagaagaagtgaatataaaggacgtggagaggagaagagtggagactttcgccgaagacgcgatgtgaggcgagagagaaagaaacacaaaagttctgaaagcgagaacggacgacggtattaggcggagaccacaggcgaagatcgaccggaattcaagaggacggaaagaaacagacgacatacaaggagacagagagaagagtgaaggcgagaggaagtgtaagagagatggagaggctagagagaagaacaaattagatgagtaggctggtaaggaggcagaggatcacatctaaagaaaagagaaaggagacgaacatgaaggcgacggatgaaaaagcgtcctgcctgtcgcctctcgcctgtcgcctcttgctttctttctgcatgttctcgattcgcttgagggagtgtcaagacagtgccagtttcccggaaaaaaaagaaaacgaaacgtttttccacttgcgccaagattcagctggccggcggcgcatgcgcgagaagggaaaaggcggcccccagcttgctctggcagtgtctcgacaagggaacctgtcaccgtcggcgaagcagcaacgaccgaggaggatgtgtagaatttcctttttctttcttgaaacaagacaagccgcgctgcgtctgtctctcgcggagaaggcgtcctctcgctgagactcgcggcgagtttcaggcaggaagtcgacatacatgtctcagcagaccttgaggagcattctcgtgagtattatatacacgcgttaaattcagcttgctcggattttcaagagctgcaagccaacgcatgcaaattcttttttcttccagcagtgtgctgttgattcttgtcagtccacgtcggctgcactctgggcagaaactgtgaagggcgaagaccggaaacgcaggacagctccccttcttgtcgcagctctcggtcacctgggcgaacgcgcagaatgtcctccccagaaaacggaggttaggaaagcctctgaagaaactgctttgcttcctttccaagggacgtccttaacggtttcttcccttcgcagagtctgtgcaggacgaggccttttctctctgtttgtgagttccgtcttggtctcagctccgcagctcctttgtcttggaggcgctctctctcgtttcgtctctctcgcgtcttcactctaaaactttgtctttacgtaagattttaaaacgactttctttcgtaatacttaatagtgaaaagacttctattacagatgctaaagtcttagtcgtttgctctcttctttggcgaaagaaaa

SEQ ID NO: 2557 - DNA, 2065 bp, Toxoplasma gondii
  source 1..2065: mol_type = genomic DNA
gagcagacagatgtggacatacaggtccggacaaagagtcgcagacaggcaacgccacctgaaaacacacagtgaagactgaaaacacgtgttggtttgggtggggaactcggaagccgctggacagagtccctgtcgtcggacattcaccaagaagtatcacaggcgagaggggggcctcgcgggggacggggagtccatcaggcgaagcccagcagatgggagagaggcgcgtgggtagatatccctgccgtacgaaccgtctgatgagcacagaaaaagtgaggcaacacctgtacagccttttgcgcgggatagtttccagcgggaaaacgtactctcttagggagaagctgatcgtggtcgaccatcaagcgatctcgaacagcggcgatgacatagtctgaaacagaaggatggaggttgagcgacgcctcgacgccgagaaaagaaaagggccaggacagggcagaccgtgcggtcggggaactcgcagaaattttggggtcgcgagaaacataaacaatggacaacgaaggcgtagagaataccgaggcgcaaagaggggaccgaaaagcaacatagagtgaagacagagattggaaaaggagcgcgagggcagtcaagccggaaagcagactgcggcgtcgcggccgccgcatgcagacggtggtggcaggcggaggaaccccttccggggaagaaccacatggaaaactccccatggttccggaaatctcttgaaaaagacgcgacagacggacaggcaaacacacgaacagacttaacggaccccgcctccgtttcgtccgtcctttctgcctgccatgcagctgcttgggctgcgcgtacccgggagcgcttccgtgttttctcccgaattctgcgagacagactgggaaaaaagttccgggaggtggcaacagtggaaaagaatcaatcgaaagagagaaaaacgacagaaagttcggcgccgctgccacagtgtggtgaccacgtcacagacccgcacagcgagccggcaaccagaatctgaaacagctacgtatcccaattgcctaccccgataacttcaaggtataaaagtgagaaaatcaccgattcatgtggatctcgcattttaggatgcttcagagttctccaccatcgggaaaaccaacaggaggatgctcacggaacctgtcttttgacggcgggctccgcgcggcttcaagggagacttgtcaactggaagcagatgcatatctcgaccttttttttaaacgctccgagtctcgaagaagggtgcagagaaacaggtgaccgatgtcgtatctttctcatctgcgaccacgctgggtgcccaagcgcatgcgccgacggcacggcaaacgaaacggtgaaaacccacccgtgcttcagctgcttttgctcacaactttgcctgagaaggtgaagcaaaaatggaaggcaagacagtgacaggcgaaagtctccacagagcgtcgctatcggcggtaatgttcaactccgagactgatacggagctgcctgtcagagggctgcatgcacacggaaggatgaggtcatgtcaagcacaactgcaacgtggatttctcggatgcagccgaaacgctaacttctttcgataaacactgtctcgctgaaggttactctttgccgttttaagaaacaggagttcctattcgagcaggagcgtctctccagcactgtcgtcttctatatgatcagttcgggagtcttagtccacttcatacaggaggaaaacatctccgcgccgatacttttcacttccatgatgcagggaagattaaacagacagacgccgctttctctttctgcgaacaggattccggtgttcttgcgacatagtccaccggcgaataggcggagaactgagggtctaatcgaacagagtttagcagcagagctgtaaaagcggctgaggtacactatcgacttgccgcattcttggacgaaaacacatcgaccttaggaggtacagggaagcactgtccgcagggtcaaaatatagctcggcagggcaatgcctgagagtcgatat

SEQ ID NO: 2558 - DNA, 1890 bp, Toxoplasma gondii
  source 1..1890: mol_type = genomic DNA
acgaagaacgcgaggcaattgtacagaaaaacgaaggaggcgaagaacgaggggaaatgagtgaaagcagagaagggagacccgcgtcaagaaagacaagatgcgattggcacaagcgaggggacaggaactcgcaacgcaagagagaagagcgacgaacgttaggaagcattcacaagaaagatataacggagagagacatgactaaagagacgagagaagagacaggcacccccagagaaaaggggagcaatcggagagtgtatgttttctttctcttccccttgcctttcaaccagtgcctttcgagacacccttcccccgctgtcattccagcaggtagcgcctgctttctctcttttctcttttgtctctttctctcttttctctcgccgcgtcaaggctactcgacatccggggcgtccaacatccattcgcactctgctggagcagcagacctgcgacgattctttgaagacgaggcctccgaattcgagtggagcgcggctctgcaccagacaagacgagcgcgtagtctgtgcggtaaggagacagcgagccagagaaaagaaagagagcagagagaggcacagagagaggcagaggaagaatcacgagaggctgggagagggagaacagtcgaaatgagagatgaagaggaagagaagaacgcggtcacgaaaaagagaacaataaaaatacaaacgcgaaagagaaacgatatacacacgagaggcgaacgaaaaaaaacgaattgtgagcacctaagggaggaaccgtggggtgcgtcgtctctcctgtgttggcagaaaacgaggtttattccgaggagagagagagaggcaagaagaggcttaaagcgcgtaaattagaagaaaccttggcgcaaaggctggcaaagggcaagtctcgtcgctagttaagcgccgccaagccgagattgcatgcccaggacaggagcgtcagctcgtcgtgagaagatttttccagaggagataaaacagaagaaccctcgaaaaacgcaggtgaagcgaatttggaaaagacagggaaagatccactaacctatgaaaaactccgacgcgacagcgagtctttctttgcatgcgctctttttgctggaggagaacgacgccggacgcatgcacggggctttcacagcgaaggaaaaggaagaaacttcggcgccgtgttttcacttcctttctcttcttctgtaaaacttttccggtccttcttcttgtcctttttcttcctcaagctgtgaagaaggtggcggccttgaaagcccccccctcgtttcgtcgctgctagggaggaagcattccgacgagattcctttgtattcgctggttctctctgtccatcgttttttttcggtttgtgtttcctctgttctctttttctctcttttctttttcctttctccctcgcgaaggttgcgcgttcagtgtccgtctccgcggccattcgttgtctctctcgccggatcgacactcgcacgcggggcctgtctctcggggctggggacctgcccgtcagctttctcccccttcgtcgcgtcgcttcttcttttcttttttctcgatcggtccatctcttttcgactgctcagtccgcgcgtcaggaaaattcgtcgctcgcccgcttcttccaccccagcagctctcaggcacacaacttcgcagagccttcctcgtcgcctcgggcctctccagcttctccggggacgcgaagcgaacctcctcgtagaggaagcgaagagggcaagcagcactgagagagggcaaagggaacgaggaggaagagcaaggacagcgaagacgaaaagaagagcgcgagtgggctccggccgttaaaaaaaagtcttctctctgtatctgtgcacca

SEQ ID NO: 2559 - DNA, 2252 bp, Toxoplasma gondii
  source 1..2252: mol_type = genomic DNA
tctttctcctcgctcgaggtaggcgcagatgtgcttgtcgaagaggaaggggcagtttgcggccgttcggtcaccacgtacacctcttcgccgcccttctctcgacggctcgggttcgcatgttcgactctgcgggtatccaccctctctgacccccacggcagaagcacatcagcagcctccagtggagcttttccggagacagcggccgcctgccagtacggagaatgaaacagtgggttgtctgcgtctccctctccatcgtctgagcgggaatcgaccgccctttccccgcttcctcccttcgcagaaccgcggaaaggattggcctgcgccacagatacctgcgctcctcttgcatgtcctggtccggcgtcgcctgcatgtttgcgtctgtgctctcgctccgtcccttcgtttcgtgtctctgtcaataaagcgcctgtctccaggccgtggccaaacaggctgtttgtagcgggtgttgcagtggcggcgagtgcatgaggctccggagaggggcgccccgaagagccccctgtgagggtcactcgctcgttacctaagaacgagggcaagaccccgagacggaagaaaggggaagaaagagagacaacgaaaaacagagtgaacaaaacagacggcgcagaacgcagaggactgcgcaagtaacgcgctgccctacgcagagccccacaagagagctgcggcgccttacgggaaagcggttcgctttcgatgccgcagggaggagcggaaagaaagcacgagaaagcaaaagacggagaaggtaaagaagctgtactggaaagggcaacaccagccgagttcctagcatatggacggacaggggaatctactttccctagaaaggattgtcctgtgcaggacctatgaaatttcgcggatgggaaactgctgagacaaagacacttcctgggtctttgcctctgacgtcggcccctcatcacgctcaacttatgacgctactttgcgagaaatgcaacgcgagaaactggtgaggttgccagaaagtgtgtttgtatcgtgggtgatcaggaaaaccgtggggataccggccccttaactgtgcaaaggtgtcattcacaagaaccttgtaacaatcttgtaaaaaagggaaaccgttgagtttctcaagaggaaaaaacgctgcgtttcgtccgcgcgcgaacgatatgccctgaactgcgttgcattggggaacggggcccgacagacggcgcgaaatactttcggctccgagtctcaaaccatattgtagggaccaccaggaaaatgtcaagcaggggccaacattgccactacctagcgacgaacacacgatagcggagagtcacgctcaacggaggcagatttactgcgatgtccccctcgctcttgctgaatgaactgttgctcggtccacaagaaaattggcagctttacaaaatcgtcttaagcacacatgagaacaatcaatcgaatataagaataatctgccctcgggccttgtaccagcagtgcgtaaaatacagctgttccgtgtcgagtcatgcgacgttgcgctgtgaacccccttccccctccccccccctgagtttccctcgcgcaccgtttcccgaaagagagactgtcgaaccctcatctgctcatgctcaccttctaatctccatgttacttggcggctagtctatccttcatctcctccaatatctgcctcctcgttcgaggcgctctcaaggatagtagtcagtggaacgagctcaagtgaaattgcagcattgaaatgtgaatgcagcaaccagcgagagtagacactggatttgacgaatggaaacctgaggaacagccgagcgcagctgttgggcagagaggaattctggagacatcaggagcgtttctgtgttcctgagtctttatgacggatttagttgttttgcttcgctcccctgtccagcgcacggacttacctggtacctggagtgtacgcagacaaactaatgctttgctaacatgtggtacgtaagctgcgctaactcgcgtcagccgcgaggccacatagtgcagtctaccgtggcgggcttttgttttgggtctccggaagaacctaagggatttcctcatttttgatccacatggtaaagagttcagcagagcaacgctaggtaggaccgggaaggaaaacatcgactgaaataccagttacatcaaggattcttcgtacgttttgtgcctctgagcatcacagatta

SEQ ID NO: 2560 - DNA, 1944 bp, Toxoplasma gondii
  source 1..1944: mol_type = genomic DNA
ttctcacaaacgataccggccttgtttgtctcgccgttcgagatggtcaaagcatcggatcgtcacgaggtcgagagaagcgatatcaactacgtggacccattcacagtgtgtctactggcggggaacaacatcagctcgcataaagggtcaacgagagctctcgccggtgtccattccagatattggccaattgaagcttgcccgtgacgtgataccgtgacatgcaaggaccgctatcatattgttgtcgagatgtttgtgtgcctcgtttcaatctgtggacaggaatcaggtatcttgtgctccttgagctgctattccagtgtgagacgtgtcaaactgccgtttcagtcgcacagcaaaagggaaccagtcgtcaggcatgacagattaaccccagcgctcgtgtatatttggctggcgtccgttcggtgttagcattatcctgtcccagagattcgctgaacggctcccgtgcgtgccgaatgtcccaaaggcttcatcgagtggcgttcacaacagtcgtttccaaacggcggctagaatggaaactcgaaccgtttcatattggacttaatcgtttattgagagactgccagttgtacgtgttctttgcgcaggcatttgcctctactgccgctccattcactgtccataaacgaaaacgctagacatacctgcacgaaaaccaagctacttgcggagaaccggcagtggtgatctcgcttaaagaggagcattcctgtacgcagactctgcagtatggttagtctaggcaggtaacggtttttacaggccaagtatggtcatgggcacctgttaattacgatcgcccctgccagtgtacagccacggaagactaatttcgagtagatgctactgcacatcgcatcactgatcagaaagcatcagcaatttgctttcgataccagactacctggtaccagtatgctctgtgcaattcgcgatccagtaatgtatgactcaaatacaacagaaagatactataggtatctaatatgactcgaagtatgttatagtctttttggtgataacacagttccttgggtattcagtctagtactctgcctttggtcattaaaaccaaccaggaggtcttcgccccaaaacacgagagtgtagtgcagaatgtttaaagtcgcttagcgacagcgtcaggattgaaacagtaagctcatcagatagaggtctgccaccgaacattatatcattcaggagagacatcctcttgtcgcgtttgagttcctctgaatagtaatcaacagtggcaagccgttcaatgtgagcttgtagaattcacctgcaacctacagggggcgacgaactcattcgcctcatgcgcatctccaccgcgctctgttgtagccaattcccgtaaggcatcttgaccaagagtctgtccgtgaatgggtggcgtacgagcggaagtctccacgtgccggtttctctataccactgcctacatcgaaccatcatcgagcgttgtctattcagaagcattagtgtgttttcgcgtgaagatgcagtttcattctgtacatgggagtgtggctcctgtctacagggaggtacggatctcgtgtgcctctacgaggtcatctacccttggttatctttctcatccgcaaaagaatgcctcgtttttctgtcccgaaagacagaacctgtcacatatgccctggagacgcagatttctctctgtgtgctactccaactggaaatagtatcgcggacgcgcattgaaccccttacgaattctcgtccgccgaagcccagcgttttggtatcgtgcttcttcatcaaaatcgaagtcctcccttcattgcaacgaagatgtctgtatggcatcatgttaaaactctgacggacagtcctttcctccagtgagaccctcaggcatccttcttcctacgaggaaaa

SEQ ID NO: 2561 - DNA, 1468 bp, Toxoplasma gondii
  source 1..1468: mol_type = genomic DNA
gaaacgccacacggcaccttcctcagtcttctgaaagcttcccaaaggcctgttgcgttatcagcgtttttcaagcctacctgtcgttcacgatgaatattgctatagctaactgaaacagcctcagacgcgtcgtggaaactgctcgcaaagtgggtcatctttcacactcctccgtaaatttatatatacagttatatatatgtatatatatacatgtatatgtacatagcaagcatgcacacattttagttttcagtaagtttgccgttcacatctttttcttcgaacgccagcggaaactgcttggggatccttgcgtagttcgctgcgggaagatttggggttggctgtgggtctgcacttggcgggttctgcggcagttgcggtcacttttttgtcttcgtgaacgagtatgtgagatggctctgtaaactcgactttttccatgggtttccgtggaagtgatgtgaggcaaactttggcgcttaaaatgcatggccgtgtaaaattgctcgagtatggatgacgggctcatgttgtttgtgcagcggccgtctaaactgtctttacattggtaaaagaaaggatccataaagatcaagaggggaacgtgaatagatcaaagagacagatagaaaaaagccgtaggcgttagcgattgcattcatgggtgaaaataactcggtgtagacatacgagactgtggaattgtagaccagcggatattcagccacacagtgacaaatagattactacatatggccgtacaccggcatactcacagacaactgagattatctggaagagagatcgtaaatggtttacgaagttgggtgcagcaacaagcacagataatgcacgcaccctgcctgtaaaatctcgtgacactacgcggcctcatgtatcgccactggtttctaccgtaaacccacaggtttgtctgaaaagatgaacgggtaaagcacctggaagcttctcggctccctggacgttcatggtttgtgtggagtttggaatgacaaactgtaaccgttttggcggcttcattgtgcggacactgagtacggacacagatgcaatctgccggtcgcactgtgaagggaccacggaacgaaagagaaagttctccatgaactctgattccatagttctggcaaggaccatctctgaatgtatcttggcaacctcaagaaagcggatgccgcccatattcatacaatttggaactacgtggagctaagtctgtgaccatactgtgttttcgatagacgcgacgccccatacacacaatttcccccctgtaatgtcgtagcgcttgcagttgaatcgttcatgaaagcctggatctccgcctttccgtaaatttgttcctcatctggaagaaattcgagatgaagtcaacaaagcatcgacaggatctcagcgcggccgcctggtctgcacatcttcccatagcgctcttgca

SEQ ID NO: 2562 - DNA, 2211 bp, Toxoplasma gondii
  source 1..2211: mol_type = genomic DNA
ctttgcagctcctccgaagcggctcgaccagatactcagtgatttcctccaggcgaatgcagcccattgtcctcacagccagtgctctgcattccacgcacagagtcaaagggaagcggacgtatcgagcgagatgcaagcatccgatttggtgggtgacagaggcgacatacacgcacgcacgcacacagccagcaaaggacgaaaggcttggcagcgaaaaagacaaaaaacaagaacgcttcacgggcaagtgcagttggagtgacggagccactcagaccaaaaattcagcgtccaacggtcctgtccctgtctgtctgtgtgctcacagtgccatgcgtttcgacccaattcaaaaagcagcgcctgcaaagtagtgtactctgaacgctgcgatggaggaacaggatagcgttttagcgttccgtcgagaactcgcactccaagagtagaaagaaggccgtacctgatgagtggattggggtccagggagtctttgcgaaaggtattgatggcaagaatggcgagctccggctgtgccttcgcgtagttgatcacgtacagatacacgagcttcttcagctccatgttggtggtttgcatgcagttgacaacgtctggaaaaagcgaagagacatctttgccgacggtcatggcagcaatcaccttttttaccgcttccttcttcttttccttgttcgacgagtgcagctcctccttcaactcgtgcagttcgccgcgcttcgccggctgaaagtagttgccgtcggtcattctgccgggcgaggagggcaaggacggccgtgcgatggtttttcggcggagtctgccggggtccccaggttcgaggggcctgcgcagaaaacgcgacggaatggttcacacacacagcttccagctgcgaaagtcgcaagcgagtttccgacaaaaggtcgcgagtggggagtacaagcctcagacagacggaaaaacaaccgtttcgccactgtccccagacgtggatcgtgaaggttttgccgacaagcgcagaccgcgaaacgcccgacgtcgctccgtcacggagtcttgcggtgtgcagccagccgtccagaaaggtagatgggcgccgggacttgcgcggagtcttgcagagtccgcagtcgcttggctttttcaagaaaactcgccggcagaagcctccacaagaagagaccgcggcgggtgagacaagcgaggacagtccgctgggccggcgagagttttgcgacctgagaccttgtgtacttcgaggcgtggagctgcgaaacgcagttctggtaagccacggtcctgggaaaaaccaaagtgaagacagcgccgatcttggaatgtttccaagaccgctgcatgcactcaggacgaagcagctgcgccagcgagaggaaacatgtccgagcaagctctgaaactgcgctgcgccgctcgcgcgcaggttgcaccggcaaagccgacgatgccaagcgattgtatccggcgcctcgaatggaaaattctccccttttgcggtaaaaccgtgacacacacctgcctttttcctcaagtacacatacgcgccccttcgcaaagtcctctagctgttctgcagacctctcaaatctcctctggcagcgacggcgttcggataaaccgcctattatatccatcgcaggcagcggatcggtttttgccggcgagtttttttaggtttttaagtcgcttccccccgtctgtccagttgcctcttggaaatctttttcgcctttgagtcgtttgtctggaagcggtcttcttacactccgtcctcaccactatcggtttcgcgttttctgaggcggaatcgacgaggtcacccgtcgtctcgcagaggttcttcccgtctcgccagtttgagggttggcaattcctgccagctcgtgacgcagagtttggcaagaaaaccttccgcaccgttcgtcctttgctgcttcgacgctccgtctggtttagtcaccgctccctttgacggtcgctgcgccaccactcgcttcgcgggtctcttggttttttccgtcggattttgccgcccctgacgcaaattcctgcattcttggacagactgtcctctcgcctcagttcaccgagagctgccggttctctgggaagccgaaaagaggcttctgacaagtttgactagcctccgctttgccccggtgtcctctcacggtggcaaga

SEQ ID NO: 2563 - DNA, 1695 bp, Toxoplasma gondii
  source 1..1695: mol_type = genomic DNA
ctcgagtctttgttgactctcgggaaaatgcattttgtcggcttaagaaccacggggactttgccccatatcgcgtgtgtagtttcgtccatgttggttgtttttcggtgctggacaaaagaaagaggcccttgtctattctatgctgttcactcgcccttcacctcgcatttcgcctggagaatcaccgttcactttctcaccaaatgcaggatgctcgcagcaaatcagcgtgtccaaacggcagcgacgcggtagcatacgtagacactcatcgtgtctgcaagagatcagtgatttacggattgcttctctaggaatgcaccgctcttgcggtggggcacccggccttgaaaccacagaagttgaaatgtgcatgcagaaagaatgaaggaaatgtattcgcatatacgtatatgcgcgtacttccattcggctatatgtcagcgtatacacagtttcgtgcagacgaatcacagaacgatttggaaaacaaaagcattccttgggtttgcgttgtcaaatgaggagagtgtgccgattgtcgcttcgcaatgtactcgccgatgccgtctcgtatctgactgtgttgcgggaccgctgccgcagatcctctcgtcacgctgcctactttacacagttaaggcaaaactgcaaaaactgatagttcatctggaacaaacaatcaggagaattcgtatagaggcacaggaaagaatgtacaagtatatgtgtgatgtgcaacgcctttggccgcagccgctgatgtgcgtatgttacgactagataagttcatggacatcggaacagacacatttgcatgtgtacaccttaacgcagatggcaacacatcaactgaaggattcgttgtgcgaaaccataacggtataatatacatgtgcaggtgaagagaaaggtattcagtggtgtgcgctgctctgggatgctgcggaagatgcaaattaccgatggtcccactcattggcttttccctcttcttgttctttcttctactgtcttttgtgcggccgagtaaactgttgctgcctcaggaggaactgggaaaatacgcctcttacggtgttgcgtttgctgctacgtacagtgcattcagtaaataaaatatgggcttcaaccagagaggttttgcgtgacttccgaagctacaaaaagccgatgaaattcgatcctccagatccttgtttctgagtctcatatgaggtcgcggttcgttttggattcggagcaacgcgcgcgaagacagatttgtcccttagtcgaattctgatgtttcccattcgcccccagaaaggagagaacggagaggcggcagccaattgtttagtcgccattgttttgattttttcgtttagaaacggctcttttttgactcacagggaacagtaccctgtgttgttaatcctctaggggagaagtttacttcagtcgcacaaatcacatcgtctgttacatcataccgggcagcaacttgaacagttctgtgactgttcaacacagattcgctttttttgacccttggttgactcatgttcttcgataaaatgaaactcttgcgttgaaacgctagtgtattctccgggggagtgcccaattataactcctttgtttttgctgcaatcagaacgtgtgtgtttctgacctttgttctctgtccttactgtagagtggagaaaa

SEQ ID NO: 2564 - DNA, 4389 bp, Toxoplasma gondii
  source 1..4389: mol_type = genomic DNA
tggaaataaacttgcgcgccttgcagcacttcttcagacgcttgtggccgcgaacaaagctcaccgagccggtgtgggcgtctcgatttcgtcgctgtatttccaaaatatcaccgctgattctcctgagaagactgccattgaaggccacctacagataccggaatgacacataacacccgaaaaaggggctcctttcagacaggtaagtctcatgtttctcatatttggttctgtccgcacttcagcgtctgctgcctgaccactttagaattcatctcgtgggagaatgtcgttcttgttcatttaactgaacgtcccttaccgttagtgagacgccaagtggatagcccaaggtgagcccaagcagcaccgcccccactgcaggcattgctgtgcctgagacacgcaaatacacatggtgtcaaggaaaagcgtacgccaaaggaacaccaccgagatgggataatgctaccggagctgtaagcggcctgtttgcaaactgaggctacaccaaaacaagtgtcaatcttcgttccacgtgttcaagacaatgtgttccacttcgtaccccggcgtttcagcgctctatacacgcccgcgcccgtcgccgccgcagtgaagaggccagtccatctgccttgcgctgcaacgcgagagatagcatggcgatcctctggggggagcatttgaataatttcctgcggcgacatatcctccattctcctgggtggccgcagtgcaacccctggatccacggttgcagtgccaaaggaacctgcgacgcctgctgttgcgctgttgtcggaacttggcagagaccggttcgcggccgaatgatcagtcgcgccgcttcccatgtcaatgttttccctcccgaccgatgccatcacgccgaaaagaaggcagaagagcagctgctcgagttccgaaaacaatcagtgcccgggatgtgtttggagacgaattcgtcgaagcaggcagcgcatgaggctctgaatttccccgttgaagagttgcaaagcttcgtcctcgaatgccgacaaaaaactcagcttcaaagacggaccaagtgctttaccctcggcacagcggaccaaaaagtgaggaaaataatccgtcggtgtccagggacacgaatcaacacacgttgcggcatgccaaaagaactaaactgaggagtcgataggggttaccctgtgcagtcggtaggttgcaaatgtgaaggagaattccctccgtctcagagatggtggaggctgcttccctctggaagatcttcacatcaatgtgaggtaccgacccccgtgtgctccaacaaacgagctggctgcaagaacgacctgactgcccaaacagacggtgacatacgatctgggaacataagtaatagaaacgtttgagaagatgcagacggctggtatgcaacacctttattgccggccttcattcaatttacaaaattcacaattcgtagttggttggatttcgtttcagcgtatctctgtcgtgacccgccgcgaagaaaaggcagctttgcatgcgttgcagcagctagactcgagtagccacgaaggcatcccaaaagttaacgaatcagctagagaaagggctgaggcaaacctgagcgtgccgtagcgaaatgcagtgaaaacgggggcaggaagacaagcatattggagtgtttttgtgtgtttggggattcttcgagcatgttttcgtgcatgcgttctcccgcctcgcgatcactgttcatacgcgggtgcttttaatacctagttccacacggacagttcgtatcggaaagtgtgcagatgtggtgatagtgatgagcctgtcttgtttttgttttcgctgctttcagacaattctaaagcgtgctacaactgcctgcgtccctcccctcattatgttaacaggccgctgacgaggcacatcacgttcggctctaaacccgtcgtactgatcaaaccatgttgggcaactgaatggtttcctaacgtattgacgatgtagatccgttccgagaaaagcagtttcagtcacgtatagttgaggtcagggcaaacacactgtatgggcaagccgacatgcgttctatagagggtaagatctgaagataaggatcgagatggaccgaaagttccgatcacatatgttcacttaagtcggggcatgatacttaaagatgagtcccacagctgacagcaccggcagagagaagaagagcaaagcttgatggccggtgtccttgtagtttgacattgaaaggaggatcactgggagctcaaaggcgcgtggtttgcatactgcctttgcacgaaggttctgattgcgaaacaagaactcggagttctatctttgacactctcctgacaagcaaatcaaaggaacgccgtttcctgatgtagaagcagtgtggctgacataccatcgctatgtacgccgctcaagcctggttctgtgtagcagcgtaagccttttgaaaaggctgacacgacatgtggggaacgtgcagaatggggtgggggtcgtcggagagctacgtaagacagcaagcgcaacaaataggtttttcctgttatctatcacaaatttatcccaaagcaccgcggcctctcctcttcgtttactcatttgcgtttaccagtgtgtgacttcggaccgtaatcagaggaaggcttctacgtagttatgcgcaccctttttgcacgtacgcgagagacttgtcttcgaaatcaacttttcttcttccttaaattcgatcgtatgttacactttgtacgcttgaatctcttcttgagcgcacctggagcgaccaaaagacgctggcacttgcttcactacgaccgtctgcgtcaaccactaggagggacgcctggcatttcgtggatccggacagcgtcatgctaacgagtggcgcctcagaatgctggcacaaatagaaggaaattcgagaaatgaatacgtttaccttttctgtggcgtcttttgtttcagcattttgaagggttgctcgcgattgaagatggcactactattcgcccaccttatcacggaagaatatttcactgtgctttatctttgagtccagtggatctcgaaaaaggaagcacaaaaagtattattagaaatgcaattacggtcctgttcccgtccactgcattgttattctgtcgttcgcatcgttgtccacgttgccttagcctctagcaactcatttactgctggcgaggacacagtcggtgttgtatcacgctctgtcgactgtcgaatacgtccaacatactgaatcttttactaatagcagaggcgaaaggactgtgtagtgactcttatgagcttcccgtaattcggtagcgccttacgttccgcgtttaatgccagaacccttcagctgagaaacaacactagggagagaggctcgaagctctcctcgaagatgtgacgttggagcgctgtccggctcacgtattcgacgcttttgcgacacatttaagaccccggagtggctacgtgctcttgtcctttcttgctcgtcttcttcacacaccggtgtcagctccatcccaagctgtgcagcctgcaggtggagaggagatgccatgtatcggttacaggtgtcaggattcaaatagttgaggggattccttctccactcctgtggcagtgagctttcgtcttcttaatttccggtagcggttcgtgtagaagttaaaccgccgccgaggatgacagttcctggggtcttctcgcgcatgcacgcgtcgctcgatgcacagacactcaatcgattttgtttggttcttgtcctagatcgcgtgaacccgtggataaccacaagaacggcaaatttgtgtttcccgttctcgaaaacccatacacaacgaaatgcatgccggagacagctaggcaacaaaactgacttggaaaacctgtgctgggaagctgtcttctttctttcccctgcgcatccatgaccgactagcacttggcgctgccaagcgcgacatttccaggcaagaaagcaggtccatcgttagaagctggttcaagaaaaaagaatcggacatagttttcgcatgtatcgatctggttttcaacggctttcgcaaaacgcctgttgtacccgctctgccacccgtgtgtctttcaacctgggaccgcctagtcgccgtttcccgttttgtttgattcagcagtgccattccctgcctttcgcatgggatatcgcaagctgtccatcctgggctgttgcgttttcccatggaacgaaccagaaacgcacttccctttcccttcttctttgtcggaaggaacgatttttgtcttctttctagcggttcaaaggccgacgctgctgctacgcgctgcacagcgggaacacga

SEQ ID NO: 2565 - DNA, 1931 bp, Toxoplasma gondii
  source 1..1931: mol_type = genomic DNA
tgtatcggtcactgtccttggttcttctgctgtggcatgagcatcctcgccggcataacccaatttatccaccagatctgaatcctctgttcgaccgttcttcagcagcttaacgactgcgaaggcgagggggcagtctaggttctggagaggattgcaacgatgctttctgccgagacacaaaacaagctggcagcgtttcttgcatacgcatgtgtgcgaatcctgaggcgtgattccagttgcctcctccggaacgttagtttgattggagaagaacgaaagaggtgagggagcctccattcttggttcagaaaaaagcgggaaaagcggagacggaaatgtcgcgccgcgcacgtctagccatggcgccataccttcccgatggccttcaattcctccgcaaggcggggaattctggcacccgaccgccgccactgcagacacactggtcttggagaggtttatggaagcacggcttccgtctgtcatacgattcgcttgctgaagatggtgctacagcctgccgcttccttgtccggttctgtgcagggtttgtgttcacttatactcgcaagcgcttctctgttcttctgtgagttctcggcagagtgcacagacccaaggaactagcactggtattaccggcagcggagcaaacctattggggttcctcatccggcgttttcatttgtgttgccacatgcgctgcccgattcgctggtcgtcctcttggggtctccgggcttctcgctagcttcccattgtcgacgctggcgtatgctttccccagtaaaaagaatttcgaagttctggtcgaaccaggttgacgattcttcgagtatttctggtttctcttttggggtgtgaaggcacggcgaaggggtctgctctctgaaagcatgtcgtcaggagagaaccacaagaaaagtgtgacggacgttgatcaagaactgcttcgctcccaatagtcgagtaggtatgtttgaagggaaaaatcactgcggacggccggttcctgatgctcactttatttttcgcaggtccgcttgctacacgcgagatgtgcaaccctaggcaaagaaagcaggttttgtctcacgggtcacctccatgaagaagcggaactttgaaagcacacagagaaatcagaaaacaccttacgatctcttaagcaagacaccacaagacaagctgagaacgatgtcccggcttccttgttaagactgaaattcacaccaaaaatttggaaaccagtacaacttttcgacgtcggccctccagtacactttgctagcttgcagtttcacgggctctgtaacatatcctgaatatattcgcaacgacgcggattcctattagtccgccaaaatacgtggcgaggccctacaatgaacagagacaaaatggtcatgattttcgtggtcaccagatgagcggcacacgttttccaaatggggctcgtggcacagccatgattcaggaaggaagtccatgctcgggatgagttagggttcgttctctctgcctttgcaacttccaagatcgcgtgatagtttgataatgagggagcaactagaaaacattttcgaagttagtagcccttgagactcgtgtctgtcaacatttcccagacacctgcctcggactacaagtgaagagcgcagtcgcacagcggtgtagcctgcggtgacgtggacgagttcgcttgtcaaaagataagcagcccctgaaaaagtcagctcagcttcttctgaagcgtcgtggcagtgccttacacgaggaatgtttgagagcccagcatagggatgtacgtacaccacacagtaggcaccttcgaactggaaacccagcccggctgaggtagcttttgtatatttggctcgcccgcagggcctacgtttctgtggagccgccccgtgacgcaacca

SEQ ID NO: 2566 - DNA, 4422 bp, Toxoplasma gondii
  source 1..4422: mol_type = genomic DNA
ggctctcgctcgtcggtcttctattgcgggaggtggcactagcacacactgtgcgcccttcttcgatgtagagatgacgcatgaattcccctgatgtgtccacagccatgaattcattcatccgctgatcgccagacggtggagtgaatcctgggaccgtcgctgtgtatttcggctttttggcaactgaaggaccctgaaagcaacatgtggtagtcgtagaccaacatagagatgatcgtttttactcgctgactgtatgcttgctacacgaacaatttcctcatggattaccgcccggtaggtgaacaagtatttaaaatgcgaaaggaagctaatgttgtacgcatagagtgtcgcacactgtcattcactgccgatgtagtttgtatcttctggtgcttacttctcccactccctatagcccagggtaaacacaaatgaagtttgagttgcacataagcgcagtgaagcaaagctcgagcgagtacacaagaaaaacatgttctgcctcgcttgagttttctgcgatacgtggcacggtcaatatcagttcagactgtaatttggagacgcggatgttacgcgtaacagcaaatgtgagcgaacacggcagcctgagaaacctgagcgcgtcgaagagctacaatccgcgttttactcaccatccctgttgcctttgaagacacaacagacagacaaaagaagcacagcagcgtttcacccgagaatcaaaactctagaaaaccttgatacaccgggctatttcaggatctgcagatgctgcgcttcagcatctgtctagttgtacgcgagtctaacaatgcggaatccatcagagcctcagagggttgcgcagacagcgtgacgcctagctacagcagcttcaaacgaaccaaggtacatgaccactatgtcgccggctcatacgccacttccccaccatccctaaaccttactctcttaaacaagagagagacaacgtgttggggcacattttttttatctctcataaaccataagtaggagggcttgacacgacgagatgactgtacgatgaacgaaaccgtggctttttcaaatgatcaaatacttatccgtaaccgtgaatcttactttgactttcccctgtaaagtaacaaaacgtaacacagacaaccaggcatatctgcccttgagacggaaaaaacgccttgcacgagcttgaaaacaggtaattccacccaatcttgctaacatggaaaaatgcaaccgatggttcgctttgactagaaccttaccagcaatgtcttggcgtccgcatggagcactgcgaagagcggaaggcatgccagcgccaacactcttaacgaagccatggctgcggtagctttggcacaagtgtatgcagttacttgttcaatgacaggcagagatttatttgggtttgcacaacaaaagtgacactcgcacgaaaacatgcaacaaatgcagcataataaaaaatgatctggtcctgtagattgcttccatacaggctcaatctctcacgcgatgtggctagctaaagcgtttcacacacagccaaccgggaacaactttatgtctccactgtgcgctggtgctgctgactggtctagagtgttgcaagtcgttcggaacccttttgtcattttcaatgacaagaaaaacacaaaagcacttccgcctagtcggccgcatactacaatctgctccgcttgccgtgatggtaaccacgaagtaacctgagcgggaggggacaccgagcgaaagcctattctagtcgtcacctataggcgatcgttaaagagacgcggacattgatgggcgcgtatgtttcaactgcagtctagagaaacagtgatcaaatcacgttgaaaaccaatatgggtgactcgttgggaaccaaagtggtatggccgcaaactgacaatatgcatgcagaagcgttctttcttgtcgtcatccatatctcgtcgcgacatgagcaagacaactggaagtctccagttctcatgaggcgaggcaccagtcaaccaatacaagctaataccgagcctagacactcctggtgctgttatcgttggaaatgcacttgtactttgaaatgtcacaacatcggtaactcaaatttcacaatcacacttttgtcgacgttcagaatgtcttgtgttgcaacactccattctcacttgggtctttttcgtgtgtcctgcgaaacgcctttgtaagctcgacagaggaatcaattccagtggtgaaactcatcttacacctcagttcgtcatctcagccctgcggtcagcctggcaagggaaactcgtaacaacttcgagatagatgcttcccccacatcggagacagcagtggcttcatccacatctcgatacctacggctcgatcaagtacccttttgaaggtctgggttaccgactgccgtcatccactgaaccacaagattaaaacgtggcattttttctagacgactaaataaggctacagcgacgttcgtgtggtagtgataaacgaatgagtgccttcgacgagggtgtgtgcttttatgaaggtacattcacgactcaaggtgtcccggttagtgtggcacattttgaaaactgcgcagtgtgaatgatcactcactattgagagcgatgaaccgttctgccgtgactgtaaagactgctgctgacattctggggcccgcattttgaagccataatgacaccatgaaagcaggactagcagtccagcagaactgcacgaggcaagtttgacaagtgtgcttggcgtttccgtgtgactgcttgggtgcatcccggaattccgggaaatgttgtgtggtactgccattcatcgttgacgtattgctacctgggacgccaagcgtgccatacctgcgcacacaccgacatccttggtgacaaaacgacacggcctttgcggagtctacttggcagtccagacggaacatacaggatgagaagctgacatgcagggagcaattgacagaaccgtgaactgagtgcttctggagtgttgccctgagggtgggcacacgagtcgcgaattctctcgaacgtctgtcagaaaagtgtgctctgttgaacagacgggcttccgcttgtttcgtctggtcgactttagagtcgcaagcagagtgccccgttgttgctctagcttttcgctcctcggcacctcgccgcgattcaaattgcaagtgtccctccgcatacacgcgcctgcataatcctcctcgtcttgcacagctactgtgaccatgactacccctgcaaagggaaggccttcccgacatcacgcgttggagcgactcaatataacgaagaaaactatgtggaggcggtgcgcacacttctgattgatttatcagtgtcttgcgatacatttctctgtgaagagactggtgtctttttgtcccatgccagggcacgccgaactcgcagcttgagacggacagtgaatacagcgcaaccaccagtaaccgtgcacggaagcgtacaggaataggcgacggcaaccgcgcgaaaagcatctgctcgctctggctggcaaactcccctgtgaaaagacaagcacagcgagatgttcgaagtaacttgcgggcctgcagcactttcggcagcgagcggtactcaacacgctctagctgtggcaaaaaaatgtggaattgcgttgagttgcaaaggcgtccaatgcagaatgtgatgctcacgaaatgtcgttacttgcgttttttgtttctgtaacttcttccaaagaagcacagagcgtaaaaaatcaaccctgtcttggaaccccacttgccgcgacaacgtggtgatgggcgttcatgactctcaccgcgcaagccatgccgctcgctggccgctcgctggccgcgcgcgtgtcctgcaaagaatttcacgttcttgatttttctcgctttcctagtgttcattcttcgttcggcgaagtaaatttcgtcagaaaacgaaaagaacctctgtatacttcgcaagcggcgctgtcgcttctgtttctctggcacttttcaaacttttgcgcagtcttcgtgcccaaccttttacccgttttcaacgtgggctctccatcaggacatcgccccttctcgcaactttctcagtccgtttgggcatatccggacttctcaatctcttttcatccaggaccagtgttttacttattttggctcatatcggctattgccgagatctgtttttcatttgggactcagcaagtctccccggtgtctcagccgcgctacacctggttgaccggggtagctaaagccacaacgggacagaagaagcgaagacaacctcaaacattcagtatctcgctcgtccatgaggtggtcacttcttttctgagttgccttttgtcttggccttccaacgtcccaaa

SEQ ID NO: 2567 - DNA, 2717 bp, Toxoplasma gondii
  source 1..2717: mol_type = genomic DNA
ttttggtaggatgtaccagccacaaagtgcagtctttggtagtagtttacactatagattcagccaaaacgtggtttttttgtgtgacccccatagcaccgagcgcgagaagactcgcgtgatgccacatcgacgttttctgcaaggctagacagaaggaaattcttgtccgagatgtctctatcgataacaagggctctgccgtttcatctgctgtggttccacatttctctcgcgtcagattgatatgtgtacctcgaacgacctttggcatatagctacgcatttgtatatgtaccgatgcccatatatctgtatatatacactgtacgcagacagatatatattcattcatgccgcactatcggttcagctgaatcgaaaagacacgtccccagaaaaagctgtaccttgacctggtggcttcgacacagccaggtgagggcgcctacagcagtgtggatcaaacgcagcacagcagaaaagagtctgggaactcacggaagcgccccagggacacggaaaggcagcaacgcagcgaaggaacccggtcaactcgtgaggggagtgaagacatcgaaacgcagaaatgcgacagcggcgacgctgaccgcttggacgtatatgtgtgtagttggactctgttgcgaccgagactggcacgaacacgccagttcgttatttccagggaaatgtggtcgaatcaggaacgcagggcgatggtctgaaaagatgcgcggggaaatctgctggaaacaggatcgggtggtgaccgtcacacataggaatcaacgaactgacgtgttgctgccagtttcgttcggaaccgagtccaacaacacacacatacatccgagcgaatctacagcggcacccacggaagaccacacaggtgaggagccgagcagtggcagaggcgttgtggaagagcaagtgcaaaagagcatggtagtgaagtggaagacgcatgcgaatctgtggggtcatccagaaggatgctcgtcagcgtgctggagagtgtcttgtcccttgtgtaaccgttttgttctgctggcgatagcgctctcttttcgcaattgtcaaatctacaccgccgcgaacgtcttttctgggcgtcctctcttcaatgttcgtcccgctgtgactttctcagacgcagtctccgcacagccaccgaaagagaggcgaaagatactgcgaaagcggcgattctctgccgtttgcgggacatcaagcagggggatttgtcggaagattgcaactcccaataaagcaatcgccattgccgtatggatatcgacagcggtagcagcccttggtattggcagcatggtttggggatcaactcagccccgaatactccgaaggacactggataattctctttcgccagtagctagctggtgcgttgagctgtgcacaggagctgtcgcctgtgcataggcgcgattttctcctctcaatcgacggtgtgagatggcgctcctcgctcgcctttatggtgcacgtcggacgagtacgttgaaaaagcaactttgcacgtgaagcctattcaaaatgcggtgttaaagcccacgttttctcgtcatttccgcaaaattttaacgcgtgaaacaggctgttccgcctacctccacctcaccctccgcctctagacggtcaaaggcagcacagtcagtgctcgctctgctgaaatattttttgccaattcctcatttgcccgtctccctattccgtgcagactgtggtttccgcctcttccccaacacttgctcgaaaaggcggaaaggcaaacgccggtcactcgcggaggcttttttgtggcgtttgcgtgcagcgtgccacacacaatcgacgcgggcgagggtatctgcgatgactgtgcgccttgtgggccaaaacacatggccaggggttcctcgaagcgacaagcataacggattatttttcccctcactacattttggaaacacttattgcaaaaaatatttccaaattctcgtcaattttgcctgtgctgtcttctttgcgtgccgagagtggccgtcccgaccccgggctaccctggacgccacaggacagcggcagttgccttgaccagcgaccgctggaatacccacaggacactggggatataaatttgagtgcttttcaccgctatttttgatgcgttgtaccgattttctcccttgtcttcgcgtctggtcgacccgtcctcggacgtaagcttgccgtcttccctccattcggctgggtgcgttcccgtgccgacgttttctcctgttcctggctgacttccaaaagcggcactttttctgtcatcttggtttttttcccgttgacacgaaatttggaaactcctctccccgctttctacccactcattcagtccagacttctctcgcccccagcacgggtagcgcaatatcccttattttgtaaaaaaacgcagggcggttcggacctacgagcaactgcccggatttcgcaggccttgactcattttggttcgttgcgcatcacacgcttgatccggaaaacgtagacctgagagaaataaagactttcaagatataaactctagtagtccacctcgtattatagacttccagaagaagcaccttgggggcagcttacccgagtgctgaaaaacaggaggcagacgctctctggctgcctacgcgtttcttccgtttttctcgagctgtcggacggga

SEQ ID NO: 2568 - DNA, 3744 bp, Toxoplasma gondii
  source 1..3744: mol_type = genomic DNA
atccttttctcagggctgtggagaggaaacaagctgagagaacttggggacgcgccgcatcgcatatgagcctcagtcgggtcagtgttccggcgttccgttgaaactataaaatcgacggaaatgcttggcaacgactgcgcatctgccggaaggaacattgtgcgagagagtctatggagaaaacgcagaacaccaaagaccggtaattcctagcaacgctacccttaaacctccaatttcttcgtcctgcgagagtcgccctgttggcccggtcacaaaatctctgtctgacacccagatcgaaggaagtttttagagacatcaccagacgcaagtccacaggaaggtgaaggaaagttgtacttctttttatccagggggaccgtaactcaaccacccgttacaatgcgtaaagaaaaactgcagtttagcggagcacctggacgtctatctgcattgtaaaggaattaccttgcatgtctttggagcctgctgacaatacagctcagccttcagatctcccaaattcgtcttgattgtgaccgacatgacgctcggtggagagagtgcgtatgagttttttcagcggagaaatcgagtcctcactgtctccagccgataccgaagagaggaaacgaggagaaaaaaggcgaacgcagagagttgatgtctgaggaaccaggtagccagccgcgtactacgcaagcatctacattggtgtaccggtgagagggaacgaggtgacctgcaaatgacgtaataaggaagaaagctcgaggctgttcgtcgaggacgaagggaattggtaccacaggtagctgagaatgacaaagcgcttcgttggcatacgcgtttctctctgtttaaaatgtcgagtaaaagcacgccgaaacgggctaagagatgctgaacggaggcaatgcagggaattgacatgcgatacgaagaaacaagtgggagagagaaaagtgccggagaaaaggaatggacagttctgacgaaaaggctattcaggaacagaagcaaagagtcactttacagagaaactgtagatttccctgggccgcaaatgttggtcaaatttggacaaccctttgccgacgagggagaaatggggcaaccaaaaaagtggaacagggtttgtaacacaaactaacgagaaaaagacaatggctgccgcgttctccaaacaaagcccggaaaagcaacataaatgtgaggcgcaggagtcgattgtttctcaatagggaaaagagtgcatgcactgggattctccctgttcaaacaaaagccggcatgcgggttcttcgcactgtctttgaagtccttggcttaacgtcaaccattttttcgtttcttttcgcgctcagtctgacaaatccgaaataaatactcgcgaaattcaatctttccttgttgcgcaggacctaggaacccgggtccgttttgtagactctgaagctcctgctttgcctgctgcatatcgatgatcaagacatttaaaaacggaaccgtgttcgagggatggatgacaactttcctgggaagacgtaccatgtattttcaggtacgatgcactttgttttctgttgttgcaaggggtgtcgggacgtcatcttgcttctctgtcgtccggtcatggaaggccgttcttcgtctgaaatggtgacatgaagtaactcgaggcttctgccctatatatagcgattggcatgaatattaaggcggatgcgttagagatccgacagtaaagaccagcaactaaacacccttctcgcagtgtggaaaccgtagcctgaatccgacagttggaaagcctcacagttatgaaacgaactgcatcctctcccaaacgtacaaccgcgctcgtgcagttccagtgaagctctattgactttcttggttcttgtggctgtatgggatcttctgcaggagacagaaacggcctctcgtctcagcgcccagtcgaccatctgtacagcccttatgctagcatttatttaagtgtacacgaaataccgctacgattgtatgggtagaataacgcactcaaaacattcacttttgctctgtgttctcttctgccatttgctttccaatgcggcttgtgaccgtacagttttgccgaaaactacgttctgctatttgccaatcaccacatcaagtgaagatgctcaagaactctgttcaatctaactttctcgcacaagtgcgtagagacacagtcttcataagaacagaaactgtgctgtactttgaacacagccttgaatataacgatgtagtataccgccggacgtttctgcacctcgtcttggcggtcgggcgcctccattcggtaacaagcgcagatttagcctgtctttgcagagaaaacacacgtctttatttagaacaaaattcggaagatgagcaacggagtgggtgacgagctgtcatcttcataagagacaatgaggtgtttgccggtgtttttgcgggccttggaaacaagccacaagaatacatgcttacatcaggaaataatacgaagctgggacggcgtttgcattctcgaggcagaagacgaagtggagaatcgtaaaggtttcttttctggtacaaaaatacccttgtttactacattgccccaaggtagttgtcctgataatattctgcagtcgcagtaagcaggactctgaaggtggcatcaccgcagagaacaacaatacctgtctcgaatccccctgacaccataattgtatcttaccgacacagaaacagttttgcgatggactgtataccatttgtgaagctgtctgtaatagctacgaacatccgtctcctgcgccaactagagtgtggcttatcacatgatccagtgtctttttttttcagggacggcggatgaacagaagcacgctgtcccggtcgccgcacaacctccccagacgttaagtcgaataaatggttctgtgtctgagagctgtggagttgtcgagtccttcagggccgagtgtgtccgctgatagtgtcggcccagatcctctggtaacgatttcatgccacacacaaacaccaacttcgtcggcaacagtctcgaacctatggcgttcagcaaaacaaatgcattcgccatcaataaaaatgacgaccatgtcagaacagacgatgtgggcataattgtctgagcgtaggcaagctgcctgggcaatgcatgaggtgaccaggcatttgtgaagtgaggatgccttctcgacaaaccgactgcgagagggaaaaatttcggtcggcctagcaaaatgacgtagccaaaagcatctgtaatttcgttcggagtatcacttagatctaatgcacacccctcggtgagcgctgtcgtccatgttcagtcgtttcactttaaaggaaagtccgcaacatttcctagacaagggtggtcaccgttcagatcacaatgcggttttggtcatgccagtgacagatggtgtggaggttccggtagaaaagttgataagctccggtcaacggtcaaggaagaggcacatctgagtttttggccggactgtctcgtggctgtttctgtctccaaagtcccagactatggctgaagcgttgaaaaccgtggagctgggcgttttggtataccgtatgtcattttttgttcaccgcttcgaacatcgaaaacagttgcatcaccagttccttcgaacgccagataaaccattcgacactagctggcagcaaaatctgcggtaaaaa

SEQ ID NO: 2569 - DNA, 3616 bp, Toxoplasma gondii
  source 1..3616: mol_type = genomic DNA
gaacgtgaggaaatatctgccgacctgttcagattcacaaatgtcagtgcatctggtcttgtatgtttatggaaaggtgctcgttgtatttgctcaaaacgttgccggttttaaagcgcctctcagggcagggctttccttgtcagtgcaatacttttatggcttcataggcctgccacgttgccatttgtttcggttttcctgttctgttccagtaagcaggcatgaaggccgcagtgcgtgcatcattacatacacgcccgacacgcatctccggaaaagccagcttccaccctcgaggaagcggcaacgtgggcgtactgaaaatgaaactgtcacagacacaaacaaagaggcttactgcacacttggacacgcaacagtggagaaaaacggcgtagaaaacaccgtaaaagatgccgttgtgactgaatgcaccttaaatacgtctgatcaggagtggcaggaggcttctgcgtccactatagttactcccagtgccggttcgaactcagacgcgaaatgggtcacaaatggctgtgaggcgaattttggtgctgacgcgtgtgatttggacagaaataccagcaaacttggaagagctgtagaagaagcatttgtaacctgcatgggtagtcgtcttgcgaattcgcatgaggctgtgaacgatgattgcgattcgaacgcggccggatggcacaaatgcaatatgcctaaagttgtcgctgcatgtgtcgacggtactggaccgcgaatgcccctgatgcacgcaactatgagagcgataggctgtgtgggagagaagctccggcgcattttcgcagaacccgacagagactctgctagagaaagagaactcgaagcaacaaaccaaccggaaaacggttcaggggtaacggggaacgcatcagatctcgaagacgtgagcgaagggaattactactgtcaggggtgcgtggtgtactgctctcatgagccctgcgttttgtgtgccatggcactcattcactcccggatcaaattgctattttttgttcatgacaacaatgttcatggggggatcacccgggggcgcctgcatctggatcgcaggctcaaccacggctaccgggttctctgtttgaggacgaataagggagctaccagcgaccagaaaggcaaatgaagtctttcttatttaattccatctagaacttgaattcgtacgtccacccacgagaaatcaacttgcaaaaattcgagagcatccttgagagggatcgtcacacttacaacgcctgatggctgcatcgcctcgttcaagtcggcttgtctagttcgagaaagggcacaggggatcagattcggcgacttttcaactcacgcttaagggttattgcgtcataaacctagatctgaaacaaacaggccagcctgtgtgcagccacaaagaaagcaacgtctgcctgagcagttctgtctgccactgaaaaagcagatgttgcgcctcctttcagtcactttgagaaggcaatgcttcttagccttgttctagcgtgttgttcgcgtctgtccttcattgaaagttgcaagagcacacttgtagcaaagggcagtgtcttcggacggtggcgtccgcacagccaactggtagcatgtttctttctgatgtataatttcctttttggtatcggttaaagggacatcgacgagagacttcagagccaacgaagtttctcactttccgtttcgatcgtcaaagacgtctatcaaagttgtcggcacgagaggaacactccatcttcacatttgaataaggcggcaggttctggggagaaactcgctgtttcggaacctccttcactgctaaactgcattacttatattatttgttacttaccggattcaggttcaggctttcttctggtaccgtgacaatggtgatctttacgttgtactcgaccctctactccaaaaacagaaccagatttaatgctcggagagcctccgtttgcattgatttcgcaacagagaatagcatgttccagaacactcatgtgcgaactggtgcacagttaaacgtatgattcgtggtgcagtaatattggccacggaatgcagtgataccacgcacaaggtgaatgtgagaggagtgccgtctccgatgaatcccacaaagtggaaaaactgcttgctggttggaacttcgcacagaaagggacggtggttaaaaagagccaaacggcgaacaggagagcgatcgtcgggtgggagacagagtaggcacaactataaaacttggaggcaggattgatcactgtggatatattaaacattcggggtactaattaaacaaaagatgcttcatttcaagcaaaagacggattatccccctcacaaccctcgtatacatcaatagagttcgtcccctgcttccgtgctgcggaagcaagatacgacaccgcaatttatgtcgaaaaaaggctacagcttatatacccgtccccacatgatccacatctaactgtcgatcgtacagtgcaaaaaatttttgcagcgcagatttgtgccgagatgaaataccctgaatcacagggcatcgagtctgcgttagtccgactctgcacacggtttctccataacttttttaaacagcgttgtgtctagatattagttgtaagcccttaacgtcgtcatagactttcgtgttatcttcatcaagtgttgcttcaagagtcgaactgcactagcagcgttgtctttagctactagttgtaagcccttaacgtcgtcatagactttcgtgttatcttcatcaagtgttgcttcaagattcgaacggtactagcagcgttatcttcagctacctttgtcagctgtgagtgtctacgcaagctgtacctcagtcgcactcgctgccacagttccctggaagaagctcttcgcctcaatgccagcgggaccccgttcatcggtgggaggtgcgatcggctgtaggacacacgccagtagtggcacacaagcaaacaaaagtcttcatgacacgagttcaacgcattctgcaagaggctcaatcctgaagaccacggtttaaaggtgaactccttcggtatggcgttacggccggcacaaaagagcacgacaacgagtagaccccaagtgactgcaacgggtgtacccggaaaacggaaacgattgcggcagagaaacttcacagggctcgaaaagctaaaactcataaatagaaaagacaagtgctataactttggaacaaaattacgtcatctggccgggtcaggaagagaacaaccgacaacaacaccacgagctccgtctaggcacaaggcaagacaaggaccggaggcgagaacccgtccattgtggcgaatgatgccgcgggcgactcagcgccgccgaattcgctagtctcaggtcgagtcgccggggcgtcaggagacaagcaccggcgccccgcgcgccaactgtccgtccttcctggtgagttgacgttttgagccacgctgcagaactctgcactggagtgattgagcgcggcatttatgtcaatctggtttttccacgtgtattccagaagcttgccctgagaaatacagatacactgtcacttttgaatcga

SEQ ID NO: 2570 - DNA, 2374 bp, Toxoplasma gondii
  source 1..2374: mol_type = genomic DNA
gctgtctttagttaagcgcttggacaccatgtagtcacagatggagggaagacgccacacgagcgctgccgaagcagtcttctaaccgtggcaggacagacgacctcgtggcgtatgacagcgaggacacagacgccgtgtgacactgcaacttctctcaatatccacgttttcagaaacagaacgtgaaaagagacactgatcatgctaggaggggtccccgagcgacaggtagctctttctggagcctccggaaaggcatatgtatctatgtgcctgtgtagaacttccaagacaggtcactcgcttgggcaatcacttgcggagctgaagcatgatttgcgactctgaaacgcctccgcgctgagatgccagctccactggcatcggacagaataaagacaaagaaaatgttcaaatttggagcaactgtcgccgaaagggatgcaggcggccagctctcgtcgtctgcggggcaaaagctaggcagacttctgtctctcaagatttggtacatttcgatcccgcggaaatgagggtctttcgtgtggttcgtccagaagagtacagttttgattatttgcactatgtggggtaaatgttgcctccgggaacttctggcttctgagaaacacgtagcggcaagaggtgtgatctttcttttacagcaacccggtcctgaagttgatccacgctccctttcttgtacaagagtgctcgtacgcagcgattgcttatccgattgcagtcgcttctgttgcaggcagttgcctctttttgtctacatgggtaggaaatatgttttgaactgcagatggatcggcgattttcaacagctgagtcattgtctattgacacagtgaggccagtaactacctgcaaaacataccaaacaacgtaacacaggcatggaccctccatctccacaaaaaaacaaaagggtttgacggattttcaaccggccgatgtgggtgacgatgatttcgaagatatgttcttctctggcgttccggatgtagtgcctaaaggtctcgacgttacagacacgcacggcgccatacacagacattcacttccatttatactctcatacacataggtatcgttgtgtctggattttctgatgtttttctacgaaccctgcatgactgggatatttaggtcgagaggcacgagtcgttttgctgtccgcttcgtcgtgtaaagtcaccccatcttgtcgcccagacaacgggtattccacgaacccaccctaagttgtttcttatggattttatcaagcatggaaacaaaatcacggtccaagtaaagtttcttggatcttgatgtttgctcacgcgtccctcagttcattacttcaacgaatcagcgacccgttgcaacaggcgctagctgtcgtcttgctgccgacatctgcaataaagcatgccgacttcctgccatctttctttgcgattcaagcaactctttcagtggatttgatcgattttatatccagtttgaggctttctctttagtgaaaagtcctttaagctagaaacggcctgttccgttgtgtcttcgacgatcatagttttcggatattctgcgacagccgtttctcgcagcagtcagagcaatagctcgcttgctgtttctggacgatcaacaagaatgcaacgctgcccgtcacgcaggttgaggagcatcgaccagtttacattgaaaatcggtagtttttcctgtccgtgtctgtcctcccggcactgttcattcgtgcgagtagaaagtacaactactggctgaatcgccgttattgcagaagtgccttctctgtctttttacgagcgacccttgagtggcgcgatgagtgatactcgttctcagtcatggcgctgggtcacgctttcacttgcagacggctcttaagagagacgcaacattgaactgggacgtgtcttgttttcctttcctatatactcgaggattttctgctagaaagcagcaagagaaccccgcttgtctgatatgaacgacgctaagactggtagtgtgagccgcgcagcaggtgccaccggacctgccctgccccacctcgcggttccggtgacttctatcagtcgctggaacaagtgtttcgatcaaagcacaaacttcatggatcaaatctgaagatacagttgtagtcgaatctcgtctgtttcgcgttcacagacgcggcgcctcgcgtgaggcgtgtctcagctcgaccagcgccgcacgtcccctattggctcttcgaggcagcatcgtcatcatacagacggtagctcaaaaggcaacactttggtggcgtctctgcacggggtttcgctcgcagaaaaggactgcaatcgctagttctacctcagtaaaa

SEQ ID NO: 2571 - DNA, 2753 bp, Toxoplasma gondii
  source 1..2753: mol_type = genomic DNA
ctgtggcacacgattttcgttggaaactctgccgccgattggaaaggctcgttccagtgcatgacgaggggagttcacgcttgcacaggaaaggaaaagctattcgtcctcggagaaagatcggcgagcgaaagcgatgcagacctgaatgcaactgagcttgtcgaaatagaaattcctttctcctaggagctgccgaacgtcgaggaggaaagctttgtgtctcgcgagtctgcacaaagaggcgaagatgacagaaaaggagaaaaggagaaggaagaacacagggacagcagtcgtttcctgttcgattgagcagtggcttcatttttgcgcgtcgcgttccatccttggttttctttgcgattttcgtttttgtcttgtttcttgcttgtacatctctttttctcttctcgcctttcctttgtctactcttttttccggtctcgcgtccttcttctcccggttcctcttcctgcctttacttgtcgcgctttcttcctcccgttcttctttgctcccgtgtcaccttcggtctgcgcttatctgctctcttcgcgttttttgctgcctctccttcctctcgcctctcgcgtttccttctttcttccctcacctttgacgaatgcgttctctcagttcgccgacgaccttgtcctcgcactctgccgagtagggtcgcctgttcgccaccgtcctctcgccttgttccgtgagttcttccgccctcagtggctccacagttccaggactttcttcgtcagaaggaaggcactgttctgtcccttccctcagggccttgcagacctcttccttcattttcttttcgctctcgcagctgctgtgcacaagcggtgaaagtcgaaggaagaccagccgacgggatgaagagcgaagaaagaaggaagacaaagagcagagaaactccaacttccgggacgcgtcgaacttcgcctacttgtcggcgaagcggtacgagcgaatgtggtgacttccctcctaggaggcgagcagaagcaagagccagcttgcggagacagcaactaaaaaagggtgaccatcaatcttgaataagagtcgtgtgccgcaaagcggtgcgtggagagttccgtctctctctctcttcgctcgtgcagctaactgcactcgaacatgactcatgggagtggtgtgttctctttaaactcgagagaagaatggcgaaacgcctgagaaccgctttcgcggaagagtgaaggcccctcttccttgcgattcactgcttttcagcggaaaacttgaaactgaacaccccttgaaaaggatctcctccactgcgaggcagctggacagacggagggtcactcttcctcgctcggccacgcgtttttgatcttcaccgtgcggtccgcagcgactcggcctttgatgcaaaaaacgtagaagaaaaacgatgtgtctctcgctcgcctttcgagacgaaagttcgcggaagagaagagcaagaagtccctgtttcgccgtaaaaaaacgcgctttccgggatccaattcgctgccacaggggcactagataggatttggccgacttctccgccggcttggcgctatggcagcaacgggacagttgtcccagaggagacagctgaaattttcttttatcttcgcagtgtgtttcgagttcgctgagagttttccctcccttttcgctgcgttgtgtgctgcgacgacgagagaaacgcgagtttctcccctgaacggaagcctgtgcctcttcggtcggccaccgtcgtcagcggaggagtgcaaggatttgcggcagttttccagcaagtgaagaagcggagctgaagacggttcaccacccgttttttgcgagtcttcgcacgggtcgtgagaaggggaggctctctctctctctgcgcaggctcttgagcaattcgggtctatcacctgcgccctttcccggtcgttcttttgcccggtgtttcttggccatttctgcttcgtttccgttcttttttccgcgaaagaaagacggaactccgctctgagacacgcaaacaacctggcgacaggggattgcctcggtgtttcgtcagaaagtccttctcttacgccacatggtcccctggaaccgacgggacggtctcctctgccgcacaacttgcgtttttcaagcagagaagagcgaaaaagtcgggcgttcgcgatttgcatgcgggacttatctgggggttttcgccacatgttcgcattttctctgcacttttcgaccggtctcgcgcgctccaggccccgccaatgagttcgacaaaggactgaaatgctggcgcgaggcttccgagacgcgtggtgttggatttcagactcctttgatgttggggaaacgctttaaaaagcctttcttcctcgtggagcgaggtgtctcctgcctgctcggggccgagagtccgctggtcggtgtccgtgtctctctttttctcggcattctgcctcccttacatccgtcagaggcgctcacaggctgaagcactcttccttgtccaccagcctcctggttcttcctatccctcttctgtcgcctgcggttttcctttcgtctgccccattctaccagagacgcatccttttcaagtagactccggcgaagagcctgcgtggaatcgctccgcagtccgagttcgaagcacgggggtctctcttttggcctcgtttcgtctctttttccccttgtctgtctcgatcttctctgagagagactcgacctcaaaa

SEQ ID NO: 2572 - DNA, 666 bp, Toxoplasma gondii
  source 1..666: mol_type = genomic DNA
gttttgtagagtggcggtaggttcacagaagggaacggaaccgaggaccgacgcaacgaaaaaaaaactggcacagttcgcgtttttatccatccagtaggccatcatcgcgaagtgtatactctcccaagacacggagtggagctccatctggcgggaaaaaggaattaagaaacaaaaaagatgcaagcgtagcgttcagacacactatgagttctttgagaggagacatgttgcaactgaaggagaggccgcgcgctcgaatcgaaaggcggcgctgcgagtttaagaaaatggaggtagcagcgcgcatcgcagttgtgcccgaggaaactgggggcaaagaagaagacgccagtgtggagtcggtgagaaagctgacgcagaaaacagggacagagggaggaacagaaaaaagaaagaatcgaggaacctactttggagaagccagtcgccgacagcgacggctgaggcggttccgtcaccgtcggttgcgagggggacgaaggtcgtcattttttcagaatttgcacggcagagaggttttcggggaaagggtgaggagagaacggaataggtgaaaggcagacaggagggagagcggcgaagaggcaaaggaggaaatcgccgcgggtgctcgaagtatctttcaaggaacggggagta

SEQ ID NO: 2573 - DNA, 3120 bp, Toxoplasma gondii
  source 1..3120: mol_type = genomic DNA
ggggaaaagaaggtgtttaccacattatccgaagagcggtccgaggagaaaaggaacagcgccctcatcgtctgacgtagagtttgggctgtgtgtaatggcgactgtgttcaatcagaaaagttgacgcagagggcttactatgagaggtggagcgacgcagcgagccatagttttgtatcgttggatgctttgtgcatagttgtatttttatgtatccgtaaacctgctcatctgtgagtgtaccaatgaaacacaagcgttcctcttctaggctttagggagatatgaatgtgatgttcgactgtgtctcgtcatgtcttacgctatcgatatacagtggcagcactatctgggactcttgggttgcggtgctctcgttgaggtgctatccgttttctgtcaagatacgtctggacttcagttggcagtcaagcgggtcgccgctgagtgttttgtttttacgaggtgatgtgacctctattggcgctgcttcttgatgttctatgtgtgccatttatccggatattcactcccacagtcgctgtcacagttgccagaagccagccaaggactggcggagtatcgcacacattttgccaccggctacatgtattttggggaagttgtgtacgtaccggctccgttgtgtttcgtagtacaaacagcgcacaactccccagcgtgctgccggggacatcaaggtccgcaactcatttcaagagctttttttctaggagacacagaatctacggaccacgggaacgatgtaggtggaagaggtagcgcgtgtggcttattcttcacgtatctaggttgacgtcttcgaacagttgaggaagagaagtacagtgcgtgcaggcaatacaactctcttcctagagcacactttcttttttttcagcttttgcagagtcgctagacactagagccggcgttaagcaccagcatgcttaggtggacatgttgcttctgtcacactttccttccagtttttccgcaaccgcatctagtggtacaggcaattctggaagcataagttttcactgctttgtctcgatactgatgccgtttttcggacaggcagggcttatacgggatgtgcggcccgtccctcgctacgccgctcggctactgtctcggtgccggtgcagagacagcgaagacatgtatcacagaaattagaagactgaagccaggaatacctgagttttgcgaatgcagtgtggccgctcacacttttccagctaacacagttcgaccgcgatgctgatcatttcaagtgcatcacggtgctgaaacaattgaggtttcgacgaccttacttgtccggtcccgttcccggcccctgtctcctgcacagcagttacacttctttcacatttcaggcgttcacgaagagttcctgagagcacttatggggaggcccgtctggatcgctgtgtgccaccagtgaaaagtcttttttttgcctcatttccgtacaatgagactgttcagctccagtctactgaggcagctgtctctcctttaggttctcgccttgatttgctgaaagttgacaaccctcagcacaggagaagaagctgcgttccgggttcctggaaaagtaccggcgttgtaatagtcttttcctctgtaggtacgattgttttgattgcaactgcgcgagcggccgtggttggagactctacaagcgttacaaggtgtgccatgtgtcgacttttcgcccttaattttccgttcccagctgcggcacaccagggaaaaagaaagggtgtcgaccttcgcggtttctgcgtttttgaattctgaaagccgaaaacctgaaggccttctggttcgccaacgtaatcatgggtatttaagagcaggcatggacggagttcgcctctctcttagtgctgtcttcagcttgctagagcgctcatgtcctgggaacgacgccggtacggtctcttcagcaggtgaccataaacgagaactgcggaacacatggaggatatccacaaggcagtaccatgtccagtagctgttttgcttggtgtcttctcatcctgtggtctttctaaagcaatcatacaaaagcctccttccttagagaggacgaccgctttgagccgaagccgacgagaggatccaagtgaacaaatgtgaagttcgcccgtccctcggtgttcggttttgcctgtcgtgatattttcattttcagcaatctttggagattttctcctccacattcttgacaggtgcagctttccttcaagtgtgcggagacgctctggaacagacctgtatccgcgtctccgcctactgtcgttgccgctctcgtttttttttctcatcatcgcagcttatctctaagccgttttcgataacacgtaaactcccgaagtggatcgaattcaaatagtaactctgatgcacaagcgacgaactattcaaaagcacaggccatgtcgccggcgggaatctcccagctctgcctgcatttcaggggataagttgttgaatcagctgtcgggtaatccaagcgttcggttgctttgttttctacaatatataccatctgcgctctgataaaacagtagaatttggatccggcaacaaagacctcggactgtcagttaaggaaattcacgaccgtaggtgttgcgtctgtctttgttctgtgcaggcaggcgtctctctgcattgcctgaaaagtcttagtcgcctgcgaagagactcattttcagctacatgtctgtcacccctaactggattcatctttttctaaccggctaggctgttgtagcatgcaacagttcaaatcccattttgctgctacttgcggggaggcactgtgctcgcctctctcaggcatgtgaggtaaatgaacgacctgagaagatcggaaaacgagttttcctgcaacattttccgctcgccgctttatttgcaacctcctaccacgcccctccccttttgccgaagattacgaacctctttctcttgacttcctgcttacctgtgtcgtcaagcccgttatccccacgggaggttaccctcagcagaagcggcacgccgccctctcgtttcggctctcgcccctgttcctctgccacgtttcctccaaca

SEQ ID NO: 2574 - DNA, 2897 bp, Toxoplasma gondii
  source 1..2897: mol_type = genomic DNA
accttgaagatcagctgccttaggtcctgcaagtcctgtctctgctgctgctgtcgctgtctccgcgcctgccgcgccgcgggggtagtcgctggaagcgaccgcgcacgcgccggcgttgggtaatggggccggagaaggcccgtgagctcgtcccttgcgttgtggggacgaggctcccgtctcccatcgacgagagcctcggagccctcaagacgatccagaacctgtcgcagttgctcgacgaccccgagaatatccgccgaggccgcgatgcctgtagaaggctcctcgaggcccgcacgcctcctcacaggctgctgctgaagaagcacttgttgcagatactgctgaggccttccggaagcggtgctggcgactcgatgagatctctccgcttggacacggcgcgcgcgttgcaggagaaaagcgttcacggtctctgcgtgcggctcctctcgctcagacgccggagagtctggggcccgacccgacggatggaacgaggccgcttcatctctcgaaagaggcgtggggggcgcagaagtcgagcacttgaaggcgagcgaagagctcacggaaggcggatggcagccatttgaggtttcttcatcttctgaggaagagaaggacggttgacgctgaaagaactgctgttccacctgtggtcgaagtcgacgaggaggtggaagaaggcgagacgcaggaaggtacataactccgtcagagctcctaaggaagggagcagagtgagacgagtcgtatccttcttgaggacctggaagacgcgaactggtaatcatgcgattgacggaaagtggcagaaaccaggggaggacagagagaggagctgtgttcctcttcgtcgctggagaggcgccagcttcggtcgaagcggattcacacactccctcgagactaacgccacacaaagccatgtcgctctctttcgcttcaacggaaggactcgcctcccggtcagactccccatctgtgcaaccttctctgtgtgaggtcgcctccggcacagcatcgcccctcacgccatccatttctgaatgcgtaaaaaagaagcaaatttcttctgaatttctatcgataggagagagggtcattaaaggggagtgctcggtcggttccgcctagaaccacgaccctgacgagagaatgccctgcgcaggcaggacaacgacagagcgcggccaaaggcaccagaggcaggaactgacgagcaaaaggattaagtgatgttgttaagttagattccagtcatctacaaacaccggaagctaatgcaacaaattatttggttgcggcagaactgcagcgaagagtccttcgacacaagaagccaccacgctgtgctgggcagcactgggattaaaaataattgagttcaggtgctccatgaattcccagccagttttgtcacacaaattcgttaagaagcttccacatgagttcgcctcgttacgggtgtgttctaagaaagcacaccgcctcctccccgaaaactggaggaagtctgaaaaacgcaaatccttttggtcctgtttaggcggcctgctcaagtctcgaggcacagccacttaaacgggcgacaaaagacttaccaaccgaggaaaaggcgagactcgcgcatagagagggaactatatgctacccttcaaggagacatggagcagactgcttacgtaagcggtctaagcggagacagacagcctgcagttccagctaaaaaatcagctaccaaaaacggtgatggagccacgaagaacgcaaaggcttataatcgtcttcatagctttgctgcagtacttctatggccacgagttgggtatctcgtgtgtttcgagcaaaaaagaaaatccacagagaaaattattgcctgtgcagtgacaaggaagatggtcgagtgaacagttcgcgagaggttagtcccttccgggagttccaacaacgcgtgggaaaatacggtggtccggcgtccccaacgtagaaaaaaacggcagctctcatccggaaaaagagtcacttacgatgtagaagacgaaaaacctggagggcgaccggaccaagaaacagtgcaaaagtggcgctcgagcgtcgccaacagaattcagtgcgcgttgtatgctacagcaccaaaaatcctcttctctgcactagttctggataacatcgacgacgtatagttgcagtatgtcagtaagatgagacatcaccactgctggagactgatgatttttgcgtcacaagaagcaacatctcgcgagaaaagcccacgccatttcgcatgccactgccgcaaagcgggcatgtacagatcgggacgacgcgtaagtgggactgccgcgtgtgctcggcggccagtttaagcccacattcagaactctgcacgaaattgggcggcgagcatcaggtgccacccggtgaatagagacacgtattcttcttttgtctcatccctcgctggaaactcgtttactaacagcgaacgaaaactggaacggtgcctcctgtcccgcagttgtgctcatgggttacggggttcttccggtacgggagcgcttccatttaaccggtgaccccacgagtggcgcggggggttcaggcacgtccacaagcccgtaagaaccacgttgaccctttgaaatcaagagtgcccgtattccagttgatatcaactagcacaactgaagcgtcagcagcacttttttttgacttgtcgggtggacatacacccggcacagccatgatgtggaactcgttacttctgtttgcctcgaccgtttacatcggtagagcgttttgacggtggtaggtttacatactaattggctgaagcgtggctctagtactgagtgtctttaagattctgtacgtatcggaaaaga

SEQ ID NO: 2575 - DNA, 2661 bp, Toxoplasma gondii
  source 1..2661: mol_type = genomic DNA
gttgcgttccactgagcgagctgctgggttgtagcttcctcggttacctccacaacgcagtcgacatgcttcaagtttttttcgatcgccacggtggcgcggttcatgtgcgcaggaaaccaggtgatcgatctgtcgagattgaagtgggcgcgcggcgagaagtctggaaagagaagggaggactcggcaagcttcccgggtgtacgtccacctgagcggagagcctccgcggtcccctccgttcccccgccgaaggactccagctcgcgaggaccgaagccgccatcgatgtctcctggaccaggctgccatggactcagagaccgagaaccccacaaaggagaagaagaagaaggagaagaagaagaaggagaagaaggagaaggagaagaagaaggagaggaaggaggaagagtctcgtttaggaggggaccggtgggtcttcgccagaggccgacccggttacgcgacgccatggagcgcgggagagaagggagaagagcaggaacgcagaaggagatctggaaggcgtctcaagccgcagaagcgagaggccgcgcggcgaacggagtcggccatgcacttgcactgtttttgccttccgtatctctgagtttcgcggggcttcacatcgcggcaaagagaaggcggggaaaaaagacgagagaagaagagaagaaaagatggcgaaggacgacgacgcagtggagttcttgctgtggagacagggccaggagaagacgccgaggcagctctcgactcgagctcggcgacagagtggtgctggccttggacgcgaagttggaatgaggggattctgtctccagggcaggaaccagcgagagcggttttgacgcaggaggagggagactcgcggcgagacggcagggaggagggcggcccccctcccccacagaagaagaagagatccaggtgaaaaacggagcgaaatggactcggagagaggcgactttcccgcggtcgggaagaacatgcagcctggagagcacaaagaagggaggaaaaaaatcgaacgtccggccggcggccgacgccgaacaaggagaccgcgcggagagagcttggtgtggttttgtgttttagggaagcaaaaaggcgagtgcagaaaaccttgataaaaactgtcctgccgaaacggccttctttcacctgttcgctggaggcgtcttcgaaactgaaggggagagaagagcctcgccgctgcgtcgaggagactccgtggcgccctttttgtctggaggaagaagagaggaaaaagcagcggtcgtcgtcgattcgaagaacctcttcactgtggcttgttgccttgagtctcagagatcgccgaagaaggttcgctttctctgtccttgaggaaggaaacgcggagaagagaaacaaacgaaactcgaaaacagcccccggttgtcgaaaaagcggacgctctcaagcactcgcgactaagcgcgctcgatcacaactcagaggcctcgctctcgctctctctcttcgcctcgcctctctcccctcggctagtcccgacgctttcgacaatttccgagccttcttgcggggatcttttttctcgcacagcgacgcgtcggcttctccgtctcttcaacaatttgactcctcgcgaaaaacgagaatgacgagaaagactgtagcgcagagctccgagcttcacctcaggcgtccctactcctcaaagtcaaagacaagaagacacccgcagggtgcagcgcggctggtgtttcgcgtccatttcttgaggagtacttccccccagtttttccctgatgaaaaaggacagcgttgcttttttcacctgcgactctcctttaaacgaaagcctctttgacctgtcgagcttcccgcggcaacgccggactcgagcggcggcggaggtcgcggcgccctcgaggcttctctcgtttttctgagtttttcgcgctggatcgacttgcaggaaacggttccattcttccgcgctcttgtgagcagtcaaggcctccttcttcgccgacggagaacggaggcgcgggtcttggctaccgtcctcctatctaaatcgtccgagatcggctgtgtctcccttgtcttcagttgccactcggcttctgcttttccttgggcctccctcgccggagagacgtccagctctctccctgaccacgcgcaggcaaaggcggtagtgttcatttctggagatgcgtcggatttgtgggcggttttcttcttctctgtctctgcgctacacgctgcttttgcgatgaggcgcgagagaactctcttccctaggtgttcgcttcttggggttagcgcgagaaaagagaaaagagaaggagagcctccaccggcttcaaggagaacgaggtgagggagagaaagagagagaacgaagagtcgaatctccacgacctcctctcccagctgctgctccttctgctcctgtcctttcttctccttgtcgtctgcttcctcgactctcgttcctgtttccgttgcgcgtcggtttttttgtctttcctcagtcatcgtcgttgttcggcgccctccccgtgtatccaccagtcgtcccccagttcctcgctcgcctccttccctctgcttcctctccgcgttgtcttgctctctccttcctccgtttccttccaa

SEQ ID NO: 2576 - DNA, 2466 bp, Toxoplasma gondii
  source 1..2466: mol_type = genomic DNA
gctggtggccacctgaactgtttcgaccgcatccagcttgtctctcgtccttgtgagaaaggcgccgttgccccgtctcgttttttctgttcttccccttatgcgtctccttttctcgtgtcgtttctgctccctctagggcgggcgcttgctcgaacggatgaagaactgatggagcatttcaacatcagcatgaacaaggacgaactcatcaaccagttgaatgcagtaagtgacgaggacacggtggaggctgcgatggactttcatctgttccttattaccctgtgtttgggttcgcggccgtccacgcgcgtccgcaaagtcgttcgtcatcctgtgttttgccgtttctctttgttttttgaagtcgtcgttagttgtcttcccgtacacgctctcccgttgttcgttccgcgtgcttgccctcacggccgcgcgtcgatcgccaacctgcgttcgtgctcaggcccggcgaaccgaggagtacaccaagctggcactcgaaggcgtcgcgaagctcctgcaccagctgcagaagggatctggagtggatttccttactcgtctcgactctcccatggagaggcgcgcgagtgcatgccgaaacaaaaagcattcctcgagcggagaagatgcaagagaaggactagaggaaaacagggaaggaacgggaagcgctgctggaagggggcacacccccagtggccgcgtcggtcaacctgcaggaagttccggtcggcttccgtcaccgttgaatggggcttgaaactgtgtggcttgtgctggcccacttcgccagagcactgggaagaacagcgaagaaacatttgttacaaaaaaaagtgtacagagttttgaaggcttcagtatggaagggttccagccagcgaccgccggagtccatgcgcgcgatacatgccgtggcttcggcgctagtgtcggcgatagcccgcagaagggacaactgttctgcgcggcacctagcaggaataagtttccgttttgaatgccaaccagagagtattctttgcgagtcagacactgtagaggagaccaaaaggtcgtgtggcctcgcaagtaacagcgagagagacacagcacgtgcagaaaatttcagaaaaggccaggcacgacttgatccgaaaaaggagacatccgtggggttccgcacagtgtattttccgagcttctccaaggccatgcagcgataaatgaacaattttgacccccacataccgaaagaaagtacgcaaacaccagacacagatgtaaccacttagctggcatcggtcggtggaaatgcctcagcctcgaaaaaccggttcgcccactatccgtcttcggtttgttgtttacgggagctgacccacaaacaacgtctaactcgtacaaaatagaccgggcatgtggcgaatacctggggaaacggcggttgcctgccagcgggtcgaagacagagagatagtttaaggaaagcatgcatttgaccgtgaaactcaaaaaagcgtggtgccggctgaagctcgaagagttccccaaagcagctctgctcgtatgggttcagtggggtgtctgttttccccgtgggtctggcggggagtgcgcctgtcggaggtagacttcccggtggattactggaagtaaatatgccgtgctcacaaattgacacgacccgcgacgaagcctgtgggcccccgaggaaacttgacgtagcatctgtcgcgtttcacagcttaccttcagcgtgttcacgtacgccgcctacaacagtactctcttacgaggctggcattagggagctatatggctgcgagcaatcggtaatcacacaagccagcggccgtctcagatggctcaaaagcacactggtgctcgtcggctacatctatgactttcgtggttgttccctgcttccagtatatcgtattattgagtgcatgcttgcagtgaaagcctcctcgatgttccaggtcagcagcagccctgttgtggcgggtaagagacggggcaccatataagacagcagtaaacgtcacgtctctttttcagaaaaatttacatgcagcgtgacctttctcagaaggaggataattgctattgtgcttcgtttccgacggaatttgctatggaggagacttacactttctcgccaggcgtctctaaacaagtggcgagtgctctgtcaccgtctcacggtttgtgttagtgacgctcattggactgggtcactgggcccgacaaaagcagtcccagcgttacttgtacacaaacaaaacggtcactgtatccatcaaagaccgtacaggcgagagttgcgtgctcgtcagttcttgtggcgatcaggtagatgacgtctggggaatgtgcacgaccgtgctgttcacccatggtgtttctgaggcatgcgtgatttcttgaggcacggggagctatgttataacccacgctgtgcgtaaaaaaaga

SEQ ID NO: 2577 - DNA, 3007 bp, Toxoplasma gondii
  source 1..3007: mol_type = genomic DNA
atgttcaggcggcactccagtggctagattgccctcgtgttaaacgccgtggaacgcttcttaggtttgtatgtgcatttgctgtgcacactgcgtaactgcacgtcgagtgtagaaattgagaagacgcagtactcgtttctttcttgaagcttcacgtggtgtggcgtgacagtccgttgcacacggtcccggcgtagctcatgtgttaaggtcgcgggtcagtagtggagtcgctgtgctgtgctccagagcagcagagacgaagagactgcagagaggacgtcctttcggaatcctgctctctctgccgtcttctctgggagttcttggctgtctgtgctcgtggtcaccgtatatcgagttcccgggaaaggttttttccgagagcaggcagtcagcaaggtgcggtttttccgccggtgggagaacttcaatggataactgccaagcgtcggtcggagaagaagttcatactcgtgcgtcttttccttagtgctttctatttttctcggattgaacccgatagtccatttgtctcccggcgtgcaacgtcatttctttccttgcttcctgctgtagcggcagacatcccgggcaatggcagtgccaggcgaaatgcaaaccagcgaaaggtgctcgtgtagtacgtcacactggaacggaacaaatctgcgggtcaacactacacggttcgtccctggcagtaattgtggacagagtctaaatcagcgacctggcatttaggtggctcctgcccgatacagcgaaaaggtgtgagcgtaccaaaactgtaaaagaaaccagtagaattgtgagaacaggtctccttcgcaaaaaaggtgcaaaacgagtagggccttgttcacaaaaatgtcgactgccattctcaactactactgtggaataagtcccacttaggagactggggtgttgatttgccttaggacaccttacctgtgaactaggttgggtgccgtggcggtcgccgtgtatgaactaactatggcacttcccctccggctcatgagctttgttgccaaccaacagcagaccagtgtatgaacgccagctgcctgttccccttccatccagagagctgcagtgtctgggaaagtttgtttaaaacagagaaaggaaatcgtgcgcagacgccaggtttccccagagggatagagatactcgaaaaataactagtgtttctggttgcgagtgtgcggtcttcctcctcgacgctgctgcgaagaaaaatctgttttttatgttcgcagaacagtgtgaggatcagcgacactctcctcagatatccctgctatcccccaaatctgaaaatatttcagatgtgggacgggaaagtgcaaggacatacatgtttcccgtgttgcattcctgtcggctatccggcagcaatacgggtaaggggcagtacaacagcggaagcttctccaatcacgtaccagtgaactcttcggttgtctgcgcagtttgtgccatgaaagtgcgttcattactgtctcctcacaataaaaggaaagctagaattgttagggcattcggggaaagcatggcatcgggaggaatcgtgcaaccctggggttggcacgaaaacaagctatgcaaacccgtcttgtacaacagggcggtccaccgccagtttaaccctgctgctgtttcactaagatggtgaacgaacttgcatgtagccgcaagctcggttgaccctcatggtaggtcagggatcttggtcgcagccaggtgtaactgaggggtgatcccggccttaaatggttggccgaagcgacatcacggtcgcgcaaacgataccaggttaccgattggtacagcatggttcgttgatgtgtacatcgttctaccgtccgatcggaaagtcattctgcagagtagtatgtcatcgacttctagaccagacaggtctctgacggctccagttcgccccctactcctgatgggcaatcgaagagaggtcaatgtcaacttcacttaaggcgctcgtcatacctataagcacagtctgctctggagactcacgtttcgtatttaaaatgaagtagttgactgcacaataacgttagcagtttcgattgtcattgacacgtgttcgctctgcccttctaggtttgacgtcaccaacggcatcgtacgtttcatccaccacacgcagcgaccttttgcgctcgagtagcatggtgcaagaacacgtgtctccgcaacggtttctatcgcaagaactgccgatccagtcacaggtgcaaccgttccttgatataattgccggtggcgtctctttgcccgggtagcgtctccttctcggtgatcgtcctcggtggtccattgttgaagccacggatacgacgtgttgcggtattcacttggcaaacacgttgtcgtcggtgaatggcgacagtctacactaaacaccgcagcttggtaacaatactaagaacgaatgttctgcggctgaaagtataacaggagcacgcaggtgacgcaataaaactgggtccgttgtccctccctgctggcgtctccggtgattttgtacccgggattcactcaattggccaatggtagagatttcgttgcgtgttcggcctgcctcagtttttgtgtttcttccggtacactttaccccgatcttgtgtgatacggcattgaaatcaaagctgacagactggatgccagatctgggcggtgagaacctgaaccggaatagtcagtcaagaaatacgaggtgctaaaagcgtgtcgcccgcagagaatggttttttgttcgtggcgaaaggcgtggtgctcagatgaggactattgattttctgttctttcgaagtgggaatggtcagaatcaaactgtcgtgtcaagtatactgcaaggattcaagagcatttgtgtgaccaataggatctcatcggaagcagttgaaaccggcgacacccgtgaccgcattcgcccgatcgagcacgctgaacaagtctgtcatcggcacga

SEQ ID NO: 2578 - DNA, 1848 bp, Toxoplasma gondii
  source 1..1848: mol_type = genomic DNA
atttcgttattgtcggcgcatctttggcaagcgacataacaaacctcgaagcgttattgtcggcgtttcggtgctactttcggattctgtgtttaagcactttcccttcacagatttatgtgtcgccatggggtatctgtggttgcagagatccagctttggggatttatcggggcacaggaatgcagagagattcaaatgccagctgtgtggttaaagccgtcggcgcagattttgatgcacatttacctgtcgttacacggtgacgtttgcaactatgagtggaggtatcttcttttgcctatcgagctttgtagttttgttaggcgcatatctgatgtatagctgcaactgagaggtgaactccgggggcgcggcatcagtttgttcgtgctgtcctccttttttttcgtaacttcaatcccctttgttaagcattccgcctcctgcgtctcgaggggttcgttgccagtcttccggcttctcgtttcctttggcattgttccagcactatcgccgattctactcagaaggcagttcgccacggaaatccggatagaatatctaacaatgtacccagaaaaacgcatgcattcaaactcggataagcaaccctgcttcgacatgcacacgtatacccatatatatatatatatatatatatattgtactcctttctttctgttcactgtttaagtggcctgctgtcaacaaatcgaattcttatctgaggccctgtgtagcatctgcggcatacgcgcatgtctgtctagccgattactaacactgccaaaagcctctccaaacgagtccagctactcaggaaagaagccttactcttggcattaagacaaacaccgctggcacatgtttgtagacagagacacagaggatcgattcttaaaggataaaagaactctgacgagaaagcgcacccgaccgtgaatggcctgtcatgacctcatggaacgtgtaagctgctttcctggttccttaactgcaaacaaaacgcatatatatatcgtgaatgacaattctgaaatacatttacacgctggaggattctgatgaaagaatcctacggtaacaccgacaatgaaggttcgaggtttgctacgttccgtgcaactgttaacgacacggtagagacgaaattccctatctacttttctgtgtcgaatggagccctgcgaaaattgcagaaatctgaagtttccggaatgaaaacctctcgacagacagggctcgatggaatcaagtgctaatttttggaaatgcgtgctttttgtggaaggcctcttcggtgtctccaactcaatgtcaataccggccgcaggaacccggtttcaggcacatgagacaaagagaactcttttttgattttgagtacacgaaacattggcccatcacgagtttctcagtcccttttctccggtaaaaaacggaggaagaagtcattctccgacactgatgccgcgcacaggcgtcaaactgcactgacacaccgtttctagccccactgtcggtagaatagagaaacacacacggacatacttcttctcttctattcctccctcttccgcaaaaggttttctctttacgagttttagaaaacccccgctttgttctttcgtccagctcttcgaacggctctgttttgaactttcgctgggaatagatgcggtggactttcgcaaagacaggagacacgccacgccccttttggaacgaaggcgcgtctcgagcttgagaacatgcgaggaaaaacttggaaatatcaacaatcgagggttgactgtcgagcatctgttcgttccacgtccaatcgccggtcacgtgaaacctaaa

SEQ ID NO: 2579 - DNA, 1766 bp, Toxoplasma gondii
  source 1..1766: mol_type = genomic DNA
acaggcgagaaagcctcttaggccgcaacctcagaggcagagagaaaggagagagagagcaggaacagggcggagaggaaggacgcgacgggaggagagaagcctgagagagagaaccggcaaggacgggaggagagcgaggaaacggagaagaagcctgaggaggggaggaaaaaaaagggggagatacactcccggcagtgtttgcggctgacgtcagaaagaagacagaaagcgattgtggcaaggaaacggagagcaacgcgtgagaccgcggaagagcagaaggcgggcaaccaaaaggtctgcggatttgcgccgagtgaacgggatgaagaggaggaagaaacgcgtttggggagcgcgcagacgagatagagaagacagaacgtcgtcggcagctttcggagaagtccggacagaagaagagagcagcagaggaagggggactgaagagcagcaagagacaaggacaaaggcgaagaaggcagacgagagcaggacgaagagacagtcgagcctgcatctccgatttctgcagaaggcagaggctccccgagagattcaggcgttctgttcgactggggagaaacgcgaaagcactgactcaacgagaaacgcttctgcgtcctcattgtgaagactgactggaggacgagagaaaacctctccttctcggaacgcgagcgtctcgacctccagcctccggagaaggccgaacgcgctgaggtgtacagacacccggggcagtgggaagactcgaaaagcagacgaaaacacactcgagagaagtgaggcaagagggtatacagggagctgcaagcaagaaagcagaagacaggaagaaagaagacaaagagagaaagcaaagaaagcaaacagacaaagaaagaaaccaacgaagaaagcaaacaaacaaagaaagaaaaaaaagacgcctttctcgtgcatgagagagaggcacactgtgtatataacgtcggctgcgttgctgagagacagacgagacagctgtttcaggactcccgctcccgagagctcgtcgcatgcatcgagatattctggaggaacgcacagaaacaggagtgaattcacccttgtttctctcagcatcttttgactcaattgagatccgcttcacaaagaaagtacacagaaaaggagaaactccgcagcttgttcctttgatccgcaaagaagagcgaagcagccccgttctctctctgcatgcattgcgcgaaaaaaatcggaagcgctctcaaagtcttgaaacttcgccatccgatcgtgactgttttctcgttcttcttatttttcgtcttccgtgaccggtgtctcctctcatcggatccccttcttccaggcgtcgatttcttttccagcgtctgccgctgcatctgcgttgagtcgctgacattttcgagcgcagagactcacacgtccttcttcgtgtgtttccccgttttcgttttattccactatttttccttcgttgcctggcgcgcaaacttctcatccttccccccgcccccctctgcggctggcaaagcgaaaacggggaaactgttctcggggatcctcttgactcttctctctcctcgcccacaattttctccgcgctctttcacttcctctcttgggtgctcgtcctcttccctcgttcctctagcagttcggtccttctctcttcttctcttcttcgctgtgctctcttctcgcctcttcacttgcgcctctgtcgccgtctgcgtcttgttctctcacca

SEQ ID NO: 2580 - DNA, 3180 bp, Toxoplasma gondii
  source 1..3180: mol_type = genomic DNA
actcactcgactctacgcgcgtatacagccgtgcatgtgcgtctgtgtctcccgtgccgatctttacactgttgtgtccagtgtgtgagctacgtcgagtaataaaagtagaggtagccgtgcatgcaaataaactccgatttcttgtcggcggtggcgctgcctagtctgcgtcggagtgtatgtttttttagatggctgtcggtcacattcaagccgatttggttagagaaacagactttggaaaggccttgcacagccggagcgtgcatgcacagaactgcgatacggcctcttgccgctgctccattttcggcggtgcttcataccgctcgtatgcggtcccagttgccggagtttttcctttcagacaaaccagcagaaacaggactatccagtaggccttaccgttcttaaagttttgagggaagtaactcacgcggttgcttgtgccccgattctttcgcgcactcctcaactttgcctttagtagaagcgatgccttggcaggtagacgtcggtccacatagaaatactttttctcgaagtcactgggccattcatctcctccagaagccccttccgatcgcggagttacggcgtgctgttgagtttcgcataggcatcttcgggagagaccggggaacgtttttaataacccctcacgggggggacgcagaagccaaggatataaagagaacccaagagttttgcacgtgctctggtcagaacagtctgaaattcaaaacgtggcagactgttttttaatgccctgacacatcccctcgtatgtgggtcccccgagggggcggcggctcttcaatccttttacaatcttgctgcccattgaaaagcaccgtttagtcgactgccttcttgcgtctcttcggacagcttggcgtgcatccaggtctcacagaaacaagcatttcgacttcacgactaggtcgagtgcgggttgtccgcggtagttccaggattgcattcgtctggtacgaacgcgcatttctttctccaccgcaactagcacgctgaaacgccatgcacgagtttgttctcgtattgctattggaggccaccagactctcaaaagtctggacaactcttttttcgtctctgttggagctgtgggtggcagagagaagcgcgcaattcttgggatcgcgcgctcatggttctggctgtggggtctgaactagcgtttccttgacaggctggaggcgcagagacaccaacagactaaagcaaccgaactcctttcaacatcagtgacaatatcgaatcagacacactgccctgtgaaaaagtacgagttgccgccgactccggctcgcgttccacgacggccgcatctgtgagtgttcattgccaagtggctcggtcaagtctgtgggttcgcgagattcgacactattagctgtctcaagcatccagttgcgttttgtgtccatcagtcccgattaacttgactgttcttcgtagctggagtcagagccaggatactaggcactctggtcggtctgtttagtctgtttatccggtttgcgcggtgcagttctggatcgcggatcctacgtacaggggggcagaatctacttataatgatacacttctgcacaaggtttggttgtgccgcgcgcttttcgcgtgacaagtgatcccattttctctgtttgcatttcagaagcagagtgaaaccgtgttgaaagaccggcgatcccgacttgacggctggcagtcgctgcgttagacgagtaagccgcctgtttgcggcttgtgaactccacgaagtggagtctgcgactttagccgtgaggaacatttcttcgcagaccgccaagcctgtcagcaaacacgcgagaaagtcgcttctttgagtaagcggccagacgcagctagccagaactgagttgtgaatgctcgagctcaggtgtccaccacctgccccaaagggtcagccgcaccggtatgtccattcttttcggtttttttgtgtcgaagaagcgcgttctagacggtgggtgacgaggcaggtgtcattggattcgtgtggttcgaccacaaagtgatattcttttctggaaggacgctgttgaagattcgcgttggttggcgcggaaacagcgcgaacgacccgctctgtcccacgaacatcgggaagcaacgtcttgcctcgcgcgttactcgtgtctctggaggagcagcgagagcgcggaacgacgaggaaacgcggcacgtgtagagaaaggagaatttgtccgttctttaaccagacagtttcgaatcttggcaaaaaccgaactggcgccaacccccgggaacttccgaaaccatgtcttgcaacgcgtgtctctctggtaacaccggggagggtcacgggagagcgttgggggtcgctttttttcgcacagcgtgtcgaaagtgtttgtcaaaaaaaacgcaaagctcgggcgtcttattccgagacgggaggtcttcccccgctcctcgtttccgcaggaatgttgggctctccacggaaccaagaagaattggacgctgtccgtttcctccctgcttcaagccccgtcgcctgttcgtcgctttggtccttttgtgcggtaaatgtgtgtgagtcgcactttgaccttgttctgtctcttcgttcgcctttcttgctcccccatctgcattctgagaaagacagagaccctggagagcgtcgctgccgagacggcggggcgcgaagcactgtacaatcggctttcgtcaaggccatcctttcctcgccgttcctttattttgttttcctgctccctttcgctctttccgtgtcacacactcttccgttgcccctgtcctcctcttgcgcctttccgggtctctcatgtcctcgcgtctgcttccctttgcttcttttttcaaggtctcgactgtctccgtatgtcttccgagttttttttcgtttcgcactccgttcgcgtctccctttgttggagagacgaaagcagtcgcctctgcagcgcatgcaggtgccacaaagaatgactccaagtgtatggacccctcgcggtctccttggcttccgctcttcccccgctgagagggacgagcacagagacagaacacacagaacgaaaacgagagattgacatcagggctgtagagcacagaagaaagaagaaacgcaggacgagaaga

SEQ ID NO: 2581 - DNA, 4342 bp, Toxoplasma gondii
  source 1..4342: mol_type = genomic DNA
atgtgcattgaacgctctcgaactgttaacgtcgctaggtactgtagagacgttaagcaacgtgagcgataaaaccagcgtcgttaaggcaatcggcgtagtgtgtccagcggaattcgatctgcatatcggcagagtaagggggctgcgaggccactctgacgatcaacttcttacgcatgacctggtgatgcgtcaccatcagaaaacccatttattgtcgaaggtcaaagatatgtgctggactaactccccgaaggtggagggcctacatatctggttacactgtgtgatatcgagcgttatgccctacgtaacctaaaacgattccccgtgcttcggtaacgcaaaggacttcaaaacgtagaagctggttgaggggccaagaaaacaaggcaggaagcttgtctttctaaagaagtgtgtagagagcgtctgggttgtttcgttgtcttttggtgagatgtgacaaaacaacggacgcgcaaatgaagttgaaacaccctaccgcaggatgacacgagaaatcatctgagtctaccacccaactcgaggtgccaaacatattgtgttcgaacttttttcgggcacccgaagctctgtcggttgcatacactgaagctgtcactcatgtggcgtcggaacctcaacttgccaacacttgagtgcactgtcgaggagcggaacagcgcaagccaggcgccgcagaacagaactattatgtgcccatccagccggtgtgcgctcgtcttgaatcttgatcctcgtgtctgccagcagcaaaatatacatgctgcggcatttgcagcacagcactcacggaaagacgcatagtacgtagacgagactctcgcatcatgtgcctgattcgccgatatggccattgccaccggtcaatacattggatcaaaagcatcatgtaccacgggcgggtcaccgccgtttctgcttttcgagttgcacaggaaagccaacagatgtacgacccaaggattcaaccgaacgtcgaaaaattcacggtcgttgagggtcggagttgcgcaatacaagcaggaggtctctttcggtttctcatatgctcgtttttggcttgctgaaccgcgtccccaggtaacgccatctggccacacatctcatgcagcatctggtcccgatgccctagggtcactacatgtgcgagagcaaaggcccttgaccatctcaaacgggaactcgatcggtttccctgtcgtaagtttcgccgcaaaaagtgtctgcgccccgcggtcaattctgaggctaccgcctgatctgccgctataaattagggtgatagcgcgctccaaattcacccgtttcgctcgtgcgtgtgccaccaccgggcaccacgcatgagagaagtcctggtaaattgcacacttcggctgcagacatcttgcagacgtgtaacgacaaggcgccatggggattggacgtctgtcttatcatcgattcgtatgaacgctgtttcacttgggagcgaaatgctgttgtctccccagatgtcttcaattccatggaagtacgtacgtgtgagtgtgtgtctacgtgcctctggtttgtttcgcaggcgtgcacgtcggatccatggcaacggtgtttcgcagcgttagttccgccttggtcacgatgttcttctcttttgagttagcctacgcgtcagaaatctctctgtgtacactttcggggcaaaccggatggagcgaacgttcgggtgaccaccgaggtcgagtatgtacaaaagcacttcgcttccaacaagcacagattgtgccgcatacgagcccctccgtccggacgactccctcctgacgaagcttcgggaggcgaccgcctggagtggcctgatggattacctggtaggcaccccctccagtgtcactgtgcctcgccagattacggtgtaactttctttggaatccagcgtctacctgcttgttaccttcaaagcgccaaacagtgaagtgccttcagacggcgtttcctgcaatgagcaccattgtctcagcgctaaacagtgcggagtgagagcaagtacgtgtatctaagtgatgattggcacaacactgtaggagatttcgatccataacagacagcactgcatgaacgttgcgtgtagcggtgaggatcctgccttagcgggggctgtacagaatctaagttcctgcagagggtacagaaactagtgcaactgataacctctgcacgttatgaagactcccgcgcgtgcggaagtttacaggagtatcagcgttgacaaactattgcttcctttttcgcatctgggaccaacacatgcggatgtgctttaattcttagtgcactgaagaaggacccccttttcagaggatacccactctgtctgacgccgtttcttcgaacccgtcccgtttcttggctactgtattgagcaagcgtccgcttgctgacatctctgcagccactccatctgaagctgagctggttttacgcggtgtgttccagggcatcagcatatcagttgagggccggcgaacggccttcttccgtgctccatcgagctctgttatcgtccttcagcccgtcggaaagcatggggcgcctgtggtcctcaacgccccttgacattctgtgtatcccaagagtgttgctgcagccaaactactaatacgttccctagggagtgaaactgaggttgcgtgctgctgaccacacgatggaaggatcatcctagcatctaaccagtagtttcctctctctgttaatacgaggaatgccagtaatccaaataacacgcccagaacatgaccgatgtggaccaacctcgatgtcgtatgatattgaaatcaacacttttagctgtcacacatggaagcgaagccggaagtgaaactgctagaagtgtggagtgccataaaggaagccaccagtgttgcctcgtccgctcgtctatcccaaaactgcgctaaggagggacatgcttcggattcacctagactgacccccgcacccgtcagacggcttctgcctcccatcacgcaggaactctttcatcgctgtggttctgcgttgtggtggactagcagctgcattttacgagagtattttcaagtctaaagtctctcgcggtctcacccgagcgcccagatgaaagctcactgcagtctttgtctttcagacttaaggccgtagacagcctcgtacctcctccgtgtctttgccacggcattcttcgcaaaacgagttctccacagtgaacgtcaagggggcacacagcgagaggcacaggctctccgtttttcctgagcctgaaacggtcactgtggcgcattcagaggcacactcacacgcgcgcggcctgacacttaggcggttcaactttgcggttgtgacgcgtttcaaccgacacagaatcgccgcgttttctggctccgagacgcgcaaaagcaaccaaaattccaaacatatttccgcggcggccatgacaagagagtaagcaccagaggaggtgtaattttcgacgagcaaaccacgttgttgactatctgctggcacatcgcctttcgagagagctgcgtgcgtcctaccgcctactaccgttttacgcgcctcccgcttggatgaattttgctgtgcctggaacgcttcgccacttccacaaccgcgaatctaaacacaccggggacgcgtgtctcttcttctgtcttagtcactgcctgcttttctcgaatgacaacgcggcgcggccgctgctgtgagcatgcatctcgtgcacatcccgtcctcatcacgggtgcaccgaaggaactggccgtcctcttgagtttctttggaaaactcgtagtatgctccgtcatttgggctccgttccgttcttttctcgctaccgtcctcagagagtcaatttttacggcgagtgtgtgctgctcaaaaaccaggttccaggttccactgaggacttgacaacttaacgtgcggcggcttcgattcctggaaatcgttcaacgaatttctccttcttagtctcgatctgcagccttgcaaaggtccactgtctctcttgggttcctgcgaggctgctggcgtttcttcgctgcactcttggcgaaataaattgtccaattccgcgctgctgtgcgtaggtaaccccgcagacagcaaccttcgcctgcggcgggagcgcagtggaaaaggactcgcagatgagtttgctcctcgccgtgaaggctttcttcgtgtgaggcccaaaaccaccaggctctccagagtgtatttcccgctggacgcacatgccttaacgaaggaatgcaaaactaacaagacctaatctccacattgacgacga

SEQ ID NO: 2582 - DNA, 2127 bp, Toxoplasma gondii
  source 1..2127: mol_type = genomic DNA
ctctgcgagagggtcgaagttcagtctctcttctggaagagagaacgcgcgaagaagcgacggaagctcaccaacgctgaggcttgcagacgagagagtggagagtctctccggcacgcaggctgaggctttgcgggagacactcgcagccttcgtctgatcgggtgtgaaggcaaaagaggaggagactggacttcctgttgcaccttcttgcttctgttcccttcgcgcggatccaggagatccaagagaaaacgcggaaagagctcgcgcaacaaacgacgaggcgcgcgagggtgcaggagcagaggtgactctcctcattctgtcaacgaaggaagagcgagagagggcgccgaggccttcttccccgggcatcggagctcccgcagcgctgtcgtccatcttgagaaggtgagaaaaccttcagaacgtcgggtggtacttggatccggaaacgtgtctgtggagtgtcagaagatttttgaggggaccttcttggaggcttgcccgttctgtgactcgggagtctttcgtcgccttccgctttcgacggcaagcagcttttcggcgtctagacagcaaaaggtggacacaaacggagagtactgaagcgtggaaagaaagagttccctggagagcaggtcggaaacgaacacagtcacggcaaaaaacgggaggaagggggacgagcacacgtggaggaggcagacagacgaccagcgacaggggcgctgagagcctccgagggaaactgcgtggcaaactgcagaaaaatgctgatcttgtgtttccttgcttctctcctttctttctgccgggcaggagcaaggaaagaggaaactctgccttttgaaaaaacgacgctcttctctcgagtatactctctatcccttttcccggagggaacgaggttttcgctagcttctgcacgagttctcagaattcaagcgtttcatgcaggcaaagacgctgcactttttctttgtgagaaatatgctgaagtgatttttgaaaatccaagcactcgccagaaacttttgctttcagatccaccacgcgacgacttagcgctcgcgggacggcttgggctctcgttcgatcacagccacttctttgctcaaaagaaggagcgaaaacgctgtggttaaatatcaacaaggattgacagaacgcctgccattacagcgtcttctacctgcaactatcaatatgtaaatgtacgtatggccagacacatctccgttgagatgcaaaattcagaacggctgagcgtcgaaggcgtcaagcgcgacacgaaatctgacatttgtcttcttcaccagttgaattttaaactctcagtcgcgttgaaatcgttcgccgagtcgcttttcgtggttctcctcagtgcaaaagggagcatggacctccaggaagttatcgctcgacttggctgtcgccgctgtgccgccggcagaagacatactttacacgacgctggacatcaaagctcacgggtactgacacagcagctcgcaaatgcatctttgactgaatcgacgcaaagtcatataggcagcctgcaacaatcaaatagacatttcttcggccgcgactcgccacttgggaggaaacgacgaacgtgtcaaatgaggcaagccccaggagcaaagattgggcctttatgaaaagccacttcctcctcggatgtggacgtctctgcagaccatgaagaaacttagtgcagagactggatattcggtgagttgttgggtcggggcgctttctttggagaatctgtcgttttctgcgaagatcgaccgcaaacgctggcaaacgcgcgagcaccgtcacttccccgctctcgctgcccagcgctgtctcgaaactccttcgatcttcgctcttgatgagctgagcgtcgcagaccgtgacgtaccctgcaagacggaggccctgctttccgggtgctgttcttttgacggcttctgccttctcctgacagtactggaacggacatcctctaaggaatctgtttcggagaaaatgttaatcgcaagactcgctgcgccacggccgcaaattgccgtgtcgaaacccacgtgtcttgcagctatgccaattcgtgccacccggtggaccaca

SEQ ID NO: 2583 - DNA, 1165 bp, Toxoplasma gondii
  source 1..1165: mol_type = genomic DNA
ccaggtgtacgcacacacggagaggactcacagttggaagtttcccccaccttctccaaaatagcttgtccccaaaacgcctccttttttggtaaacgaaaccgtgcgccggcgctacgggcagcctcgtacgcttgagaaaacaggaaaaatgcgttgaaactcacagtccaaaggccgcctagtgttttcttccatggctgttaagctcctcttgtttgtaccggtcaagggcggtggcgccacaccgtgttccgcagccgcagtgacaccatttgaccctgaagaagaatgcggggagatagagaagacgggagaacgagaagggccagggacagctggaaaacaatccaccgagggctgaggcagttcactgacagacaccacttcagtggagagcttggcggcgggcggagccccgacaaaagtcgagtctgtcgtctccttgacttctaccatgaccgcggtatctgtcatccacgtgagaaagaaagtttctctcttgcacccgagaggaccgatctcggtcgctttccctcactccacagggacacggagattcgacggagccgaggatatgccgacgtctcagtcacgcttgaaggcagagacggaagtgactagcgtccgaggagacggaattccaaagaaagcaaagccttcaacgcggcaggaatctctctgggaagattcgatgcagaaggggaaagaatggcaagaaaaacgggatcagacaccatgtgcttcatcggcaactcctgcttcctgacgcccaagggggacctccggcagttcgggcgcccgacatatctacggctgacgaaaaatgtatcgaaactctggtacaaccacgacttatttggggaaacgtccagcctgtcgttggatcccacaaagtcgacagcgtgggggattccttggaaacgttcgtcggtaccatccagcggacacaccaatgtgccctgccagtggtctacagctttcctatttagcttggtcaaactccgacagaattcaacagtggtgtctgtccatccgaagtttttaatgtactcttcgttgccgagattcaagacgtcaggtccaatgcaacgataacaggcggatgccagtttgccacagaaaagcctctcgccgccgaacagtagagaaatatttaagcaaa

SEQ ID NO: 2584 - DNA, 1418 bp, Toxoplasma gondii
  source 1..1418: mol_type = genomic DNA
ggtcacaagcgttccgtttagtgtgagaacgcgcccgcactctctgccagcgccacatcaaaaacgtgctagagtcgccaactcaaattctttctctgcttaacaaacccagctcgtggaggaagtcgatttgccacagacataaacggtgtcgtgaacgggggcgaccacggaaatccgctacgccttgtgatttcacatacgccgacaggtgagacgagactggagatatcagggaatatttatcaaatgtgcctgttttttgtgacgctcagacgaaaaagaaaaacgacgcagtctcgccccgtaatggacctgttggttttttatccttgtccgcgttggctgcgaggtcggcaacgtagttaggaagcacgtgcacgccaaactacgtgcaaactgtaaacagttcgatttgctgttcagtgggcgaaatctgtttgcatctaagcttctgccatgggatctccatctttcttggttcaagaacgactgaatgccctggattcagtccaatgtggcaagaacagctgaccgttactccacatttgaaacaatgtctttcaggggagaagagaaaaagagaagcgcctccccagcattatgcagaggcatgactattcatagttgaccggaaccactgctgcactctagagtccctaatatgggtcacagacgcgttctgtcaccgagttgcgtctgcaaagtatcacggcggaatgcgagagctttgcaccaagcgagcagcctcgaagggaaccaaccgcttctcccagtctgaggttggccagtcgagattgagttcgcgaacttggctgaggcagttgacctcgatgtgcgagaaaggcattgtcctcattgcagagatgagaccaggacaaatcacggtccaggatgacgcggcttgacgtgtctctctattcgagagtgtttttttctcattctttgaagtaagttgatcatttgaaggaggaacttgatgtctgtattgcatgcaaaaagctgcatgcatgtgtaagcaaagcggcagctgtcgcttgcagaggcggattgaatcctcggtcaaacagaaaaaaccttaagatggttcattcctttagtgctgccaccggcgtgtttgtctctgcatcttgacccgcagtgtagcttgcttctagggcgtcctttcggccatacaccaacgtgtagacccccttcagacgccaaccgactggaaaagaggcttctctgtcgcgtttagcggtcagcgctgctgaagaaacagcagctgaaaccggcgtcccattccgcagttcgttttttctttttttcgcgacgaactttggctccctttcccttgtcgaaggagtcagatctgcgagtgtctgccataggatttccggctctgtaaagtggccagctcgctcctttttcggcta

SEQ ID NO: 2585 - DNA, 1981 bp, Toxoplasma gondii
  source 1..1981: mol_type = genomic DNA
ttgcttcgcaggcgacagtgttcgaaggaggtcctgagacaagcctgccagcgaggtcagggaagccttgcgtctcgtggggatgctgggcgcagctgcgcagaggcagactcgcagggggaagaagtcgacagcgcccgatgcagcgagaccccgtcgccaccaccagaggggaaaataccgatgaccgaaacgcatgaacggaagacgacgaagagggagatgaggagaaggaagcagaagaaaaagaaggtgggtgtgcgcctgtcagtttgactgggtggagctctggatcctgagacctctgtgggtccgagcagaaagaaagagtgacgtcgggcgtttgaagaagaggcagttgttctcgctcttgctggtccttctctcgatgtgcaaggcggcaaccttcactgtgtgctctcctctcctccgcttcctcttctccaatctccagcgcgaatcctgctaagacagtccattcgccagtcgctgcgtccggcttccctcgtctcggaacagcgctggcaaagacgctgaagagacactctgcgaccctgtccccgagagaccgagaggcggcgcttgcctcaggagacagcgacggagagtctgaggaagcagacatcgcgcaggaagggatgggcaagacggcaaagagagagcggcgatcgaggaagggagcgaagaaccaggcagagaatgaaggaggcgagacgcagcctggagaagacgcgagagaacgaaagagaagaagatagagaattggagcgggggggaagagaagaagacagatagtttcgacgccaccgagcagaggtgcaacagagggggagagagacaacagaggaagaggcagagatgggagatcggaagcaaaagttgagcatccaaacattgaaacaatgaagggagaaaaaaacaacatccgttgtcacttgccgctctccaaggcttcggggtgtctatccttgtggtcgacgttcgcccgatgctgtctttttgtgagagctgtctcctcacgttgggacatagacgagaaatcaacatccatttctactctcctggagtctttgtcgagtgtttcgttgcaggatctgtttttgctcaacatgcaaagttcaaggatcttcaagactgaaaaatcagattattttcaacgttgaagtccttcgtcccgcaccgaagcggcttcgctgtggtgtctccttcgcaagacactccaggcagcttctgtagaagcgacgtctcggaccgcattccctccataatacctgcggcaactccgccacaagaaattcgttttttcgtgcgaagaaactggaaatccttgcggtcccgccttggctccaagtcggaaaagaacgcgagaaggaattcgccgcttttgcctcaacgcaactctcaacgaaaagtcgagaccactctggcgttctcggtgtctctcgtcgcaaatcgtgccagctctgagttcggaagtatcgcgtgtctttcgcagttccttgttcgtgtgcagggctgaggggtggattgccaaagcagatcacgttcagttccttttcttctggatctgcagtgtttttctctgcagtcccaaagtgacccgagcccagctttcacagcgtctgccaatctggatgctgagtttcgcctctctcgctgggtgtgatggtctgtgtcctctgccgcttttcctcacccatctggaagacaagcggcacggttctatttttcccttcggtgtggacgcgccagacccgaggaagcggcgacatctgccgctttttcccctcggggtcgctgggctgggggcttcgtaactgcttgttctgtgcgagcgaaaaggcggacagatcccgttcatgaactgtgacactccagacgcgcgagggaggaaactcggagcatttcctccacaagaagagtccgtctggggccgacttgggttgtggacacggcgcaggaccttggcggcaaagcacca

SEQ ID NO: 2586 - DNA, 1402 bp, Toxoplasma gondii
  source 1..1402: mol_type = genomic DNA
acagagaactaggacctgtaacggagatggaaggtagacgaaagcgaggcatcttttgtgtcttccagttagcgaggaagaacgtagaaaacactcggtctcagagagggtcgtagcccacagagcggcattgttgtcccttgcctctcttcctccttttactgtccttctcctccctccgatccttttctctctctcctgaaccctcgcgagcttcgttgccgaagaagaaacacctgacaactcggtgcgagtaacttggcagaacagagccacggggagttatgggtgacactctctcccctcatacagaggctgaaacaatagtactgattttcataatagaggcgccatactcaagtaaaacgtgaaaagcgtggacgcacgtgtcgacaccagaacgcagatacacttgaggccgccagaagtggacagaccaagcacaaaaggccgcgctgacctaacggcaccgatggactacagtttatcaacagataacagattcgtaaaggcatgtcgagacacacaacactgacgtctcgacacacgacagctgattaatgtgaccgtttctgtccaagcaccggcccgtatgcatgtgcatgcgtatttacatccacacctacatgcatatgggtaagtgtatctctctgtacaccggtacacaggtatatgtagacagatgtattcgtctacaggtctagatacgtacttgcagccgaaaacgatgcatcgctcaggaatctttcatttcctgttagcccaaagtcaccgaaaacaacgacagtgtgtccgagtaccgacgacggcagttcttatcccgcgcttcgtttgtcagtgtctggtgtttttttcggcacacaggggattccatagaagtgctcgagagctcgattggcacgttatcacggaaatccgcacacaacaagacaacaagccgttttccttcccctttctggcactggttcctcttttcttggcattcgctggctctgcggcacccgttttttcgcaggtaagcatgcggtgtgtcgctctcggcacgaagccgactataagccgaatcgacggggcgcagcggccgcttggagggagttgggcgagggaggcgaacaatgagcgaaaaatgggctgcgagtgtgacttttctcccgcgtttgggcagtgcgtgttgcggcctggaggaggtttctcgcaagtttatcacgccccgtgtttgtggggtctgcgctctgcgcgagatcggggaatttcgctgcatgtcgtcgcggttctcttccagcgcaagtccctcactctatcttgtgtgtttttcaaacaaggcgcgtggaaagagggcctttctcccttctccttccaccctcgtcaacatcttcgagcaaacaaactgcctccgttacaa

SEQ ID NO: 2587 - DNA, 2685 bp, Toxoplasma gondii
  source 1..2685: mol_type = genomic DNA
acatacatacgctatccaacgcaaaactcaacaccgacccaattccacccatgctctaatccttacagcacgaattactctaaagctccaccactctccttttacatctacggaaccgcgggagtgtgtacatagttgccgttgctgacagctagtctcttgcatcagcgctacatggctgctcctccttttcgtcgcatgagatgcaatggctcgaagaggcaactaccggacaaaatgtagcaccctgttgccattcagcgtttgaaacgatgagacatggtgatgagattatggcaaaccgcacttactttcatgtcgtgagaacgcaagtgtgtccttagagactctatcaacgctgccgaccgacacatcggtatcagcttccggcacaacaacccgaatttcgccaggagctctcgctccggccgctttccaagaatccgctgctgcctcttccggcgtgctgaaactctgcatcctgatgacggcttcaatctgagaactaggaattgcgagaccttggctgttttgtgcaaccacccggccgacacccattagcgacccgtctaacaatccagaaataacagctaataccacaggcaggcacaccatacagccgcctccaacgagccctctcctatggctgaccaacatcgccgaccggtccgtaagacgggaaccagatgtgtgtgcaacgcgaggatccatggtccggagagcagaacgagaggaaattaccaaacaggtgaactgtgaagggtgaatagtccagtcttcactgagtcaggcttcctttgtctttgaaaatcaaaggggaaaagcggtggctcccaaaaatattattgaaaaagggcacaacgtggaacagaagacccctgtttggcgacacgccttccgacggacccacaggaactgttcagaagtaggaaacactcggtcacgtggtgggagattgaaatcctacaaaggggaccaccttcaattacaaaatgtcttagtttgtctctaggaacagctatgaagtgacgatgtggtgacgaacgagttaatgaagaatgaaaaaatgaggccaaacactggtgtggcacaccagacggagcgtttgttgtcggttcctgactacgcattcgcagcggggaggaatgtatttgacatccatgaacaagcatatcataacaactctacgaaaaagtgcagttgagaaccgagtcacagaacctgttttaaggagtgcacaaacaatcacaaggaaagcctcgaccgcaattaccgcgctcaccaagtcactgcagcaaatgctgatttttggataaacagtatgatctattgtcaacgagtttccggcgccccatcactttaaaacacagggctctaagagagagggcaacaatacggatgtagttactttctggtttctggtgtgcttacaaataaactgcaaggatcagggctaattcacaccacaccatcgcaatgcgacgctccccatccccctgtcgtaacaccacgagagcttctatactcccaacagaaacagcaacacagggtgaaaatcatcaaacttgctcgtgtttacgtgattagcaggaaatcacgctgtgcctcagcaattctctattgctacctagcaagcacctcgggatggggcagagtggaacagccaccggctagcccgtcccttgctctccctaggcaggtaccaagccacgaaggagcagcgtggcgagcagcgcatacaagggttccttatcaggtacacacgaaaaatacagagctatcgggctgccgaagcacaaaaatgcaaggaaatggagccagccttgctgcgtgtggagacacacatttgggatggaagcattcgtaatggtgggcacttcaactggatcccttacacgcttctgaaagtacacctattttagggttgcatctggtactatgggcggggaggtgggggggggggggtcacgagcagacgaaaggacccgtccatggcggggagaagctgtagtagagagaagctgaatccctccaagtagagtatccgcgcttgtgttttcatattcgccacgaatttttcagcttcctttcccctctcaaaataaaacaagaagtacagggtccctaatggggtctcttcatatatttataccactgttttgtgcagcaaccgacacacccgtatcgactagttggggagtagctgcgtcatgaatgaatgacctgtggcgagagcgcgattttgcgccgtcacaggctgcgggtcgtcagctaccaggtcaactgtttccgccctcgaggtgctcgtcggtttctctttatccgctctttctcctgcttcgctcgtccccttctcatttacggaaatggctgccgtatctttctcgcgagatcatggaaaaagccgaagtcgccacgcggtgcaactggctgcagaaggcaggtccctcttcagttcaagatagcgtcgttgttcgattttccgattcgtctttgtacctgcatttgaccactggacatgcacgcttgctgcattttcttgtttcatcattctgatctgataactggtatatcaacccgtatctcggtctctcggccgatgttagtcgtgcggttcagttgtggcgcgtcacgcttttgactcagtacaagagctaaaccccagactgcgaacttttctcgaga

SEQ ID NO: 2588 - DNA, 1388 bp, Toxoplasma gondii
  source 1..1388: mol_type = genomic DNA
ggttagcagtgagggcgtgtcctccatcatgcatttttcctgttttaccacgaacgcagggtccagccaccgtcctggacgcttagtgtgcttgtcatttgtcaccaagtcatcacttcgatacagagcactatttcgtggcaagtcaccttggagagatcagtagtttgcggagtagtcgacaaaataatagtaatcccctcaggcacgacagtgaagcaagtagccccagcctcctaggaaactgagacaaccgtccctgactctaaattgctcagcaaaagtggaaatggactatcacaagaagctagcaatcagtagtcttctctgcaccaaagacctgctggtttgaggacacaataaagccgatggcgagcagccttagaccggtaatgccctcccctcactgacagcgaatatccgagttaggcgagttgttaccctgggtctctgcaacgtagccgcgtgagtccgcgtatgctcaaaaaataccgtgtatgttgttccttgtctgtaaggaggtaagttccattgaagaaagagcgctacatataacacgttcacttctggtaccacataacgcttccgaggaaggcagcttggtccgatgctaccgttctttcagatctatatgggacgaatcaaaatggaatatctcattctttgcgaagaaagccatcggagacgcagcgcgatcaacaccagacttgaggggtagctctagattcggattagtgtggcaaatgagtatgaccgtcttcgttttgttagtacgcgctccttgttctgtctggcagcttaccgtatgcatgtgaacgttgctttcagcagaaattgaaattccctagttcacatggggtcctatatttgacacagtgagctagcccatttttactcaagttctttatgaagatgcaagatgcagagagaccgcgacctatgtaccatcgtctccattggccagctgcatgcatccatcctccacgtgtgccttgaacgcgattttgatagcctcctcttgtgggtcagccgtcatcggtatcagtctattggtcatgatgtagtattttgctcattgttgaactgtctctattcattgttattgttcgacttgtgcctaactgacaagggaaggaagctctattggctcgtgtcttcccccggctgcatgcgatgtgcagatcatgggttggccaaacccccgagcacggcagtgtagcagcgtttcctctttgttgagaccgaatgtcaccacttcctttgacgtttttgagcggatgttttattcttgcatacattaccccttatttcgtcatgcgatggggtttcactggaaataagcgacggaaacacgctcccagcaggcttgagacgagatgcaaccgcca

SEQ ID NO: 2589 - DNA, 2055 bp, Toxoplasma gondii
  source 1..2055: mol_type = genomic DNA
tcactccagcgccgtcaacgagcacgcgggtctggttgatgatgtccacgacgaagcacagctgcaagacacacgcaggggggcccacagaaaaacatgtttcgaccttgaagaaagaaacgcggccgtcacagaacaaacgggaacatcaacagaagtagcaatgcttgtgcgagaaaccttcacggttccagatgcaggcaaatgaaacccagttcaccttccgaggtagggcgggcaacacgcaaaaagttttcgccgcgaaccgtctgtacagcttctcgaataccagagcggccattcgttacgccgggacatggaaattgaaatgcacaaggtggaaacgaaaacaacatgcgtcgtctccctgtgagtatcgccattcgaagtgcgtttcgtcaacatcctccacaaaaggcacagtcagtagctcagggcgccctcaggacggcccgtagacgagcaggaaagagaaagatattaggaaatcatttaaaagatgtaagatatccccggaaaaagaagtcgtacaggcaggtaaaaagtgaacggcagtgaagtttactactcccagattcctcttccttattcgtttgccgtcgtgggaggcccgccgcacgaagccttcctgagtcgcagacaactacccctctcgggacgaatgccgccgagtacggcatcgtctgtgatgaggatcacagaatcctctgtagatttgcgtgtgacatcccgatgcgacttgttttcttttaagaatctatagcatgcaacctgtcggcaacgggaggccacacgggcccccacactcagtcttgcgggcagagaaagatccgcaaaacgtgttctcgcgcagatgcctttcatcatgagaaaccgtaaacgaaaacggtacaagggatgcaacaaaacgttgtcgacacccacggtgcctcgagatttcttcgtgaaaaattccccaagtggacggaagctgcgtaggaacccacctttcctgcgtcggggccatactgaacgacgcaaagccttccaggctggtagtagcgagtaaaaagccccatctttgtcgcgcggaaggaaaaaagaaccgcagagggacaacaccaacaaaaaaatcagaattccttaaaaaggatgaccgatgtcccccaaatggtcctacggcccagagagacggcgcgcggcctttctacgaattttttccgcgcaaaagcgatgctcaccgagaaaaaaacgcatgcactcgctccagtgatgccgccagggcggtcactggcgcactccacgcaaccgtgcccctctctgcccggactgaaaattacaagaattcggcttatattcggggaagcacccagtcaactgcacttcagggtgctccgggcatgcagctcagccagtttgaggctggcacggtcgcggtcttgcctcaggcggcgagaggagacacgagttgagtcgcgacctggggtagcggccgagatagattctgcatccgttgcactccgtggtctttcggtgtcttgttacttccccgtctgagctgcaaagatctgcgctggcgacccggcagaattttcgctgctggtgcggtgcgcgggactcacagactctccaaaagcggctggtgactctcggcggttggaggctctcccggctgggtgtgcagatcagacgagctcgacgtcttgcgaggacacgagcgcgcagtcatttgaaaggcgaaggctagctcggtggaaacgagctctctccaatgagagatttctcttttccggctggacggttgtgtaagaccgcggccgcactcgccatgctcgccgatagccacgactttcgggcatgctcgacgagctatcgtgtcttcgaagttctggagtggctacagagacctccacttttctgaacgttcgaaaccgcaatctgaaagcgtctgcagttctttaaaagtccttgaagaccggccttgtttgtcgtaagatcgcggcaccccgtccagcagagacggaaccttccaagttgatgcttctgtccataagggtttgaaacctgtttccgaga

SEQ ID NO: 2590 - DNA, 3923 bp, Toxoplasma gondii
  source 1..3923: mol_type = genomic DNA
ttttacagttccgggaagtccgcacgaccttggatgttgtgttctgccctctctccgcaagccaaagttcaacagcagaaaacacatggaacacacgttgggtgtctcggctgtttcgcccaggaaacgcttgtccattctcggttctgcgacctcgggcaacgcaaccatcgtcagtccgggggaagacactttgcctgcgtcgacatctttagatcccgtcaaccccagtacgacgcgctcaaacaaacgactgcggaagtttgagtcacgctcctcaatccgcgttcgtaacgaatccgagacgacagtgaaagaagagcgcgggagccctctcgctgttcatgtgggtccaaatagggagggttcgtcgaggagctcagtacacaccgaaaaagaagtccagatgcgttttctgcccgtttgtgtgttcaccggggcggacttgtgtctgcccgagacttctcttctgcacgcccgcccgcggcccttacaggctccagaatgctttggtcgagggggatgccctcgtacacgtttcccttggtgttctccttgccgacgtagtagtacttgaattccgggacttcttccatgactttctccatgtcttccttgacgaacgggacgcgccggtactcaggcgccggacccgccttcggctgcagcgccgcgccgctcagaaaccgcttctctgtgcgctggaacgccggcgtccatacacccgaggcaggtgtcgatacacccgaagcggacgctgcggcgagcgcggcaggacgcagacacctgcgtcgaaggcaggtcgaaacgcctggtgcgtttctgcggaaaagaatcgaggcgttcatgttgacgaggaggcagccacgcgggaaagtggcaagtgcggcgttgtcaaggaaggaagcgcggaaaggaaggctgcgttccgtcaggggagggacgggaacgcggaagtcgaaagcagcgccgtaggcgagagcgtgctagaacgaagtgcgcgactgctcccggtagaaaagtgtaggcgggagaaagcggggaggagaggctgagaagggaggaagaggtccgatgcacaaggaaaacgtcgcggaacgaggaacgcctccgtctagaggacgcgcatcccaggagagtacgttccagagccgaagcgtggagctgtgtcctaggtgtgccgcagcgacagaaagaagtgacttccaagagagcggaaaagttgccaggcactccagttctcggtcttcctcgcaaaagtaccacacgcgtgctgctgcagcaacccaggaaaagcctttgggcgccgccccctgagaaaaggacttgccaccgcttttttgcccgtcaatgcatgcgcgcttaccctgagacgcctgagccccgcaacgcgcaggacgagctgaagagaaagggcctcctctccgtggcaggacaattttcacaaagaaaggagttcgcgattcactggaatgtggacggaggtggtttgcttggtagaatgctgacgttcacaaagcgaagaagtgccccgctataaaccacctcagcactacgggagtgggagtgtgataccactgttctcctctgcctgaagttctgaactttcggctttgtagacaatagatctgggagacgagcccgcgatacaccgcttaccttctacaccattcgtagcttggattttctaaggagcgaaatccgaaggaaatggggaaaacaagacctctgggaggtagacgattggcgtcctcaaacactcgagtccgtcagtaaaacgcccttgcacgaaaggcaaatgtgctccatttcgattctgaacgtgggataagtcgaggagaatgcttggttttctccattcaatggaggcagagattctttacccgtacagcgaactctggtgctgtgcagttacggaccgaatggggagtggagtttacctgctggaaactctgagagaatgctcttggtgtttgtcttgcagattgctctcgttattatgatggaacagtgctctccccattctggtagtaaagtgctctcgttattctgatcctaaaatgacctcgctattcttgtggtgagagtctttcgccactctgattgtaaatcatggggaacttcaacaggcgacaaatctacgcgttgtatgtgtcgtagggacctcatcgtgttctcacacgatacgaaacttttttaaccgagaaggtaatgcagttcaaggcccctgtagctctacccagaatgctgaagtttatcggaaaaaacaacatatgaccgcaggtagaaacagaatgctgcactgtctgtggtcacacatgcctcgtctgtaaacgagagacttgcgtaacatggcattcacattcgtttcgtagattgtcaaagcggtacgagtctcgcaggagaaagggtgtgagaaaccacacagctttgtctcttcacgcttgctctaattctttggtgaagcagtcgagttctcaaaagcagtctaccgcggcagatcactgggtccacaaggtaaattcgtgtttcagggctgctcgcgtcgcagttcattcgaatgtcacttttaccgtgacagtgtagcagcccttgtccgtcctcgatgttgcattggtgttttccgtagatatatgagaatttgaggttgctacccaacagagatcgttgctttctgcctctagcggcatttccgtttgtgtacctgtagatgtctacatatggatgctgcttcggtgaaaaaaagtccaaacagctggtgactggagaaaatagaaagcgtctctgccgcggacagcaacaagtatcacaaagacaaggacgctttccctacctgtcagctgtcaacaacaacttcagaaggcacaacagcgttgactacagacacgaaagagcagctgagacggcaaatctcaaggattagcacagacggtttcgctgcgaccaagcacatccaaaaatccagtgccaatacgcgttctcttttctgaagattccattccactccaacgtgcctccgccaccgcgccaaatcgtagaagcagttctcctaacagcagcagtctgctgagcgcaccaagccatattctttcggacacaagttgaattccatttgtctctaacgagatctctgtctaaggaagaaccttgacctttaacagttcgtctcggaacttgcagcagaattgccgactcgcaagaatcgacgcccatttccctgtttctcgtcgagtgtaaagtttaaacttagtgcaagttaatcttctgttgtatgttggtatgacggttagaaaacattcatcgatattgatatttgtatttcattgacacgttgaggacacacataccaacaaaccagcaatatattgtgtcacctgcaggctccttaaaaaagcgaggagctccattgcgcctttctcagcgtctaaacctgattctagcctccttgagtgctctagggagacatgactgtctttcgtcagtcactgtcatttatcgctaattcgtgctttcccgaagtgaaggcacggagtggtcctacggacggaaaaaaaattgtcagtcctactatagtctccacatcatggagttgaagaaaacagtcaacaaagaagggtttgcgtgaaggtgattcacttcgtcagacctccgtgtaatctatgcggaccccgtcgttatcgtctcgaggtttaccaacgatatagcggactgggcatgcacttcacgaagtctacgtccaagttcacagccctcgagacaggtgactcaagatgtacaagactacaggagatggagggctttttcataaccaagacctcgacaagcggtcagctttccgtaaagagcctttcgatagtctgtttcactggggaaaaaaagcagggtggggatggagggcaatttgacagttgcctttctctcaa

SEQ ID NO: 2591 - DNA, 2100 bp, Toxoplasma gondii
  source 1..2100: mol_type = genomic DNA
gtcgtctttggtttgtcgcacctccagcacctgaaaacatgcatcgatgggcaccttatgcctaacctgcgacgactacgacgggaatctgtgtcaagcaaataagcgaacgtatacccgtgtaacgcggatatctgtgtatggctgtaacagttacagctggccggttgggcttcccaagctcctgcgtttctgaaactccagtaaacgtcatcacagtagtcacaatacgccactcggcgttcgacaacagtgaaccacgatgtggcgctgtaaaccacgtgaaaacacacatagatacgcattgctacattaatacttgtgagggtgcaaattccagaggactacggggaaaatcccgcgaggtgcatctaacactttcacggtgtttttaactagagcggcgtgggaattcgtcatttcctgttagctctattccaactagaaaaggcaatccttcaacaaccaccgttccagttaatgaccgtagacggccgaaacctgactgcgctcacgaactactcgcacattccctttctgcgaaaatcacgttaggtgggcaacagctaaattcgtaacggtacgaggtaagaaccacaaacgtttctctctccccaacaagatttcagagaagctggaaatatctgtgagttgctaaatcggataaacagggagcgggcggattctcacatgtagtactgcgtctggttgtactttttgcagctgcagtcttttgcgtcgaattccacatccagatcctttctcgggcacggatcgaacttctttagctgcttcacgaccttgttgcgttctcttgatgtggtcgcggagttgagaagatcaattagatcgcactttttggcgccgcagtacttgaccatcgttgcgaagttggaggaagttcgacgatctactatcgcgcggctttctcagaaacagcggccggtccacaagagaggggaacggaatgcttcagaagcgacgctgccgagtgaagcgtgtataagcggtaaacacagctgaaagaaaactggtcgacagcacagcaaactggactcgtttcgccgacagggcgactccacccagtgctcagtaattcgtcgactatacacgcgagaaactgaaccagggaagtaaatctgaatgtggacttcttgcctgcaaatagttgctctgtctgtcacagggccagggctgagcgtggagttcgagtatcagacggaaaacggaagaagacggagacagaatacggcgaagccaacttctcgagtaggccaccgacagttgctgacgcggagcacacacttcccaaacttgtctagcgtcaaacagtctcttcagcacgggacccggaaaacctctttcgatcgcttctttgtgcagatgaatttctgctggaatacgccgctgccagcgtttcccgccaaagtactctttcgctgctaccgacaggccgtgatatccgctgcaactttacgcacatcgtaggaggtctcctttcgtgtcaagcgtcaaccgtcgtcgatacggtgcatgttgctcgacacggagtgcgcaacggttgagtgagccgttggctgatgggcgcgggagcgaaacccgtgcagtcatcgtcgggagatgtaggaaacatcttgagtgtttgaggctaagtggagaccttggcgacagctcgagatgaaaagacctgcaattcgagaaagctctgaatagcctccagtgcctctagcttgctcactagggggtttccttgtgtatgtagcaagcggaccggatgctgcctaaaacgacttgaatgtgtggtcagaacgaccacgtctcctgaaacgttgctgttgattacgataggcgtcaacacgacactgccgagtacgggaggtccttctgtgaagaactcctggtgccgatcgagtcgcgtgccattccataccaatttctccttgtagtctgcgattccaaatgccttcggaatcaaacatatatcattcttttccgacggaactgtctgctttccttcttcagcgaatgctgtgctccttagtcacaaatttaaagtgaactaaaccgggcactggacgtctgtgacatgagctaacgcca

SEQ ID NO: 2592 - DNA, 1688 bp, Toxoplasma gondii
  source 1..1688: mol_type = genomic DNA
ttttgcttcgagaactcaaaacgttcagatatcgcaggtgtattggtgttttgtcagagtccttctgtctcggtaaagtgtacgcgaaaccccggcggttcacagactacctgcttccgtttgttttccttgtggaattgcaagagtttggagcagaaagacacgcaccaatggacgccaaaacctgcagcacgttctcatggatttggtgccagcattccgtttgttgcatgattgtcaggacgtgtttcttgattgtacaggagtggatcagtctactccaccgctagaagcactcaccgcatcgatcgaagtcagtgtttcctctggagtcacacggggacatagaaggacatttttgtgtgagacgtctttcttcacactctctgtaaacaacgcgacaactgggcttctctgtaagccaagtcgttctgaagagaactgcaggaagcaggacggctctctggacagcccgctgaccgtttgaagtgccagttgccctctgtgttttctgtcgctgagtgcaacagtttccgggcatatccaaagatacacacaaagatgccgcgataggaaaagcagccctctctagtgaattcattagaaaactagtactaccgtacgagctgtaaaaatgaacaacattctgtgtaatctttaggtcaaaggaatgacggataatgcagcgagtctgacagctgtgtagagattcacaggattctcaaccgacgcttcttagggagagaatccacaacattcttttcggctgtcccctgtgagcagccttcagagttgatcgaagctcgtgtctgtttcctatggtttttcacaggcgcagcgtctctctttttcgtgtgcatctcattcttaaaccgtgttgcattggctttttcgtctgtgtctaacactcggaaagacatcaagttctttgcgttcaggccgtccctttcgactcggtgttaggaatggagaaaaaggtagtttacattcacctaggagtccccatgcacagtgcgtgagtacggactctagcgtcagttgttgtgtgtttggtattgcgagtctggagactcatcctgtgttcttatcactgggagaccagttccctgcaacctaagcgtgtacttgccacagcaaggaaggtcacaaagaccgagaaagccctttatgcactgtgtttttgcagagacttgtttccactgtcgctgaaaagggagagtatgcaaaatagaactactgcgcttatcggagggagcgaaaccgcgaaattccactttacaacgtgaaagcaaggagagtcgagtttcgcgatctgcttcgcgctgcatgccccttgaagtgccgagattcgcgatttggtgagacgcagccctcccttctgtctctgcgcaaagcgggccaggaatcaagcgtagactagcgtgagggtggagactctgaactggtaacgagggacagggtgcacacaaaccgcacacgcgtggtggccgtcctgtgcttgtcaaaaagcgacgaccgacgaggcggagacaacctcggcgtttgttttttagttattttttcggtccttctatgccaccttgggggactgaatcgtgtgaaccccgggcgcaccccacggtgtagcaaaaggcgcatttctccttcccacgtctccggctaaaagtttctctcgtgcgaacacacca

SEQ ID NO: 2593 - DNA, 4399 bp, Toxoplasma gondii
  source 1..4399: mol_type = genomic DNA
caagcaagcgctgagggacgccaaactccttgtccacgaagccttcggcttctgccgtagttggcacgtgaacggcgacctgctgggttttccatttgctcgcgactgtgtccggcatctgctggtgcacgcgaacaaactgtcacagcaacggctgtccgcagtcctggattttttgagtcaggcgttggcattgtttgactgcaattttttatttgccgttttgttttttttcaagtcccaactcgaacttccgaaagagtccgggtgaaaccccaacacctgctggttgattgccgctgctgcaaagaaaaacagaaacaaacgtgtgccatcatcgactgtgtgatggtgcgcatcaacagatacacgctttcctggattcttcgctctgtacgcctacgtaagagtgatcttctggatgaaaaacacttattgagacgtgggattactctaaggcataggcactgtttggatacatctacgtagcatggttcgcctagagacaagcacattcagaaacattacggaacacactgggtactgaagatgaccacggcgggtgaaagagccagtgcagttctttcttaggaggtacgaattgaactttttcttgaatttgcttcactgcagtcgactaagctctgaaaaaatctgcttcagacttgagtacacatttcgcacacgtcgccacccaggaggctttctgcctcctcgcgagtcccggcttttattttggttccggttctaccccgtgcattcctcgagatccactccaaagttgatcaccaaggcaagtgtggtgacgttttgttgcgggtaacaagccagaagccgttgacgctgggaagagagcttccccaccccattctcaggtgacggggaagaccacgccgctccgtcgagtcgtttaactcttctgatacgccctttctgttttgtgttcaggagttgtttcagtttcactctctgttgtaaagttttgttccttggtgtgcacgctctgtgtcggtcctcatcaggaaatctaacggactccttcccctcggaaccagtctccttttcgtggcgctcgtctaacttcgttgcttatcagcgaccagagtcctcacaaagttgaactttcagggatgcctcgcgaatcactgttttccacgtacacgggaattcgccattgataattctctgagcaatcaatatgcaatcgtccacgatgcatttaactctaacgcaggctcggtctaacaccccgttagtccatcataccacccgggatttctcgttaattacctccacatcatggtaagggcgagaaagaacgtgtgcttccacagggatcttgcctattcagcatgacgacagtacccagtaacatggtcctgagaacgccgtcccatctggtgagatcaactccccagctgacccgactgccgcgtctcgacggacgtttttattagttctgtgaacggcaactggaattccaacgagcgtgcagcagcgaagtgagtagacgagtaagttccgaccccaacaaaggtgtaacgagttgaacgctgtcgtcgaaaactcgtctccggggcggtgctttcttgcgactctgtccgtgtgaccgacagttttgctccgactcataagtatagggaaggcggatgcgaggaactacctagctgttccagaaaaagaagccacaccgcggtatgaaacttgtccacgacaagtcagagaaaatgcaacaactcctgcgtattcaacttcgtgtggcgcctctgttttccagattcctgaatacggactgcaacgcgaactcttccaagggcaccctgcgcttgtttgagcttcgccttttagtcaccgggctttatcctccccggcttctctggcaaattcgaaggcctcgaaactcctttcccccctttttctttctcgaatgcagcggctcaacctgcttccatttcaccatccgcgtgcttccatgctgcttcagttcttgttttttccccacccttgccttggaagaggctctgcgatcgccgggcactctccaggcggcgcgagagggtatgcaggaaaccctgctttaagggaaggacacctgatctggcagagcactcttcgctgtttgaaacgcagcggggcgaccgccttcgcttcggagcagcgataccaagcgacgaaccacgttccagaagggtcgggactctcgtcgtggggaaaatcgcctctgaggcaggactgatttcccgcttttctggcgaggatggactcccgacgactctcgcgttgcacgcctggtctctaccgagtattccagcgaggagtaatcgaccacggtctaccactaccgagttttttgtcgctgagatatataaaaatgggcagatggaagcagccgttccgtaccagcctttccatgaagagtgtacggtttcttttcgctcttttggaggacacgcgccgaaacatgcctcgccgaaaggcaacatcgaggggcccacggcgacgttgcaacgaggcagtcgagataagaaaaacgcgaggagaagctgagcgggtccaccgtctcggccgagacggattcttttttctgaagaactcaactcgcctgtttaaactggcagaccgaggaaactgctttcttcaacagaggcagggagacagaacagaacgctgccgacctcccagaacgagcgcggccaagactgagaacgatacgcgacctgcgccctgaacgtctcggagttgccacctcgtctgttctccctgcttcgtttctatgcgattcccttaaccagtgaaacacagctcaacaggagaagggcccccattgtcgattcacgttcacatttctctgcatcggcatccgtacctctctatttgctctctctatatatttgcattttctgttgtgcttcttccccagtgccgcaggctgctattcttacagaactctgcagagttcgccttcgcttcctgacgaaaaaggggcaacccttgcgttgaaagccgccgttggggcgtgatgggttccagacccgcgggcgtcgcgcctcgcgtcgtggcgacgggcatctctccagagggacgctcgcatacttctcattcctcccgtccccgttctcagacctttgtgtccgccactgcttcctctttcctttcttcttcaccttctcagtctccaccctctccctcgtttctctgctctccgcgggcaggttcctgctgtctcgttgcctcgttcggcctgcgtctgcgccgtctagacgcatcgttttcgcttcgatctctcccgggctgcttgattctcgcggcttttctgcttcctctctgcatgacaagcacttgccgctccgctgcactcgacatcaattccagtgtcgagaccgcgacagctaccgaccttcaacggacagcaaccgcagacgacttcgaaccccggagacagttccagagattcaagctcagtcagaattcgacgttgtccgaacaaagagacttcccggaaagccgcagaagaacctcgcgttcccggcccatccacgtcgcctctgctgtcgcttctctcgccttcagcaaaggaaacaaatcaaaagttttgctcagagaaaacaccggcgaagtccttcttgaagaaacacgcgatggaactatcgcctgtacagacggcaagacgggccgtgaagaaaatctcgcgaagggcggcgggacacaccacacatcggagatcatgggggaatgttgagtctgtagatgtgtttagaaggactcaaactgcgacaggagaaattccctacacaaaggatctccagagaagtctcgagtgtattcgagagctcatctatgaaaaaacaacctgaaggcgacgcgtgtacaaataggatcttcgctttggtggaactggttctacgtgggggaaacgctttccaaaattcggtaggaagtgaaaacgttacgcttcttccgtgtctccaagtctctccttgtgtgccttttcctcgctttgtatcctgcttgcgctttttctccttctccctttccgtcgttctcttcctctctcgctctccttctctgtgtgtctcatctctttactcaattgcgtctttctccttccgagtcggccccctcgtcttcgtctggagtctctttctcttccggatcccaacgctcttttgtgtggagaccaccacgcgccacccgcatgtagtgcaaatggagccccgcggtgtgtggcgcgcgtttgaaggaaccgacgcatgtgcgcttcttccgctgagtactcttctctgcggctcgcgcttcgccaggacgttgctgctgtcgtgacggttgtcttcggaagtcgagttctcgtctctctgcatgcactcaggtccgacgtacgcgcgaggcgctgtgtcgagca

SEQ ID NO: 2594 - DNA, 2221 bp, Toxoplasma gondii
  source 1..2221: mol_type = genomic DNA
taaaagagctcgccgacggcgaagaagccgagcatttattttcaggaaaaaaagaggaaaacgtgaggacgtttttcgcggagataaaattcaagagaagaaactggggagcgtcacatagaccactgcagcagaggaacacgaaaaagcaaagacacggggagcatggaaatttctctcgttttctgaactctcatcttgcgctcttgtccattcgtctcttctttctctctctctcgctccacccgcttctttgttagttctatcctcgaaacaatcgacaccgtatttttgcgcgttgcctaccacggagctcgtctctcacatatcaggacattctccctcttcctcatcaactccccgcctctaccctcttccttccggcctcgtttgcctgcttcgcctcttctcttttttctctcctgtctcctcttctgttgcttctctcctgtctcctctccccgtttcctggtcagttgagaactacgtcgacgctcggcctcacagccgacgtggagcctttctcgagctttctgtcggctgcccgaagttgttcagtctgcgcgcgtcgcctgcgtctctcctcgcgtcggagcttcgtcttcgtctttcctccgcggtctcgcctgcagaccatggagtccggagcagagacaccgggaggcagagagacgggcgacaccgacgccgagacaggacaggggggatcggcgacgggagagagcgggatggagacaacagaaagtggaagagaggacggggagagaggaaggggagacagagaggcagagagagagggaaagagataggaagagagcgacgacaatgaggcaggccgaaagtcaaagggtgatccggagggggaaggtttcgatctgagaggaaggagagaggaagaagaagacggcgactcttcacccaataggagagaatggggaaggagagcctggaaactcatgttctccagagagacagaggcagtgcctcctcggtggagcgctgctgccgaaaggagagaagagggggaagagaaagaagaggaagtttcagaagaggacgagaagtaggaagacgaacgtgagagagaccaccgcgggcgcggagaggcagcagaacaggcaaaagagaagcaggtagaaggattagcagagacaacggggggacgcgagaaaacagcggagacacagagagagcggtagccacgagaagagaaaaagccgagaggcgagaaagaagtcgacgaggaaatgagagagtggtgggagaaagcgcgactctttaagcgcgttgttgtcgccatgttcgatgctgacagagaaagacgagaaaaaccgacaggaaatgcagaggcaagaaagaaaaatggtggcggaaagcctcccgacggaacacggctctgaaaggagaatggagtagacagttggaaacgaaaagcggccggagaatttttcgacgctggcagtgcaaagaaagagaaggaaacgcagccgagaagaggaagcgtcggctgcagacgacggaaaaggaaacgaggaagagattaacaaagacgagaaagtcgagtctgtaagagctccaaagaaaacctggaaaactaggagaggaaagaggcaacaagccaagaaaaggcatgcgttgggaaaagaccggaaggcgaagcagacagctgagaagtcgaacagccgcggctgcgcgagacgtgagaaaagccgagacgagaggaagaggactcgaggtgtacgtatacgtatccccgagtatgagaacttgcgaacgagatggagagaaaatccttcatcgctggagaaacgagctttctctacgcgacagggaggatctctggtcgagagaaagaaaagacaaggccaggacaggctgagccggcatgaaaaataacagaccccccgccgtctcctgttccttgtcttccttttctgtcctctctacactcccttcttcttttcccgctacactatatgtttctcctttctacagaaaaactttcttttcaattcaaagtcgcctggacattcgcagtgcgactcggtgttctctcttgcagagagagacgcccatgcccgcttgagtttcttcctcgtcggcctgtctctctcttggccagatgccatcccggctctgcctctctgaattgcctgagggtctcttccgctgtctgcgccctgtgatgcttgttctaaccgcgggagatctttcctgaaaa

SEQ ID NO: 2595 - DNA, 3787 bp, Toxoplasma gondii
  source 1..3787: mol_type = genomic DNA
atagaaggaatttcggtagttaaagacataacacagatatttcggcatatacatgtgcttctagattcgcgagaagcgacagataggtcaatagcgaggaagatatatacatatgtatatatatatatatatatgtgtgtcgatatatgtgtgaaaatgcgcagatgcatctgcgctcctgtgaatgtttgcgggtgttgagggctgaaggtatccaccttaaaccagaagcgttttctctctgagaatcccaaggggggtaggggaaaaactggaataaaatcggttctgagaagggcgtttatcctgcctttgtccggtttctcgccattccagcaattcctaacatcttattttcggagagccacagtttgtctcgaaaacacaaaagtttctctctgaagttgctctccagcgacccagatcagttgttcccctgcatagtctgcttctcgcgttccgaacgaaagcagccaagctcagaaaatcgattttctcttcttagttcgtagacgctcgccacttaccgattcactatatatatatatatatatgtctgcggatatgtttttcagtcgaacatcataaaaacatatttcgacctgtcgacctcactcccattctgcgtaagtgaattcgtgtttcgacgatactatctacggaaacgttcctcattctacctcgctgtagaaaagttctcctacttgcagatctgtctctctatttctgtatatgcgtatctcatattatatatatatatatatatgcgtctatttccctttcgttacgcgagcaggagagcgagaggtctggggaaagcggcgttgtgagagcgagatcctaggtgtgctgtgttccctgttgggtcttgaggtgtgcctgttttcctagacgccggacttcatcccaccactgtttttttcttcgtcttgtctgaacgctgcactttccaaacgccgtctttgtctggcgcgaaccgcgcgtgggccttccccgcctgtgtttctcgcttttgtgcgcgagtctgccctgtgctcttccggcattcctggaagccaatccccgcgagaaatagcctgtcccttgcttcccttcgtttgttccggcgcatgtcgcgcattgacagagaatcgtcctccgaaaggcatctccaaaacaggatcaaaagttgcgtgggcatttcgctacggccccgcagtcgagcgaggaaatcctcctgccggcgcgactgttcttgcagaatcttccatctcagtcgataatttaacgacacattcacttctttttggaatcgaggctttttcttcgtgacgcaggagtgcgagtgagcgcgggtcgcggaagcaaaatccgtcagatcggcctccctcccgttctctgcacttttcggctgctagacacgcacagattcgcagcgtcgacccgaagcgcatgcgcactctcagttccggtttttcttctcatccgccgacgcaagaaagacctcatttgacagatccacacacagacgcacatgctggagaagaaacggtgcggcttcccgcgactgtgcaggctttgctgcattcttacatgtggtgttaaagggggtcgacttcgacaggaactcttgtctgaactctgccctgcgaacatcgagaaccgccgaagggcaacagaaagcagcgagaaaacgcagaggataacacactcacttacccgcttgactttcaagtcccagctcggaaacgtcgagaaagagacaggagaaggaaaggaactgagaggcgaaaagtgcaaagaaggaagcagtcacatttgaagaggaagaaaattcgaaaaacaaggatcgagatcaaccgcaagaagctgtccgaaagtcactcggcacaaaacgtaagttcactgctattcacagagaaaagaggaaaaagaagcaaagatcctcgatgcttcccggtagactgaagcgagttccgagctcgcgttttcccttctctttcgagtggaaggaaaattgctttccgtgagactcactggagaccgctttggaacaacgcacttggcagcaccctggttctgagcagagagatacctttttctcgtgttcagagaaaacgcgagatctcttgtgttttgcccggatgtctctgtgctctctcgaggtttcctagactttttgccatgagcttagtttttcagtggagatcaacttcctctctttgctggcttctctccttctgcctcttggaagagaagaaacttgagcgtttacgcctttggaaaaacatcgtgctggcgatcacctgctcgagaagtactggagtctcgctcttcgttcttctacctttctttggatcagatattctggtcgaggactgcctcttcagagacacactcgcgaaacgttctctctctgcttcctcctctcttttgttcctctcttcctattttgcctttctcgattctgacatgccccttctcgaagcgacatccggtgtctccttctctctgagcgtgtctcccttctttgtgtgtgtctcttcggcgccagctccctggatttccgttccctttcttcttctttctcctttcagagaggtacacaggagtcctacctttccaggctcctcgggatgtctggctctggctgtgtctcctttcgtctttttgcgcggcttttgagtcatttcttgatctttcccgctcttcactttgtcgtcttcgttgccgctctgctcctttttttctctttccacttgcgcgcaactcttctccggcgagagaacaaccgtctttttcctgcttttccgcgtcctctctagtctctgagagacagacgccttctcctcggcctgcttgtgcctcgcctttcttctcgtctcttacctttgctcttcgcgaaagtacaaccgatggaggtttccaggtgcagaacagacaagacaagacacagcctctttctcctcatctttctcctcatctttctcctcagcacactctaaatctctacctcatatatcatctacatttgcccacgtgtgaacaattatttacgctttctaacgtatcaaaggctttagatatatatatatatatatatatgcagatctatgtgtatttggaactcgagatggatacgttgtatgttatctaggagatgagaatatcacagttattgtgttttattcagaactcttccgttgtgccgatgacagggaaaacgcggttgctgcaactggcgatcttcgttttgtgatctgtcacggttcgtagcgctgtcgctgtctctctgtctctcgctcgtctctgtctggctctctgttttcgaccgttgcttcttcccggaaattctgtgctctccttgcctctaaacaaacgcggacaaggctctcttgcttgccacagtgtttccgcctgcgcttgcctctgcgaagttcacagcaaccaggacttgcttcttctccagctgcctctctttttctgcttccacttgtctctcttcttcctcttcgaactgtggttttttcctccgtcttcaaatcccactgattggcgttccctcgagaacaaggcgattgtgccggcgctattttacagcatttgttgtgttttttttcaccttcattttctgtcggtccggggccgtatcacggcgtatccacactgctttgtccagacgtcgttcgaatcccctctgaggtttctgtctctcttttcgtctcgcttcttttttcgattcttttctccctttctccctcccggttttcttttccccggtcttctctcctgtttcctctcctcaaaa

SEQ ID NO: 2596 - DNA, 2235 bp, Toxoplasma gondii
  source 1..2235: mol_type = genomic DNA
ttcgggcgctttgtgcgcatcatttccatccatcgacgatgcttttcttgccagtctttcagagaaaaggtctgcgttgaatcacgttcaacgggcgtaagaagccatcgggcgtcatccattgctgaatcgatgccgtgagcaatctgggtgtacatcgtctgcggagtcagacccttgattgtcatggtgtcgtttttgtaccatacattatattcgggcatgagtgggttttgttgatgcatccggaagcccatcaagccccctagtgggtgggatgaatcgcgggtagatccaaagcagcgcgcaattcgtgtcataattccctctgtgtgtttgccttttcccttacgcatctcctcgggagtgatttccttcagcgtaagcagaggggacagcagcacaagtccagcaatcgggattgggcgtgcctgcactgtgatgtgctccactggaacctccttctttcccttgcccctgtgaagacagtactgagggtccgtggcgtattgcatacccggaacctcgcgtcccgcctcagaactctgcgaagtccctgttgttgtagactgctccgaagcacccactgcatcggcaggcttcgccggaggaacatggggcttccccagcttcccttggcgggcaagcatctcaacagcacgcgcagcaatcgtcgcccccagaccctgtcccatgatgaaaatgggcagagttgaattgcggcaaacttcttcgaggagccagcaagcatcctcagcgaattcatcaaaactagacggcaattcatagttcttcccttcgacgaccttcgagagcccgtggccctggagatcaatcgcgtgcacgtccaggcccgcgtcattgaatttttgcacccacgagtcctcatagtgtgacgccttacgcaagcgcatgaactcctttttctctacttccgtggcttccgtatcttcttccatctgctggcgctcttcgatagagagcggcggcaagtgcttgagccactcaaacatagtatgtgtgccctggtcatgaagaagaacaactgcaccgcgggcagggcccgtggtagtggtccatgtgtatcgcataataggttgatctctcacattgtggaaaatagcaactttcgggtagcgcaactcgatgtagtctattgagaagggcggcaaccgggggtgtggccattcctcgagcttagtctcagagccacaaatgaccgacgagcaaacagctgtgtccgtctccgcgggtgaccgcggtgacaccggggtaacatcacgcggaggagccatcctgcattaaatgagaatcccggtggggaaaacgacgatcccgtccactcgcgtgctacttgttcgtccggctcaccacgccaccaactgcccgtcaacacgcaactacgtactaccgcacgagaaaccaagaagcgcagaattgggcgttcagtgacaacagaaagcgcacatcattcaatcacacctcacgctgttgaggccgctggcagcacttctcgcggattcagcaacagtgcgcaccgtcaagctcctcagatttaggtccagtcgggcagagctacaaacgtaaaaacgcggcttgctcgacggatgcgagtgtgtcgtctgaaacatcggcggatggaaaaaagcgctctgtgcggtgaagcctaattccacatcaagattcggaaatgcagctcgacagctgagaggtgatttactcactgctcccgttgcatcgcgattgtcgagcgactcaggtggcggaaactcccgtgcgcaatcgaagcttgcggagtggaagctgtcatgtaagtgcgctgcgtcagcgaattccggagcagggctgtgcgctaatggcatggggctaactgtggcggaataacgagcaaggacgagcatcatcgaaatcttgagagacggaactgaagctatccgttgtaatctcgcccgccatccgttcttttgctgaataaataggtcactagtctgagcatcgaccacggcgcatccgctcaatagcaaggtcacatttctgctcctgcgatgtccactccgaactcatgtgcaagtaattacaggtacaccttgtactctatcggtgtgccgtaaagatgaattctctttcaacgctagcttcccagagacacctacaggcgtaatgaaaaagtcacttcttgccttctgactcgtaagtaggcgctgtgtgcgtggaccgacgtgtcactagacaaga

SEQ ID NO: 2597 - DNA, 1744 bp, Toxoplasma gondii
  source 1..1744: mol_type = genomic DNA
gattcctgatgtgttggtagtgacacgtcgactgatactggtggatcgtcggcgaaacttacgtccatctcctgttctggagacttcaccttataaggcgctggggcagccacctcggcctcctgctgcccagtcatggctgcctcttgctcctgatcgtttggctactttacctaaatcctcgggatcccgcgtgtctaaactcaccataacttgtgtcatagcgttttccacgtctggggagagaatcgcatcggaatctgctggagatatactgaactacacaaaaacataccggccacggacgagggcttaacaaccataacggggattggtcctgaaagaaggtacgtcattgtgtgggttgccaggagaggaaaagcaggcaatccttcataccagcaacagcctgctcctctgccgcacctgaaagaagccgtttgtacaaatccgacggcaatctgctctgttgtgttgaaaggacctacgttcggctgcctcggaaactgaaggagagaagagatgtgactgtctgtaacgaaactacggttacgcgcaaacggttatcttacaagctgcatcggctccagctcccccggggtggggatagttaatttccagacgcaggccgcctatcccgcctgaacgcaaattgcatgagcaatccccttctactctcttaaacctctttccagttaactcaccaatttgaagctgttgtctccccgtacgtagttcccttaacataccagcaacctctttctcgagagcagcgacggcctgctgctggtcacctatctgttgcttgagctggtgaatcacatggttgggttgctgggtctcagtggcagagactgtcagtccggccaccaaaggtacgatggcgaagagacccgcagcacatgttgacttcattttcactaaatataaggaagctaacctccaccagcaatgagggaaacaagacaccttttacgccaaaaacaaatagtattcgcaaaagctatcaacactagacgaaattgctgcacaagtgatcgggtgtacagacactggtacgcttcatcgggacctttgacctcctgtctatgttcagatttactcactgtcaccgttaactaacgtgcaatacaaaattttttcagggacgtttgccggcggcccattcacttttctaacagatcattcttctggttgcccttgcgtgtcgccgaagatgaggcaatagatacgtcgccagtcattgtgttctggtgttttaggaatgtgtccgaaggctctcgtaaaactagcgtaccgcacgatcgccgggttctgtcgtctgcagacggactatcacttccgctgaaacggtacggtttaccgctcctcctgaccatccttatccacgccacacgaagcattattctggtgaaagaagtagttgatgcctgatagtttgcttgattatactctttcacgatgaactagcccgacaaaagagcacacgacatgccagcgcatgcaactagcatgcattcacccacctggggcttctagctctcgccattcttagggacggtatttcgttactatcgctttcaaagacttctttgcctggctcagagcgactatttgtcacgtttttgatcgcaccaattgttgaataccttccatacggacgctatcttgcggtcacaatgacctattgcatccagtggtgaccatgaacatcttacagtcctccctcgggccacgttttcaa

SEQ ID NO: 2598 - DNA, 2438 bp, Toxoplasma gondii
  source 1..2438: mol_type = genomic DNA
tctaaaatctcttcctccttgatgatcggcgcagggtcgtagaatttcgactctctgagtctgtcgagacgcttcacccatcggctgtcgtagccccgcctggaggcaaacgctgcgggccgggcgcggccgaggtcgacgaggttttggctgaatgcgccagagccgagagcggtgtagctcgcggggagcaacgctgaaactccccgccgcgacgagaacctcgacgtcgacagaaagcgtgcagatgccttagacgcccctgcgcgagaggagacgggcaccagcccgtgggcgacaagggctgaggttggcggaacagacgagccagcagaagaaccgggtctccggagaggtccagcaagcaggaaaccggaaagtttaagcgacggagaagaggcaggagagggccgggaatgatgcctccacgctggggagcagggtggttgtgcgtcctggctccggccaagagtctctggaagaactggggaccgtgtctggcggcttctttctggactccgcgaggcgtcagaaggagacgaagccgcatgatcttcgcctgatcgttgcccactccctgtcctggcgaagaccgtgtcgctgagagagagaacgggcgcactcaccaatcttgtgtccctccggatagctcgtggtttcggggctcccacgcccgaaaatcttccaaaaaaggagctgcacgcgctcattgtgtcctctggcccatctgaagctgtggagtcagacgtactagcggagattgccggggggcccgccacttctgtggagaaaacgagggaaaaaaggaagtttgtgagtctttcaactggagctgacaaagggcgggcggggcaacaagaggttgccggcaggccggcacggagggaggaaaacgcaatttccagacggcgttcacaagagtcacacagagtcctccaccaagtgctgctctcgagtacagggcttcttggatttccgtgggtgtacgatgaagacacccggatcggacggccctatgaagctccactctgtttctcaaggcaagaagtaatgcgagaggtgtgacgaaagaaagagggattcacgcgatccacaggaaacgtcgactggatggaagctccagactgtgtgtccttgcctcctcctcctcagtgccggatgtcgcctgtggagaaaaatgaaactttgaacaagcacagcgaggtcgctgtcggcgatcggcgagtccgctgaaacctttggcctccggcaatcggtcaagcaggtcgagacgcgtgagcggaaaaatcgttgcatgtgctttcgcacaagaacagagcgccaggacgaggcgaaattttcttggcggccgtcacgaagaaaactcctcttcacaacagcgaatcgggccccgaaaccaagagggatcgactccgtaaaaatagcgtaaatgtgtcgcggaaagaatctgaagagcctcttcacaaagtgaggaaaagtgagttgcgtcacttgacacagccagtgccgcagacacgaaacccaccggccacgtgtgtacatacactcgatgaaatgaggctctccttggacaggaaagcaactcttcccgtgaaaagacgactctgccgacggaaaagtaaggcaacggagtcagtgagcgcagggcgtcacaaccagccttcgtaaaactctcctcatcggggtgggggccgcagatgatccagagagaccaaacgaactgaacaactccagtttcacccgcagaaaggcgcgtgaatttcttttcaccgttcgcggaggccgtaccgacaagtgaaagggggcgtttcttctttgcggctgccgcggatcgtagtgaagcggcgaagagaaactgcatgcgttttgccgtgaataggcgcatgtgtgcgtcaatcgacggccgcgtctgcagttttccgagacaccggtatcatgatatgccgtggattttcttccaagccgcaccaaagatcagattcaaggcccgcgtccactccaatctagaacagaacttcatcctcaaagattttcgtgaattccgaccaggattcttgtcatcggcgcgcgggtacatcgggcgcagacacatgtgcgtgcggccgatgaggcatgctgctttgcggagttacaaaaaagccgcccgtttcgtgggaaaggccacttcccctgtcaatctcagcccctttcttctgttttcaatgaaatctggagttcctcgacgctgcgcgtgcgcttgcgtccatcccactgctttgcttctcagtcacctctccaaaagtagctgggaacgctgcgagtctgttacaccagccacttgcacgctcggtgacccttggatgtcaacgtagtgcttgccatacacagagaacatcgttcgcaggctttctttcccgctatccagacttcttcggcagaaaatccggctgcgatcaaga

SEQ ID NO: 2599 - DNA, 1960 bp, Toxoplasma gondii
  source 1..1960: mol_type = genomic DNA
aagtaccgcaatgccaccaatactattcttgtttaagttgacgggcatagctttttttggcggacttgattcagcctcgcatatcgtcggtagtctggtgtgaaggactcgagagaccgccttgtatttttgtcgtgtcttcacccgattaattgaactcgactctccaagctgaagtgtctccgcatgttttaacgtgacgagactcaaagcattcagccaccgaagacagtgtcctgtttttcgtaaagttgtagacaacacgaccgactagactcttcagagatgttctaccactgagacgtttgaactcacatctattataaaaaccttttaccagacgaactagaatttccagctagtttttttcatcttcgacagaactcatcgtgttgacagacacagcaacaggaaatatatgtccacagaattggaaaccacaaagcttttcgttaaagtaagcacagccgaaagcagatttttctaggttgcgtaccggaagacgggctgcgggactgataagagcgtcttcgatgcttcaccattccaaatatgtttgtgtctgttccgagtttttcatccagtcgatcgggtaattggttctcacaagacacgtaccgataaccgccaactgcttgtcacaaaaagctgttgaagaagttttgtgcttcccccacttacaccaaattacctagacagagagtgccgtcctggagaagggaatacacttggggtattgccaatccaacaaagggacggcggagaaagaagcgtaaaatgactgtatttttgtggatctcctccctggatagtcgcttcaagctcacttccgcgggagcgggggtccccttgagcttcacgggtccgtgctgactagcggaaagaagaagcgaacgagctgataattccgacacaccttaccttctcatacgcctgcatgccacagcgaatgtcgagaaaacgaatgtggtagaactgcgatatcagaaaaactccccccgatacagagccggaacgcggagcagcttagcaggcgacgacgcggccagcgagacaaatttggtcggcactggcgaaaaatgtgaaagccgccatgtctgaaaggcgcaacagttcacttgaaccctttccaggacttaactcttttttttgctgtctagaacgtatccaagacgctgaagtaaatccgtacaatccagacgtctgcttgctgtgcatgcgctgaatttttgaagatgcaacagagaggcagctgtttctgcagcgtcgcgcgcggtctctttttgtgcgtgggcgtctgtcttagaacgacacgcccaaaaagggttcttcacgtctcttcttttccagaattcctctttcttttgaccgtactcttttccgtggctgtccgcattcgaggagacatttgaacgcggctccctccgttctaggctcggttctcccctcgagccgggcgggcgcgccctctcgctttctccagccgcgaactcgtgatttcaattccatcttcgtccgcgtccgccattcttgtcctttcgcgtcgcgttgtttctcatttccctccacacttgccgagaagctggtatttctcagaccttttctctgcgtctgtctgcttgcaagacgcctacctgaagtcccccggagggtgtgcccgtcctcacttcgaggcttatacagaaaagcacgttacgctttcagccaccccagtttccaaatcgtgaaaaacacccgggctcgtccaggctaggatgtgagctgtggacgccccgtgacgcttgtgatttctttcatgtgacgacagcggcagaccgggagagtcgtccagcgcagaaccgcgacctctccagtttgtatctgatacttttaaagaaatttcgcgaaagaggtgcctttgtgccgagccgggcatgctcttctcactttctgggatgtgtatctcccacaggtaggacga

SEQ ID NO: 2600 - DNA, 4706 bp, Toxoplasma gondii
  source 1..4706: mol_type = genomic DNA
gacagaggtgaagtctcaagagacgaaaaagaaagcagaccttgcagactgctttcggaagataaaaatgaaatgcaagagtgtcgccgatccggttagagaaccccttgtgcgagttcgatcacatggcttctcgcactctgtgactgtcctcacgatgaaaagaaacgcactcgactgcactgtcttatttttcacttcccccttcagaatctcccccccagtcttcttctttatgtcctttggagccatttcgacttcggctcttccgcctctctgtgctggtggttcgtggcgttcgccgggcatccccgagcctcaaagccaacaagaagtttctccagcgcagtatgcgactcgcctgcagctcttgctgaaactgcggtggactccacagcttccgccgaaacccaggcagcagcccacacgcggccctcagacacggtatctcggcaaaacgcctttgaaaaaaagttttcccgctcactgtgtgaagatcgtgagtccctcgatgaggccgacgtgactgcgtttctcctctgcgggacgcgatgcaggaaagtagaagacgattttcgcttcctgagctcgttcttcggcgcccagttcctcctcttcttcgctttcgtgtcgggcttcaacttctccctgtgcaaatgaaaactcgtcgtcggagtcctcgtcctcgccgccgtcttcttccgtgtgtctgcgagaaacgctctgggagctcgggggtgtcgctctgcagcctggtgcaggagcggcctttcgcggaggctccagcgtcggactgaagagaaaaatcgcctctactccgctgtgaggaacggggggagaactgcactctttccttgcctggagcgagccggagagagtggaggacaggctcaacaaatccgcagcggagctcgagctgagaggcggcggcgccgacttcgcgccctcagccgcagccgcggaagaacgcgagagcgcagccctagccttcacattcgagagtgcagaaaacatcttgccctgagtgatgaagaggcgaaagaaaactgtttagcgcccaggttctttacaggactcgtgtccttccaaatggacagctaaagactggtacaaagcaggtaataaaaggggtggatttccatatcccaaggtcctgcagttgctgcacatcgaccgttttcaagacgtggagatagaagaagtcacgggagaacgcagggctgggcttcctgcgaactgcgacttggtgacaacaggcaggggtcgacggaagcggggtgaggacggaagcaccggaagtgaaaaagctagacaaccggcgaatgagacgaagaggggagagcatgcatgttgcacctgaacaaccggcagaaaagctcgcgattcacgacatcacgtgcggccggcttcacataggagaggacggtccggcaaccggagggcgcggaagcccacgggaatggacgacgttcgcgtttgtgtgtgcgtgtgtgtgcagaagatgatcacgaaaccgggttcgctttggttatttggccatctgaatcgcctcgagtcttttctatcaaaaatgactgcttttttagaggaaagaaacatccagttcccaagttctcctggtggctactccgtcagcgtcgcggtgtgctgcttcggcagaagcccagcgatggtgtagaaacaacagagaagggaggaaacgcgctgaacagagccgatcctcgtcgtgcgagaagcactaagaaaaaagggaaaagaagagtagttctagagcgaacgtccccgactttcgcagtttcagatatgaaaaacgccgagttcctccctggtcgaccaagccgcgtccgcacatgcgaaagatgcagagggccagcatgaatacgcaggctctcccagggaacgtgtagcgtgcttagggacagcgagagcagcctcagactcccagtttatcaaaagacagagcgaaaaacaaagggcaatttcggatttctcactttcccggggaagcaaccaagcccggtcacccttcggagacctaccccggcgctcgcgcatgcgatcccaattgttaccgtctctgtagttctgaaaagctcgtttttgcggcacaagagacaagctagccaagtttcgaggcagcagaacagtgtgaaatgaaggactacaggaaatgccaaaggataaagtcggacaagctggagtcccagcgatccgcaagtgtcgcggtgcctggtttgtcgtagaagtctcgtgttcgaagtggacttaagacagagtcaggagcagcactgtagatttctgaattgatggatcgtgccgacaagatgctacatggtcttcctctgcgtctacttaaaaggacgcagcttgtaggcaaccaagtaaccggagaaccacgaactcgactcattccagaatcccaatgtactacccaagtttttttcgagagtctcaccgtttaaggtatgctgttggacaaaaaagcgcttctacacacagcctgcttttgatggcctcgcagaggatgaaatatgtcgtcagagactgcattgccacacattctacagatgaaacgttggaaaagcagaatcaaccaacagaacaggataaagacgcaaatatagtcttgaagagagtcctcgtcctggaaaagctagacagcttcagattgtctacttagctttctgtacccccagcaaaactgaacactactggtcagttgaacagtgagtgccgaagcctatgcttgtcagaatgtttcttgctaccaaaaaatggcactttgaaggaggtcctggtgaaaaacattcagtgtatggacagcgttggcgtcacacagtcagaacccctgattcaacagatacgtacagcggcatgtcttctttaagccccatgcaagggaaaacagatatgccctctccaggtcaaagcagtgatgtttggtgcgcacgactctcgcatccgcttctttaaagaacccaacacagcttttttgagatggaccgcgaggcagcaggcaaagtgccccgcctaccatgactacagataacatgcgtattagaaatgcaaaacatgctcccataagatgcttccagttccctacggtagatattttgcagagaattactgagtcgtttatctgctgaagcatgctttttgctttccggaatagcgtgattgctgacgaactccctcaggcagaaactgtccttcgcgagctgcataaccaaaggaaaaatactgcaaaaagatcttgggaaagaatccccgtagtccaactgctctcaaaacgcgttttcgttggtgaggtgtttgcatcaaaccgcacggtagttcgaccgtcgcttcacatcatgcatagggcagggctagttttgtgtgttttttcggggtaagaaattgaacatttcaaccagttttgacacagtaaggatgtgtcgccgtggccgcttcgcttgtctgtagcaacaaacaactgtgtccacgaacagtagaggcggccggtcgcctctcctctgttaacgcgcaccaggtttgaaaccgagaaaaagagagaataagggtgttgagttcgagcgtgtaaagacgacgttaggtgactttggcgcgatatcttggcctccactctgcatttgcatccaagctattcgatcttccaaacgcttgtattcctcattttgtcaggaacgtgtgactgacgggtaaaactgtttctttggcctacggaactagaaccgatcttcccacggatcggcaaacgctggacaggaaagaattctttttttggtcggcacgcggcggtgaggcctcgtccgcaattttggagtagataccaagacagcagatttattctacggtcgaaggacttcgaaggaaatcacttcatgagagtgagtgcaccaggtgtcggttaagaacagtcaatgcgtgacacgcaagtgaccccagtgtctcgggcgctctcgcaaccgttgcagaaaggttcttttttccctcacttgttgcggtcttttcacccgtattcttccgcgagtttttgcagggcgcttttttacacaggcatgcatcagattttgttcgaagcagacttacgggctttttccgtgtcggcgaaaaacgcgggagcgttccctgacatccgcccgtctccgtccaccagggagctggagacatgggcgctggttgtgccgagcaactgattcggggttttgggcaaaaagagcagcgagctccaagcattttacctttttttgtttctatctgtgcagcacttctcgactgtcctgtactttttgtccaaatgtgtctttggtacaactgttttcgttcaggacgccactgactcctacgccctctcccgacctcgtgagtcagtagcccttcagtgcggcgcgtagtgctcttttgtccttcagacgcctgctatcttcagcaactatggcggcagttcactgcctgtgaccatgccagtcggagagtcggtttccctctagactttgcttgatttttggctgcactggcttctctcctgagaaaaccggcggactttttcctcatttgagactcgtgtcgcgtccaggaacgttcgttccagggccaaaactggaggtgcgcaagttagcagactcacggacactctcgggcatacatccgtttttgccccgggaccggcacagccatttttccccaaaaatcagttgaagcca

SEQ ID NO: 2601 - DNA, 3489 bp, Toxoplasma gondii
  source 1..3489: mol_type = genomic DNA
gggaacgatgggttggtgaaggaaagacgaggcagagacaagcgttctctgtgtggacggacgcagttgagaaggcagtccagttaggaaaaacaggaggaaaaatagagcgagcgaacgcggggcagcggcagacagcgtggaagttgacagactgcgaccacgatcgaaaccgcgaaagcgatacaggacctgcggtttcgctggacgaaacacagacgctgttgtcgcaccagataccttgccgtctgccaaaaagcaaagaaacgcactccacgtcaaatgcttgtgcaccagagcaaggaccgacggaaaggtctggacgagtcgtgtaggcaacgagtcgctgcccaccgatgtgtgcggtgacaaggcacgcaaactggtggtcgagggccttgttggatcgacgctgtttcgtcgcgcacgagatgtgacagcagacaagcgtggtgtaccgagtttcagcggagccgcgcacgccggagatacggacgactgacggaggggaccacggaaagggttttgccgtgtggctgagaaggaacgtgtgaggctatttcccagggcagcagaaccactgcaccacgaaccgggaacaggtgacaggctggaacctcgcgacttcgttgttgaaccttcactgcggcactgctggactggatctagagttggctggagggtgtccgcttctgtcctcctggaaggaaagcccgaaatcttagccgcacacagccagaagggcaagggcggtgagaaagacaaaactggtgcagaataggcggcacaggaaaaagacgagtcgctcttcgtaccatggccagctttttccggcgacgtccggcacccagcgggcttatcttctgaagagttgactgaaggggttgggagagaacacttttttgaaaggataaagttgtcacattccaccgtggctattggcgacggactgtgccgtgcgaccgcgaacagattccagagaggtggagcgtatgagtgcctcagagttaggaactggtgacctgacgcccagtgatgttcccgtctctcgctgcagtgctggtcttcctcacccgaaaccgctaaagaaatacgtgtgtcagcacaaggatcaaatgccgaagtttcccatcgctcacaggccgacaaaataaaatgatttacttccatctcgggtgtgcgaaagtggacccgtgagaaaaccggccggggtttccaacgggtgaacggaaaagaagcaccctcgctaggtggcgtgagctccgcgttcttctagtgtgcgagggtcgttccgttttccgaagctcgacccccgcgatgggacggcggtgccaggatctggttttgtagagactttagggaaacgaatggacggcgggaccacagacgaatgaatttttaaaaagcctattagttttgtatctatgttccacgggatctaatgagcaagaactgtgtcaaccgtggtggtccgagagacgctggactgacgagtcgcgaacgagggagggaagatgcacccgaccagggaacgccggtacgtgaagatggagagattccttcctatataaatgatacgttttcgaaggaacgcgagatgatgaaatgaccgcatttcgactccaccgtaggcggcgagggactcatcacgcgcacgaacaaaggcaggcggtatagagaccaccccgtcgcgctgaagatgcggcgggtcgtgcaggttttggacgtctccggggacgggtgctgcgggagaaatgatgcgtctaccgcgtcctgaacacatgaacgggacatggaacacggagaaatcaaccctacaaaatccgatacggagagctacgaatgcagaaacgcggtggttcttcagaattgctctctgtcagaaaaggatttgtgcgaccgcgcctctccccggccacgtgtcgtggcccgtgaagaatgaaacgccaagagagaaggactcctcggaaggtaccgaagcaggaagaagatgtcaaattttcaagcagtgaactggatatccatgtagcactggcgatagtcatgacccgtctgtctcctccggttgctccatcggcaaatgctgtctcgtccctggcgcgcgcgtcgccggatgtgttgatgctcacctcggttcctccccccctggccgtccagagagaacgcgagccggaagacagcggtacgttgcctgctgcggcccataatctgtgatgctcagaggcacaaaacgtacgaagaatccttgatgtaactggtatttcagtcgatgttttccttcccggtcctacctagcgttgctctgctgaactctttaccatgtggatcaaaaatgaggaaatcccttaggttcttccggagacccaaaacaaaagcccgccacggtagactgcactatgtggcctcgcggctgacgcgagttagcgcagcttacgtaccacatgttagcaaagcattagtttgtctgcgtacactccaggtaccaggtaagtccgtgcgctggacaggggagcgaagcaaaacaactaaatccgtcataaagactcaggaacacagaaacgctcctgatgtctccagaattcctctctgcccaacagctgcgctcggctgttcctcaggtttccattcgtcaaatccagtgtctactctcgctggttgctgcattcacatttcaatgctgcaatttcacttgagctcgttccactgactactatccttgagagcgcctcgaacgaggaggcagatattggaggagatgaaggatagactagccgccaagtaacatggagattagaaggtgagcatgagcagatgagggttcgacagtctctctttcgggaaacggtgcgcgagggaaactcagggggggggagggggaagggggttcacagcgcaacgtcgcatgactcgacacggaacagctgtattttacgcactgctggtacaaggcccgagggcagattattcttatattcgattgattgttctcatgtgtgcttaagacgattttgtaaagctgccaattttcttgtggaccgagcaacagttcattcagcaagagcgagggggacatcgcagtaaatctgcctccgttgagcgtgactctccgctatcgtgtgttcgtcgctaggtagtggcaatgttggcccctgcttgacattttcctggtggtccctacaatatggtttgagactcggagccgaaagtatttcgcgccgtctgtcgggccccgttccccaatgcaacgcagttcagggcatatcgttcgcgcgcggacgaaacgcagcgttttttcctcttgagaaactcaacggtttcccttttttacaagattgttacaaggttcttgtgaatgacacctttgcacagttaaggggccggtatccccacggttttcctgatcacccacgatacaaacacactttctggcaacctcaccagtttctcgcgttgcatttctcgcaaagtagcgtcataagttgagcgtga

SEQ ID NO: 2602 - DNA, 2219 bp, Toxoplasma gondii
  source 1..2219: mol_type = genomic DNA
cgtacacacgccgtccaggcgtttccgttctccgaaaatctcccttttttcgcgaaaaaaaacaatcgtaatcgcgagccacactcgaactgcgacgactttcaaaaaagttcaagtctgtgcgtcactctccgcgccgctgggagttcggcgtccttcctccttcttctgtccaaagagaagtcatttctccctgcgcggcgttctcacgggtcccctctaaatgtgacagagctcatgagacagtgaatctctctgtaaatacaaaaaaaaatagttacaactatagatatcagtggatctacaactatatagatcgatctctacatatatatatatatatatatcagtatatctataaatacatatataaacggtgtgggactgctgcgtttcttctgtccggcaaagacttctgtagacgcggcactcttgtccagcgtttccacgcggaaagcgcatgaagggcgtggaatgtgcgatgcttcgaacttcctttcctcgaagactcccctttcaacagacggaaaggtgcatgctctgagactggtgttttttgccttcttttccacactcccgcgtcgatctaatcacaacagctgttcctccagaaaaagagtctcctcggtaagcacgccagtgtaaaccgaggagacaaaagcttggccttggcagccactacatttctactggttcgttgttcagcgtcattcgccagttccgcgaaacgccgattcgttctcttgccaagtcagatgggtacctgactccgtggatatgtgcaccagcaccaccaacaacataagcctttctgactttcgttctgcgaactctcgctgcttctcccttttctccccacacaccgtcaaccacaaaaactgcgcggaaacgaaaggcgagaaatgctctcgcctcgcgctgaagaagtgactctccccgaactcctgccggccgacgacctcccgcgcgtcttagcaagcacgggagtttcacactctatggcccccccagagtccgcgcttcagtctctgcctctccacgcccttctcctctcgacaggaaagccacaggcacacaaacgcacgcccacaaacttgccttttcaactgctctgcttttcgcgtttgtgacacccgcaggcgcaagtggacgtccactccgaggactgcctgggaacgagcctcgctgccgcgaatctgagcaagcctgtttcgtctctgtttacggatgcatgtgagaggaaatccctccagacggcgcgaggaatgtccttcctctttcaggtacttgctgtcaccccctgcggcctcgcctcgcctgcaagttcggtgaactgacgaaccgtgtgtctcaacacaaggaagccgggaagaaaggtgaggagcgcgccaccgcctccaagaaggaagtgaaaaatgggcatttcagacgcccgcgtccacttcctttcaggagagagatgactggaaggacgagagtgaaggaatccgtggaaaacaagcaggacgagcaggctggggtgttgcatgtgcagagagtgagcagcgcagccgtgtctctcgcggcactccgactataaggatttcctctccttttgtgtttcgaaaaaaacgccaaacaaagtctggcgaccaggagcaacgtgcatgttttcttttccgaggaaaacccaagaaaaagcttctgtccgtccggccaaagtcggcgtcactcctccgtgcatctgctcgacgcggcacaactcgtttttacacacacacatacatgtatagatcggatttcgctcgcgaaaacaacgacgagcacctcaatttttgttcttgcctttctcgaacgtgtttttctttcacgaccttttcttgcaacgtccgagaaactcttccttcgttctcgcagccccgtctgcttcctccacatcatccggaacaaggtcggatcggcggcgattcggggatttccggccgctcttttctctttcttctttttcgaagttcctttctctgcctcgtcctctgtgtctcggctgcgctctcctctctcgccgtctttcttgtcctctgtcttgctcctgttctccctcctcagacgttccagcctgtgtcttcttcgcgttctctcttcagctgccagcttctctccccttctttcctctcctcttttctttctttcgattctttctctcgcgagtcgagcggctttctcttcccaagcctccagaa

SEQ ID NO: 2603 - DNA, 4955 bp, Toxoplasma gondii
  source 1..4955: mol_type = genomic DNA
ctctgcgacgttcttcagctcggcattgaggtaaacagacagactctggagcgcttcgcggagattccctagcgcggggaggaggagagcgagagagggacatgtggcattgacctcagcgacactctttcggctgctcgcaggcagcttgctgtcgtgcaggaggttgccgatgttcgtcgcggacttctcgattcccttaatgggaggcaggcgacgctgctggtggctgaagaagtctgtgggaaccaacagcgcctccgtcagaagagctgcattgcagtcttgcagtgtcacgagcaccgaaagcagacgcgaggcgacaaagaggcggcctgccacctcgctacacccgccgcaaaaggctgctgcttcgtctatagaaatcgcttgcggagcagaagggtcggccttcgccaagtgctctacggcaccgttcaacatatactgaagagcgctcggatacgttgagaagggggcgagaggaactgaagaagcgagggggagagggtggcggggaagcttggtcaccggaggagaggcctcgttgagaagagaacagagcgaggtgagaatccccgtgcgcacaccccccgcattattcagtaaagacacgattcgcaggactgccgtggcccgtaccgcagtagaatgaaggacaggcgctccttccggcagcgctggaagattgagagacgagaaacactcagtgtttcccccttggggaaaacggcgtccgaactcacgcgagagcttcggaaccacagctgggtcgacgacacaggcaaagtttccgaaagtgtatgcggacagctcgtcaagagttaggggacgcgaccccaggggtggtggaggcacgcttgacgccattttccctgtggagagcccgccagctgcaaacgtcttggtactcggaagcgtgcacacaccacgcacgaacggttgacagagcaaaagccacaacgaatttgggtaacctgggaagcaacggcgccggctctcgcgcgggcacggcggaaacgttcgtccgtggagtgacgcggacgatgcagtcggcgactgccaccagtccagataccgggcagagcaaaaccgaatccccgcggaacgcggcacaaagctgccaaaaacactggctccaagaccttggccacttcgtctcgcgggagaaatacaagggaaccaaagaatacctttctgcgagacgggatgcacgtgatgtggggaatagagacaacggctcaggccgcgagacgagcggattttcgacggaagcatgcgaagtgccagaaaaaggaaattgccacaacttgaatcttaccggtttgaagtggccatctttttgtggacatgcgagaaaaaagtgccgctcctgtagccttcaaaatccatcgtaaaacgcaggtggtaactattgctggcctatcaaaacgatggacagcggagagcgaacagacacacgtgttgctgactgctgttgcaagccgggttgggcgcacatccaagatcgagcactggagccatcgaagtgatcgatattgttctcatagctgaaagtaccaaagagctagtcatcaatcgagtttctcacggtgtcaagagattcttgagaaaagagggacagccaacagtggcaccggtcatctccggggctgtcaatcgccaagtgactagcagtcgttcgctgcgcctttgcacagggtgttcgcgaggaagatgctattaaaggaagatgcgcgactcttgtttctttgttcaacgaagacgttacaccaattcaggcagggcgaccaggagagaaaggcgcctcgagacttgggaatttgagcgatagccagtaagaagaacctgcacagtttctgaagagtgaccaggtgacgccgtgaacgaccaagaatgatcaatctggtgtccgtacacctgagggagaattgctgaacatgaaccgacaacgaaatactctggctttcgtgacttcttaggatggttggcgtcctcgtaaatagagatcttctcagtcggcaataacagagctgttgggcacggacgccattcatcgccagtatattgaacagagaggagtaaaccccaaagccaagatagagctcagagttttgcagttcgacggcgtatgccttcagaatcgtaggcggagcgcatcggtacgagccttccccctgtccagttccaaaaaacatgccacagtacaaaaaggctagcgacattggagaggtacattgtcgtttttgtaaagagctttttcctaacttttaggtccgcagccggtgcctagacacatttgccctgacgtctttctgctgaagaaaaagactctaccaagtttcattctgaggcaccggcggcggcctctacaagtcattgccaaccggttgtaaaacaaagccgtttctcgaccggggcacaagcgaagagaggcttcctttttgcagtatgggggtggagcctttacgagtattctgctctactaatgctctacttcttgtagagacgttcgtcaagaagcccaaggctcctgcaggacacaacctggcacttcactggggccggttcctcgaaagttacgtatgtggcatgaatgtgagcagcgtcttcatttaaccgctactgctgggactgtagagaatctacttccggtaggacagtcgagttcgttcttccaaatagatagacgatcaaatctcaaaggagtaacgaccgtgcgctctttgccaccctgactgtcactacgctcgctactaaattctgtgtcgagtatatatcgaaacagaagcctgacgccttacatgatacatggttgctaatatcgctgtctccgttacttggtcgtgataagttacattctgagtcgatggaggttgccgcagcatgttccgctgtctcaaagctgcagcaacccagtgaatgaaagttgccacggatcagttgtcatgcatctgaactgcgactgtcccttgcatccttggagaagaataaagtttactgccctccatgtttgtttgctctggagcaacacgaaagaaaaacagcgaagcctaggagcgagttgcctcgtttcctttgaagggaaatgctacccaacactctgatatttaccaggaagcaaaggttgagcgtgataggactgcctcaaaagtctgacaagaggtgaatatctctcgtgtgacagttgaggagtcgtcctctgccattcggcgattgtgcttatcacgaggaacggtaacataatgccaagttaattgcctggaggtttgttacgatacgtacagtgttcgataaactgtatgtttgagaggtagaatagcgagtcgctgctagtttcccggtggcgcaccataagggtgtagctgagccgctgtggaaaaaacaaggtgcaccagaagaaaaccgttctgtatgtatctgatacgttggaagagtcaaagcactgacgaaactccgcgggaacttccaagaggaacaaaggcgagtggagtagtatctcacactttttgtgatcacttctgaaaaacaagaggcacggacatgcatgccttagcatcttcgccttccccaaagtcaagaacgactctctccccccggtgaaacacagcaagattaaacgcagagtcagtcagtagttcgtaggcaccagagaaccctccgcaggtaagcttcaggggaggtgactctgcggagactagaagcgcccagtgatttgacacgctgttttttgtactttgagcatgcacgcatgaaccctcgtcttttctaccgccgatctagccaagagcaccgtgaaatgctgcgtgactgattggggaaaaatactaagagaaacacggtaagagtgaccggaatcgatgttcgccgatgaggattttgctcgtcttttccatgctggcttcgaatccggcgcattgcggtgacctgtctttgtgtgctgtcccattctagaagccggaggaaagccccaaacaaagaaaggcggttgccgttgaaaatcgcatctttgcacgacagatccatggattattattgtcaagaagcggatactttgtttgggccgaatgcaattgtgttagtatgcgctcctcgtttacgggcgccagatctcctctcactaccccccctctcttttccctggccgccgctcttcgctgtctccaactctgtttgttttccccctttccttcttgtcttcgtatccgtcgaactcgtctccaggacttgcctctaattgtgctggacgctccacggcccctgatgtgactccgtcttttggatgtaagacgctgattcctgtgtcggacacaagacggctcctgtgcatatggtcggctttttcgtgcatgccccttgttctggaggagctgacaaatctcctgtgaacaaattgccacctgaaattcgtgtcctgcccgcgcgcgatcgtcttttgtttttctacgtcacctgactctctccaaagaaacggggtaccactctacgcagcgttcacaacgccgtctgctgtgggtcgtcgcacgaagattcagtgtccaggcactgccaccattctcacgctattctgaaggaatttttccagttcccatttgcccgaggggcttctgcaagcttgtaatttttggcgtaccctgcccataactccgtctgagagccgccctgcacaatctttcgcagaaccccccggttccccgagagctgcggcgcaggcctcagcgcctttcatgcacggagtagaaaattgggaattttgccttctggtggagagggagaaaagccgggatgaatcagccgccgtcaaggagggtgaggcgcctccaagttttcggtttacgggtttaacaagaaaagacagaaggactatcgagaaacaactagcttgtctcccgagtcttcctctcagtctccggcgtccgcctgatctgacgcacttcacagtgcctcgcttggca

SEQ ID NO: 2604 - DNA, 1185 bp, Toxoplasma gondii
  source 1..1185: mol_type = genomic DNA
gttgcagatgtggacgaggcaacaaagaaggaagttcgtgatattctcgttgcgtacgacagatccctgatcgtcgccgatccgcggcgctgcgagccgaagaagtttggcggtcctggtgccagagcacgctaccagaaatcttatcgatgagtgttttggagggttcctgtctcccctgttcggttttctgaaggggaggaagggaggtcttcttgtgtgctcgttgactcttttcacttcacccttgtggatcctctttcttctttggcgcgcagcccatggctaaagctggtacggaagactggaagtgtgagtattctaaactgtgcttcgaaaacatgcagccttctgggcattgtcggctagtgtgtagcctgaactgtgttgacagcgcctgaaaagtttcgagtaatcataaagaagtcgcctgtatttgttccctcgtctggaaagacacattcacccaggtccagtggtcgcgcggctaacagtcacaaacggacggaggcaccttttgtcgacatccatattcgcaaactccccgctcagaagcgcaccactccactacataatggttgtacgaagatactagagtccatagttggttgtcagcagatcaatttgttccgtgcgtcttcgcgcacggaaaaatcccagtttttagtgcgtgactgttggattcagtcagaaccaacatctggcctggatttgcaaacaagacgttttgtctacgtatggagtcgaacaaaagctgttttgtagaagaaaggttctcatcaaacacatttaacccagttcagctgtccaactgattctctcctagaggacgtagaccacgtgcgaaaagttgacaaagagttgtcccacaagcaacgtcgtgcgccactggatgcgattgtctacattcattggagctttctttgaacactctcattcgacaagcacttccactagcagcaatgtcaattatggaacatcaagcgaatgctgcggccactacatccaagacctgcacctggttccttgcgtagcgcttcttagcaattgtctatagacaccggagaactactgggtatgtcaagtttctattagctgtactgggtgaatgttttactcacaattcatagttggtacgatttttaaacgtctcttagaactgccctggtgtatgtgttgacaaga

SEQ ID NO: 2605 - DNA, 1779 bp, Toxoplasma gondii
  source 1..1779: mol_type = genomic DNA
ggatgcctttaggagcgaaagaaatctctgcgccggcaagtaccctgaacctcgtgcgtccttctgcgagagccggagcgaagagaagcggcgaggagaagacagagaggaagaggcgacatgcagacagggatcagagcagagagcagagggaggagcgcgctgggcaggcgacgaaagcgagggccgcgtgagagaggaaacgaagtgacacaggcaagagaaagagttgagagacggagagcgacaaacagagagaggacgcgtctgcagagctcggcgagagccgagagaagagaggaaagaagaggagagatgtgaggagagatgtgaggagagaggggacgatgaacgagaggcagaagggggagaagagacttcttggcgtgtggggctgggagaagagcagaaagagagagaggaggaagaaagcgagaagagacgtcggtggacacagaaggaaggcagagaagaagaaaagcgagagaagcgcgtgaggggggggaaaggaatggagaccgcagatgcgagaggagagagacgtccacgcgaagcagcagagacgcgaccgcgacagcggcgagagactgggagagacagacggaggccgcgcggccgcgcgaggctgtcttcggctgggagccgcattgcggagcactgaagacagagacgaagaagttgacaaagagtgcgaaaaaaagggaaacagggtgaaggaaaggagacgaagaagaagaaagagaaagagaaagagacagcgaagagggagaatcaggcgagggagagaggtccgtgtgaaaaggcagtgaggagaagagctaaggtcggagcttgaacagaacgcgaccttccccaagtcgtcggagtgcaagaggacaagaggacaagaggatgaacagagaaggaggaaagagagaaagaagaaattggatgagaggcatgcgtccgcggaagagcgactgccaagagaggaacgcgagagtcgcgaggacgaaggagcgacgaaaaggataaaaagaagcagaggcagaacttcaacgtccgtagaaatcatccaggaacatgagcagcgagcgtcgttcctccccgggagaagcccggtgtacgtacacctcaaccgttgtctctcccacaacagagagggtccgaggaatgtcgttgaaatgtccagacgaccccaccagcaagaccagcgcggcgaagaagcgacatggaaaccgttttctttttttcactcgtcgagagttgagcgaccggacatgcaatgtcgaacaccgatcgcgcatgcatgcatcttctccttgcgctttctcggcatcttgttcattcactcgacgcgtccgccagtgcgtctgtgttttctgcagccatttgattccttctctctagagaaaggcttgaagcgccgccttcctcctggggaggcgtctcctacttccccagaacctggaacaatggaggaggactaagctgttccaccttttctttcttcctctccgtccatcccttttctctcctttctgtctctcctccctttcctggcttctcttgtcttctctccttctcctctcttttctcgtcttcctcttctcgttctcaggcctcttctcctctgcttcttccttgcctgcccccggtctgcccgctcgtcttccacatcgttccacgtcaaaaccaattcctccgcgctccttcttctcccgctccttctcccgcgtagtctccctgttctcttttctcttcttctttcttccctcgggcagcttccgttctgcacca

SEQ ID NO: 2606 - DNA, 2697 bp, Toxoplasma gondii
  source 1..2697: mol_type = genomic DNA
agaatgccaccaaaacattctctgtcagaggtggtgattcccagtgctcggtggtcctgattactttagcatctgagcagtcgtttttgctcgcgggtgccacaagggataacagaagtccactcattccggctcgaacgtacacgatgtgaagcaacgttagtcgcacacgattttgaagtccagcacttgcagctgcgtagtctgctttgtgcagttaactccttttattcgagacctgaaggttctttgcatttctgttgtctgttctcaagcagggctcgatatctgagcgtcaaaccctggccacccgagcgactattcgtcggcacctcgtccccactcggcaatgatgcactgtcacagaccttgtgtctcttggaggtgccgagaagcttgtttcccgaaggaaacatgttccagagactcagaacaaacgagaaccttcaatgccaggagagacttggcaggggcctcctggcagcacccaagtcccgtcgctctttcgctttccctttcgctgtttctcgaagtcgctgccgtgattcgaggataagcacagagggagagaggaagatcgagcaacaagtgcaggacagaaggatgccaacgggagacagagaggaagacaggggagtatacgaggaagcagaaagccagatacagacaaagaggggaaacggaaagaaggacgcaaaagacaaagaggcactggcctccctcaggtgtctagggaaagaagagctcccgagtttcttggttttctgagaaggcaccccactcaaaaaggctcttctctccaccgccatgctctgctttgttccagagaacagagagaagtggtagtccacaaaaagaaggaaaaggatctagtttctcgggaggagactcgtaactccacgtacagccgcctcctgtcagttctccagtcctttagtgatgctaaactccgatttctgcggttggcgacacgagacgcaaagaggcagtatgcagttcgtagatcatcaagtagaacgatacaccaaatagaacggtatgcgtggagtgaaagagcataagatgtcagcaagaagctaggctgcctgagtactccagtaaacagaaacgaagttccgtcgatatccaccctagtgctttccgttcgactgtgaggtggacagtgaggacgttcgcagtattgaactccagaattaccaagccacaccgatacacctctcgtctctattcactgcgaagttctttcgagcgtcaatatttcgctctctgcgaacttgagagcaaagcagagagtctcccgagaaaacctttcccctttctctcgacttccgcttccagaaaagggagccgttgagaccctctttcctctcgtattaaaaaaaagagggagggggagatttcctgttcgcaacaaactggtcgctctcgtccggagttctcgatttggtgtatgtacacgtcgtgtatagcgcgacacggagaagcctctccagtcgttttttgcgaactgaagctcggaacgacgcccccgcgttccaccttttgcagctgcgcagaacgaaggaaaagcttttgaccgggaaacggcggaatggagacgcggacgcttctgtttcgaaatgatcacaaaaactgagaaacgcaacgtggttgtcgaaactgcatgcttcacgctggggacccagcggcgagaaacatcctcggtttcgccacttttttcttttcacttcccattttcgtttctttcacttctggttcgtctcttttccgctgcttccctggccgacacaggcaggcgcgcttttttcgccttctgtctcggtgttccgcggcctctctctcggtcggggatgcgtgctcgcgccggtttttgtctgacttcccgtgaaaaagcaccctgcttctttgtctttctactcttttccaattgtctgtttcttgttgaggggtgttccccgtctcggaagccggctcgcctatctggacgagaaaaaagttcctccagacggtcgttgtcaccgctctttctttctctcgcctccccgagtttctcgagttcgcgatgatcaaaccagcttttcgtgaagaaatctgatttctctgggctcttcttctccctcgttgcgtgtccatatctgtgcctggcaagtacgttgcgtgacgctttttttgcgctgcatgcttcaaacaacttcaccatcttctcttcttgtctccgttgtttcctctgtgtctctgtcgttctctgaagcctcttcgtcgtgttttcacggattttccgtcttctttctcagcttttttaccctccctttctttgctttcgtctcgcgctttctctcgtcgctcggtcccctccctgctctttgttccgtgttcacctccccgtcgttttttcgaaatctgctttttcgcgctcttctcagcttcttttcaactctcttcagtctggcttcattgtctgcctcttaacctcgaaagactcttccttatactttttatttcgccactttttctcgtcttcctcctcactctgcctctcctctctcctgaggatctgtgcagtcctgcgctctcggcacctgcggagctccctccacgaggatctgtgtccgccgccaccctgccgttgcttctcgtcttctccggcctgcctggcttttttgtttcttcttcgcgaagcccccgccctctccaaga

SEQ ID NO: 2607 - DNA, 3785 bp, Toxoplasma gondii
  source 1..3785: mol_type = genomic DNA
ggatccacgctgcagcttccctaaagaagttgacccagaaaaatttcacttgacacatgcaagctttcaacgcaaacacgtgaatatgcatctgtgttcaggaccttgtatttatataaaaacatatgtctgtatactttggaaaagttgttgatgttggtagaggtggtcaagcttcgggcgccggatgtggttggagaacaggccatcccgtagacggctcacaaattttatagctctctatagaggaaattgaagctctgtttgaaagaccagacacttgcttttcgcagatggtaaactcgttcagcaggatgcgactcagaggagacgatgacggcagtcacaggatgcaggggactcatttactcggcagtgaagaaaaatacaaattcctgctgcacttcgctcaccaacacatcaactgtggtttgacaccgaaacttcttttctgcttaagtggtcggtcttctctgtagaccaccggtgaacactggaccctctgaagacgcgtacacaagcaagcgtatacactttggctgttgccaccactgagttacaggaggcagcgcgacccactttgtcggcagcgcgagctgaatgccacatatcgtgatggaaattgcctcccttttgagatgacatcgtttttactgtggctgtaggtgaaagcgaactccagagtttatctcctctgagacagtggataacgtgtacatgcttgttccgtcattcgttgactatgtttccctttgcggggagagcacagagcctccatccctacatggagcgttgctgatcgaaaagctgtattcgtattcaaatttagtgaagctggcactttcacaactgcttacggatgtggctagaagcgaagtagcctgtggctgctagctggttctaggcatccacactgcaatcgtggcgtaacggttctgaccaagtcaaacctgtctgtttcaagctcctcgcagacggtgtgcactcccactgcatgaagtcgatccggcgcagatgcccacttgcttttgttcacttactagcgaatggaatttaatgtcgcgaggctcatgcacagcgctgttgaacctgacgttacactttctgcgcagtctggaaggcgaccagacacacgtccggcatagagatcgtagctctaccttgtagtgtaattatcacagtgtaaatagcttttgtcgctgtgcaactgatccggggttcagaactggacaactatgatcgaatacacagagggttctataacaatccatccagattacgaagttccgtcaaatcgcactagccagcggtcgccaatacacgttccaggggacgccgcgtttattcatcgattaaaactttcggaaaatgctcaactggtgtgttctgtcagaagcaaagatattaaggcttctatgacggtaagaccacgcaagcatttgcctcaggccggcgatgcatgtgcacgctttggtcgaggatcgtgggagtttgtggtcgatgtcagttgctcggaagaaccatttaatttcggcaaaggaccactttgcggagagagcagttgcaatctttgttgctctttcgaatttttccgatcttctgctatttctcgcggcacatccgaacccccgttgctctctcgggaacggtgaactgccgttcgtattaggaaaggcattccatttccctagtccaaagaatcgagacgatattggcattttctctacctcaacttggcggcacccacgcagaagattgtagtcagcatcgctgttcataaacttagaccactctgcgtatccttactgactggctacgtaagaacttctgagtgcgtggttcccatggctacatacacacgtggatatatggccatttctgttaatttatacatatctggtgtcaaatacgaggttcaacggcgacaacgcggactttagatgatggttcgagttctacgattgggcttgcttgctaaatgtacgcgtctttgttgtttcaaatgctgtgccatagactgattgtgcctcggttcgtcgcaagcatggcgccaccgacctgtgaatgctaggctttcgacttttttcagacgttgtctggcgacaaggccctttcgtttcagattgtacttctcatcgacgcggcgcagttttctgtagcttttccatccttcaggacgcggtggggactcctatctcttccctccttctgttctacagcaggagctgcctcttcccctgatccggacataaagattcactgcctctgttatttcttatcatgggcttccgcaacgcgagttttgttgctgggtacacttttcgaccctgcggcatgtgcaaatcagcttccaacatatttctatgactccaagttctcaaacacaactccttgttttttatgacgatggcaactttcatgaacacatacctcgataacctggtacattagcgaaaagcgtacacggatctgcctctatatttccaaacacctccactctcctctcggacgggccggcacacgcgggacaacaactactcaaagacatcgcgttctacgaatttcaagatctcttgtctgcctcatgtttgctaccggagcgtttcggtccttcagcctcaagcgccctgcccggcgcctctctcgtggcatattttcgagaaagccttctgtttcaccagaaggggcagagcctctgcacgaaagcaaaggttctccttctgccgcaagaagagagaaaggcagacaaagcagatcgcagtcagcagacgcgcggcactctcgctacgagaggtggtggactttcctctcgaagaaaagctccgcaagcttcccggaacaacatgaagggacgttcactgagatccacaatcttgaccaccaacgatatggaagcccgagagacgcaaacggcagaggtacaaggaacgcagatgcacaggtgccaagcatggtgcaagcgaagaaagacacggagaaagccggagaagtaactggtcaagcagaagtgagtaacaggggggactgagtgtggctttttgaaacatccttgaattgcggacaggcggtgtgtctgcatcgtagaaacactcggatcagctcttcccttcgtgctacaccgtgttgaatagaaaggcgcaaagagacaggcgaccatgtacaagtaaggtttcgtcttctccgtatctcctggaaaagcgaacattcattacatgccaatcgtctgccttctcttttcgttaccacagtctcgactttgacaccgtacagtgcctcaaccacgcggcagaaaccacaccgtttctaccatgagacacaggttttgtgttccggcgtcgagcattattgatgttgcctatcaggtccaagtgtgttgtttcctcggtctgttcctgttgtgatactctaatccttcgaagttctcagtgccgcaggggcgttcccaggtactgcggggaaaaccatgaccacgctgaacagaatcgctgtagaaagccattcggcaccgacgtgagcgtgttgaaatagaaagtcggcactcgcgttgaatcaggagaggggaagttgaccgtgttgtagggcgttttttcgtgctgctctgcaggtcgacgctagagggagtccggagtttctcacttctgcagtggagaacgcacgtacctattttcttggtgcgggcaacccgtggcccgcgcccggacttggtcgctgcagttcacttcactctttgggctctctttcgtcctccgcgcagggcagtcattccacacactctcggaactcaa

SEQ ID NO: 2608 - DNA, 1413 bp, Toxoplasma gondii
  source 1..1413: mol_type = genomic DNA
cgctcgatgtttctttagaagacacatagaggcgtagagagacagccagagagctatttggagttccatgaaggctcagagctgaagttgctacagaaaacgagatggaggaaaacgcgccttccacgaaagacgcatttctcacctgtgcagaattgcctgaagttttctgcactcttgggcgcgaggtttttgaagagctcgatttttattctgcctgcttcgtggctgccgatggagatgtcgaagaagacgacaggattgtcaggatggagcagcggccgagagcctccctccatcgcctctgcgtaggaaatccctgccggcaattcgctctctgaaagcagcgaagactccccagagtttgcgggaggcgcgggcgccatggtcgcaaaagagagaagaaaacggagaacaagaagccgaggaaaactgagaatgcggagaagccgaagaaaactgagaaggcggagaagcagaagaagcgggagaaggaggaaacgcagaagaagcgggagaaggaggagaagcaaaaggagaaggcagagaagaagagggagacgacgaaaggagacaataaagagacaagggagcagaaagaagagagtgaaatgggcagggattgtgacttcggagaggagagaggacaatcggagagaagaatcgcagagaagacgttggaaggtcaaggcggcagagaagggcaaacatttaagatgagaaggaaccagagaggagaaggaagagatttcgtttgccgtggaagagaaggagagagaaagaagagttttttttctagggtaaagaaaggacagaatacgcgaccagaagaagcgttaaggcatgtttaaggagagatcgtgggcgcgcgtttcggagacggaaaattctccttttgcctgcgagaagaatttttttttgtgtgaaggaaacgccctgtaggtctcttggattttacctcgccttttctgcctcgctctccttgtcgccatgcatttttgacgagttgcatgcagacgggagggtcagcgattttcgccgcgttttcgttcaaatcgtcgaaggaaagacggggagtcaacttgcacgacggctctccgtttttgacaggcgatacgcgtgaaaaaggcgacacacaccgactcaaaaaatccgttttttctgcaaaaagaacttgcggtttcaactcacacaactgcgtgggtgcgtccccagcgggcctccgagctgtctccttagttgtcgccttaattcgctgcacttcctctgcttcttcgttttttctgaagattcgcgttttcggtctactcagcggccttcacgtgagtctcgagcggctttttggcggtgtgtgaagacctgaaaggagacctcggcgccccagacgctctccttcgcaaggtaaggcgttca

SEQ ID NO: 2609 - DNA, 2080 bp, Toxoplasma gondii
  source 1..2080: mol_type = genomic DNA
tgccagtgaatcgattgcgattcgacttgctcttgagttggatactccggccggccaatttcgaacattgtcattatccagtccattgctaggtagagtgtggagaagagagagaaaaccgcaatgcaaatcggaacccaaaaggctgcctgtctacttcctggcacggccatgatttccggaggaactgaggacgatctcctttttgccgtagataactttgccctgcgtcgtctcctctttgttccttctggccaccttgacctctcttcttgctttaaattgaatctcgttcccgcacgtttctcctgtttcccttctttgcgttctcccgtcactttgctgccgtctctcttttcggggtctttctccgtcgtaaacgggtccttgtttcatcagccgcgacagttctgccttcgtcgtgttttccccctctgttcttgtgtttcgtgttgtctcactcgtcgtgtgtcactcctccctccgtcccgttcctgtttcctactaggttcccttccctctggctcatccaaaaaagggatctaaatgacagcgaacatcccgacaactttttctcagctaaaatcacgaactatgcccaacacacaaggcgcgtaccataattcccgtataggttccctcctacacggcaacacttaaacaggcgcgtttctaaactattacgaagtcgaggcgagaaccccacaacttcctatccagtccacaagaaccgaatgacaacgcattacttttacacaagtgctcagttgaacacactagatacacaaatttttgttgctgcatgttgagtccaccagtgacaccacatcgaaggcgttgcgctacttttgacctcgttgagtgccctcgcggaaaaccagcggatcttctgaacacgtcttctgcgaagaagaagcgtaagctaccacttttcagtgacgcttattgaaagaacaaatgaaggtgacagaatcaaaaggaaacacaggaccgcaaagccaacactcttccacattttcagcggaatttactcacgtaccatcgcctgactgaggccgtaggctgcaaccccccctccaccgctcccgtcgtttctcagcctgacggcactcagacggcgagtttcgggaagcagcctgccttttcaaacatatatcaatctactgcgttcccgttattattggcgcagaacgcgcaaaaagaagtcttcacatctacatccccgccacggctgtcgcttggaaaactgctctaaatgccaatgatggccattagtgcacacatgaaagccgatgttttctaagcgaataataccaaggggaactccgggttgtctttggaagacgaaaaatccaatgcatgacttcgatgtaagtaaaagtgagctgaattgaaagcgagggaaagagacgcgaattctggcttgcttgacttcccccccctccggccccccgcctccagcgaagcgaatgtgtcgcaggtgaccgtggaagccccattcgccaaccagcagcgtttcggagagtgaaatcttgattctcacaggagctagaattctgaagcttactcacagtgttgtagggacgcgtgtgaagtgtcaggcattatttcactggtgggacgtggcggtgtttaataattcgttccggcatgtgtgtgtctcaaatccccttttcttcgccggcacttcgaggcggaacgggaggggggcacacgtttgctttgctgccaaagcagccgatttcgcgccccctcaacggctcaaaggcacttcaactgcacatgcatgcacagttcccgattcgtctgccggatcatgtgtgtgcatgtttgtatgttgtgggcatcattcacgttttccgtgtttatactggttcaagagcgtacattcaggaagttgcactaaatggaaaattggcttcctgtgtggacacaggacacgggggttctctttgtctcccttcgctgtgacgcgttttgttgtgatcaagggcgctgtttaagcgtgatgcattaagcggcacttcagtctgaatcaatcgctcaacgcgtcatttcctttccttttttgctaaggaga

SEQ ID NO: 2610 - DNA, 2299 bp, Toxoplasma gondii
  source 1..2299: mol_type = genomic DNA
ccctaactgacgaaggcaccaattctacactggagcctccgtcttccgcctcttcctcgtcagctgcaaaagaaatttctcaggagcaaacagagaagtctctagacgacggcctgagcattgaccacctgatggcacagatgaaacgtctgcaaagttaactggttttgtggaaatttaactttctttcggggaaaggagtgtttcgaaaccatactaacgcaacagaacttggatacggtaacagagatttgagaaagaaaactactcatcaagtgctgaggtttgttcatctgtatcaacgatagtggatgtggtaggttatttcacaacggttatgctctacgctttttttcgaatcgaatagctttttcgtttcgcacgctctcgtcttgcagataggtgcaaaaagcgttctcagtggaggaaaaccaccgtattcctgttgtgtcgtcgaacgcacacaacacctgccctcctgcagtctcgtggattaaaattcacaaaagtacgagaggtgggcgtagcatgcaacatgtaaatgcgtaacacctcaaaggcctgaagcacaaaccgttttagagtgcgggtcgctttttttgccgtcgcaagtacactgagttggcaactgtagcaatgatgtgtcggatatccaacctctctgcagtcccagcgagagcgcacttaaactatacaagggtcgagtattcttcttaaggagcaggtgtaaaaagcgttcgtcgtgttattaaacaggttccaggccaccagtgtacatcactagatgctgcgagtagcagagtagggtacgggctacacaatccctggccagtgcagcaacacttagtcggcggctggatttctcgacgatccaaagggaggacgattcgtggtaggaaattatcgtcatgcgtgcaagttggtacgcaaacagcaaaatggaacggaggcggcgcgcgaaaattaactttttgagcgctgctttcttttttctgcacgtctggtttaccgttttttgcttttgaagcgtacaggaagttatctttttccagtttcttgtcgatcgtcactctagccgaagcaaacggaaacgttgtgttttcttaggagcgtgttttctccgataaaacggattcaaacactcgtaggtcggagttgcttagtaccaagaagcatcacatattaccctggctgttgtaatcatacgtagtgttcacttggttccacttcactaatttttccacctcaactatgatttgcttacacaggataacttggatcaggcaaacacagacgttcaagatccaaaccaacgggccaactcgggggtctgttacgtcagaagaaacggtgagcgttttgtcagcacgagctttgttcctctcgaacagatcccagtaaatttttgacttcagagaaatcgattgctatcagcagcaatatctgttgaaaataacggcatcaccttagtcagtgttcgttcaggaggagaaaactgggtatacaaccaccttattctgtccccctccacaatctgacgacgaaaggaaaagcctgtcttctgtcgaagaccgtctgtatcggaactcttcgctgattgatataagcctaaaatctacccagacaagtaccctctgatgaggcaaaaaaatgcgttgctgtacctcatttcgatgcgctcaacgtgcactcaggaccggctgattgcagccggatggcgtctccccggctaagacacgaacagtcacttaaaaacatgcgtagagaacccagaacgaaattaccagttactgtttcgggatcgaggagaaaatgtaggccctcaactttctttggtgtttacttccctcgcggaattggcctgcgcccaccccgccagggaacgtcgtgtgctcccgtggcgtccctgaggagtgatagaattttaattttcggtttacccggttttctttcgaggaaactgttcggtctgtctggtccctggtttagttccacctttttttctgttttgcctgtagatgcttgcttgttgaagcaaaagatctccaacagtcctggtgtcttgcccggtgaccccgtagggttgtctaaaacgtggagcgtttcctaaaacaaaaaacactttgccaatcattcttctgttggatttgttttacctgggagtgccgtgtgtcactccgttgtgtgtcggtgggtttctatgccgtagcgtctcaaggtacctcaccgccagctacactgctccaaaaagtctgaagtcagttaactcatcgcatttgaaagagaaaagaagcaacga

SEQ ID NO: 2611 - DNA, 2032 bp, Toxoplasma gondii
  source 1..2032: mol_type = genomic DNA
acctgtctcgtctgtcgtcactcatggtatacggtcaatcaccaaaaaacgggtagttcctgatgctgagcgttttaccctttcttggtcgaatcctgtccttcacttctgttacaagcgcatgtcgacgcgcttgttctatctctctgtttcactgagactgtaactcagaagcaagaggcaacgaccaccgtatgcgtcaaatgccttttccacttaagaactttttcccatgcatcatatctcgactatgtcaacagtgctgtcgctcattctcgttcctccgggccgaaaaggctctttgcagcttcgtcctttttgtgagcacgaagggggcagtaaaaccaggcaatgcgaatcacaagctccgctgtagcaaaaaacatttcggaaacttttctgccgtgtagcgatggaattcgaatgatttactcaagaaacacctgtcctcgctttgttttcattttcggatgttcgattggtctgcccatctccttttgcaatgtcagagaagaacactacggcttaatgcggtcgccgacacaccggtgcaacgagcatttatttcgtacacgacaagttgttcggaaaagcattattctcatattttattgcaacacggcgaagcatctacctgcagtcacgattacaatattacatcctgttgtactgatccgctaccgaaaaaaattctttagggacagcaaaaagaggctttgtcaccgggtggttctattaagtcacatgaaccacgttaacgcgaacaagctgggatgttatggagtttcaccatgcgtcttttgctcctagtggacacttagaagtttttttcggtacagaatatacgccttaggttgcaagcatcccgtggctattctcttctttgctaaaaaattggtcaccgagtcaccattctcagctggtgtcaccggcgacgaggcgccgcaccgcgttcctcgttcgccgtcacagccgccgaacgatgcagcggtagtctcacatagatgccacaactatcgtctcaatgcagtaaaaaatacgattgtgttgtgtatacagatcgaggctcggtgtcggtgttctgggcttgattccgtaggactgaaaaccacgaggggaacaaccatactcgatgttcgttgtgtgcaaccgaataaaggtctgcttcatgcagtatcggggttcgcaaaagtacgcatatagagtggcaatacacctagcagggaacagtgggaaacccgaggtttcaattgtgatcgaatttggcgtagctatgaaggcatctgatgaagacaccagtgggtgagtttaccccatgaaagagcgtacctacggtcgcatgtggtccgtctgtatgttattagcctctgtattaggaagtaactgaatcgttaattcaggagtgtgtttcgcttgatttcgcatcccgggatgcgtcgttctcttgaagcgacccaatgtcacgcgtgtgccgtatacaaagagggcggcgggacgcgcatgcgggccctgtcggatatttgacgagtttggtcagcggtttaggtcagcgagccctcttctcttctgtcgctttaacttggttctccttctcgcccagcatacctccgtgtgaaactttctgttttctaaaccgcaaaacttcatgttcgccgcctctatgtcacctggcttcaatctggcccgccatccggtaaaacgtcaacgcatgtctgcatgtgctccgcagagcaacttcagggcgaatccctggggcacggcacgtcaagaagtccttctgttaggctttatgatcttatgattttttcgtagttgcccctacatggtcaatccgtcagtgtcattatagctggtccctcagttgttgcgcagctggtccccggtcacgcgcagcttccgtccctgcacgcttcgcatcaccagcaggaagactgtgcagccgtgttcctttctgagacgtatttcggcccttggatcatctggaggatgctgcattcgtttttttactgtgggttgtaaccagggaagaaaa

SEQ ID NO: 2612 - DNA, 1363 bp, Toxoplasma gondii
  source 1..1363: mol_type = genomic DNA
cattcctccttgcaaatgcatgtttaattcttcagaggcaaagaagacacgcaattggcttctcggtctcatctgtacgggtggctcttcgcgctatggtgagtccgctaaggaccacaacagctgcactcttatagtagtacttcagtagccgttgattcctagtattttgaacacctcccctggaaatacaacttgctccccagtgtccgacattgaaggcgaccgtgcgaaaaaaaaagaccaccaccgtcctggatcctgttgtcgccccacatgcatcttttcccaacaaacacgaaatgtaatcgcagactcctccacgggcactacgcatattacgaaaggagtagtcttttttatttttcccgtgctgcgagccccacttactttcttccttctgttcttcaactccttgtatgcgcgccggcccttggttggcttcgcctcgacgtagcccagacggacaaggcggaatcggttttcgaacttctttgccgcgttggggttgtcatagatcatcgcaaagccagacgatctgccgccaccgaaggcagttttcagaccaaaaacgacgatgctctgggagtcggaaacgcggaattgtttggcgatcttttccaccaactccttcttcgacacagagccacggctcgggtggaggatgtccacaccgaactgcttcctctgcagaagagggtttgtcttcagtttccggaaacgaagagagaaggcgcccgaatccgccatgttgctttcggtgacggaaaagaggggagaccggggagagaggaggccgggacgaggcagtaggtgacgcgagagaaagccagaatgagcttccgttccccactctgtgcacccgtctgtggttctcttgctaggacggaaaaaccgagacggaaaagtttcagggtcctttacttccgcagagggtgcgctttgcaatcggattcgaagtctctcctcttgccaagcggggaagtacagcgtcgaacctaggcgagaggggcggataaacagtctagcatgcatgcggttatttgctgcgtaaactgggaagtccccacggggtgtgtgggcgctgtgtggaggcggccgctgcatgcagagaaaaaatcgcgagctttgcttcgacctttccatgtggggcttgcgtggtcaggaggacgcgaaaggcagcatgttagggggggagactgcgggcgcttttacgggaagacctcctcgcgtttacacagtgttttgttgtctgtttatcggggcgggtagactcctgtttgctctctctgttgaacatttgagagttttgcgaatcgcccttttcccggtttcccgcccctttctcttcttcctttcaaaa

SEQ ID NO: 2613 - DNA, 3553 bp, Toxoplasma gondii
  source 1..3553: mol_type = genomic DNA
ggtcaacttcaatcttttccgtcacatcgcctggagcgacattacctttttgtgggtttaggtggtcattcttccatgaattaactgttgtataaggtccacgactagtatccttaggtactgggctgtattgcgttttttcgccgaagacgacgcagtccttgaaaggaagtcgtagacctagaattgttttcagcagttttgcgtgtttccgctgaaggaaagtacgcgctttgtcggcattgaggcggaagaactctgattttagccacgagttttgcaacgcagaaggcgactctcccttccttgtgtcatggtctccaatggttgaatcgccagcactacggatgtccgcaatcagggagattcgcttcgtcacttctggtacggatgccagccacgtaaggtttctgcgaacctcctgagaatagtcggactgggaaatcagctgagagaaaggaacaaaaaactcggtggcgtggcgataaagaagagcaaggaaaataaatagagggtcaaaaggtgtcgctgcaagaagcgccccgttccccagcacgaactcaggtgatctaaggagaaccgatgtcagtcccacgtcacgagtaaactgattcagttcatacaatgtggagtttgaccataaaaaggctacaactacgctcggttgggacggatgagggagcaaaatctcaagcagctggtgattagctggcttccactgcggggaggacagattcccagagctgcctggagcatctccttgaacgagttgtggttctgtttccttcgttccctcgtctggttgggcacctctttgccatgatgatatcagaagaattctcgggatcagagtccgaggacccagtcctccgctttctattgccatagttacggaaccgccaccaatgacggcatacagtagacacacagttcccggggtcagttcgtacacagtgcgactcagaaaaggtaacaggcaacgctacctagtggcattagtctgatgaagtgtggtgacgggcatatgcaactgcagggcaatcaccggctgcaaacggctttaccaccgcaccccgaaaagcaccaacacgtcaaatttgtcggacaagtctctcagcattcacgtaacactccgctagacgtcgacatttgtgaaactgttctggtcaacacgagttcagaaagtgcgtgtgcaatatcactgtggtgacgcaagaaaaagaaactgtggaaaaacctggggtttgtcttgcggtcctccagtgaggagtgtgcatgcaccggttcgctgccccctcgctacgactttccccgtgacggacaatcggtatctacaagtgtgaatatttgcaaagcaaatttgtttcgcacgtgatgggttggtggagatacgtcctctcatctcaatgcgtgcgcgctacaattgccgtaattactctatgtggtagacagcggtgctaaatgcgagacggcggaagcgtcaatggtagttcacagtgtcgtggcgaaatcggccgaggttgcgccgtatcattcttgaaaacactaagctttgatcagcagtggtttcagagaagagtcaggagaagagttgctcacgcttatcgccgtcaacattcagcagcgattcgctgacagtggccgcacttacgcatccccacgataaaacaaatcgaggccgttcaaaaagccgcgacaagcgccttggcccgagagacggaggccggtgataaaaaaagtatatcgaagccgtgtatagcttctggctgcgccatttaatgtcaaggaacacgtgagaatctcttggaattgtgatcacaacctccgtgaagtaaaggcacttgaccatttcaatttagagcgcaatagttgtagatgatcgtgttgttgtgaccagcgtttatcgattgtcagaaggcctacgataagcgttaaggcagattctgcttgcttagggagcttaatattcgtcgaaacgatctgaatttatagatgtcgtgaactcatttaggataagcgcgcacagatagtgagcatttctgttctcggaacttcgcctcggtcttcttggcaaaaaaggtgtcccctctcaaaatgtactgtgtgcctgtggtggtgtttctgtcctggcgtcgttgtttttgaagtgagacatcaaatttcaccgcctttgattacggcagaacagtcagatggtcacagatgcgacagggagtcagtgataccggtttctgataatatttccgatggtttttcgcatgtgtactgctggcgcgtactgaaccacctccacacctgcactatgtggacgttgtgcaggctcactcgctagaacgcgtaacgatgaaagcagactcctaatgaaaagtttcaggtcatttcactgaagaacacgcgatttctagtaagcagccagcgtcacatattagcgtgtcaaccaccggagtacagactgatcgttcagtggaagacggggattactaaacgaaagcaatacagagcaggagataaaagacagtcaattttgccacgccgtctcattcacccctttgtatcggaatgtagtggtgctcaccagctgtaccttcagtcactttttctctgatacatggtgactaaaaaaggaggccgtgtcggtgctgctcagtaattgtccgcccttgaacggtgggtcgaaaaatccccgaaaccgtattcacagaaagaaaaaggggtaccttcgttcaaagtgttttccggtggtgcagcttcgggttttttgagaaaacgaagacaattaatttgaatccgagtaaaggtcacagcttaaaagagagaaggtgcacggtttgcggcgacctgtgatactgtttaccgggagtgtccccatctagtgtcggaactgctctacctcacgtcatccgtggaaatgacgttttcttccgtcactgcacatctttacggctaccaaaacaccgtttactaatgcgcgctataaagaatcggagtctggtagacgactgcgtgcagtagtatctgaaaaatcactgttctaagtactgtaggatttgacaatcgagacggtcccgttccacctcacctgatctcgaaacttacttacagtgcactacagtgagtgaaccaaccaagtggaggagccaccggaagtcggcgaaaataacctagtacacatgcgttttcaacatttttcagagccttctacacgtcaacctgaaagcgggtgccgcgtcgctaccgtttcctgtggcgtctctagtgcgacatccgaagtaacagtaacgtccggcatggaacgccgacgcgggtgttccagtcgcctggctccttctactcgcacttcgatgttacgttccttattggtgcgacgcggttctcgtgttgctagacgtcgcaccggctgaaagctgtagaaaatttagttattttcctgtcagctagcttgcaggagtgcgtttttgtgtgttggtttcgtctcacatggctgctgatctgttgatgcagctgtgtacacgtgcctcgattctgtagttgacctagaacggatttgcaaaga

SEQ ID NO: 2614 - DNA, 3607 bp, Toxoplasma gondii
  source 1..3607: mol_type = genomic DNA
tctgcgtaagcaggtgatgtgcgtacgccaagtcgaggaaacagagcgagagacaggacctggaggtgaccagctgaagaaagacgacgcgtcaccggcggaggccggacagctgcggggacgagaagagggagagggcgacgctgcggctggcgagacgcaggcagagacagacggcggagcgtaaataaggaagggggaactgggcgttgtcatttgaaggagagactgcacgcggtcaagttcgcaggagaaagcagacgaacggagtccccaccagtggacggagagaaacgactcgcgcgtctttgttgtgggtcgagtcaaggcaccgagtcggcagtctgactcttttgcgagaagaaaccgacgcatgagctgcaatgcgaacatgagagagcaggcgcagtcaaggaaacagcgacgttggagtacgaaagcggaggtttccggcccgcagcggtgaggaagaacaggatagtggagtccgtgaggcggcactgtgtctgagagaaaaatctggttcacagacgagacagtgctaccccgcacatgtgcagactcgcggctgtatacgttcgcgtctttgccgttttttctccggaggcgaaacccagcggctttgaacggccacaggcagtggttgtgtcgtcgatttgtgagaggtcctgttctttcctcgaactttttcacacagatctccccgtcgtccccgcttctgagtgcatgcgacgcgattctttcctctcgatcttttcaggggaagaacagagtgtggagagatccacggcgtgccatcgttcacggtctcgcgtagccgctctgctccagtgaaaaaaaatgtccactggatgaagaacggcagtgaaggactccgatctgattttttaaaacgcagtccgagtccgcagcgacagaacatgtcttgtgaggacaataggagtccgcctgattcaccggaaaaccactccgctcccgggcatacgttcgcgcgtcgccagtcctcgcagttcagatgtggactcgagatcttccctttctgtgtctctatgtcttagaaaggcttcagacgacactccgcgggaagcggaaacgcctttcaagcaccgttcaccctcacagaaaagcacaccagggacgctagcttcccggcgattcagtcctttctttggggaaacacacttcagttctcgacgcccatgttctcttaaagaacgaggtgccatgcgacctaaccagtaactgaaagcggtctctcacagaacctgcagtgtccgtcgcttgccactccagagccgcttgcagacagcgacgtgtgggggattcgactttctgagaactgacgcgacatccgacttcttgtactttcagagaattctctcagtccagccttcgtcgcagttttcttcgagaaacagggaacttgaggaactaaacaaacgctttttcgagttctcagtggacacggaagtctctttcccttccacgtgcttgccatgtgtggcggcgtcttatcttaggggaagaaaacgaggttctacagctacagggtacactgtcacacattcagtgtttgagtctgcatgtcgcttaagaacgacctcgtctttgaggtgcgaaataagcgacggatactaaatgggcacctgtgaagaactcgtcttcagcacaacggttgacgcgcagcgtacggaaaccacggtattccgctgggacctgtctaactagttgttggccgctggcaaaaacgcctcctccactcgtggttcgtgtgaaacgcgttggctgttgcacagcaccttgtgcgatctgttgaactctacgcgaaaaagcgaaatcgcagtcggcctgcgacgccgacacctggaataccggcaagtcctttcaaccgtttacaaggaaagagaccgacacaggcgtgtgtccacgtttctgaaactctgtcgcgggtgtggcggctcctgcagataaaggaagcaagtaaggtttgtcggtgaagcaatcggatgtggttttcagagttgtctgctgactccccttccacacacctggaaaagatgtatttaagtgtgaggaggagagatacacagagcgatatcaacgccacagaaggcaagacacaatgcagtacagagcagcaaggagctgaaatacgcgcgggaaccgacactggtggctgttctcctgggctgacgacgagccgtgaagtcaggacagactccgaccgacggggctgatcgtgggtgcctctgaccagttgtgttctcttgtaaatacgagtggagacaggagtccagagagtatgcagtgaaaacataggcgatgtgggaaaccatcactgacgaaagtcagcagagtcgacgcagacagaaagaaggcgacggacctgattggccacaaccacccgtctcggacctgcccagctgtacgcattgatgcaagatgaatccgcatgtcagtcgggtaccacgaactgcctctcaatcagatcaactgctgtgtatcgagacgcgtattttttaggaacctgccttgtcctgtgaacagagagtctcgagagtgccccggtgcgctgctccctagtccaggctctctgcttcccggtggtcggaacattctacgaactgtttgcaggcacagcgaaagctcagcggcattccatggacagaaaggaacattactcgtgggaaagcgaaaaaagcgaaatcgagaacacttgtttctgtcagtgcccgcgagcccctgatcctcgagggtttagtgcacttaacatcgcagttctgcctgaagatttcccgcactgcagagaggggattttaaaagagaagctggcagcgaagggctggcaaagtctgtagaagcagaaacgtctctgtttttgccagaccaattccgaaagatccagttcttgaatgcttttccgctatcggcaagtgcctctctctcggctcttggttctatggtgtagcggttagcactgcggactctgaatccgcctacctgggttcaaatcccagtaggacctctagctgttgagactttttcctttttgacggagagcttttccacgagagaggggaaaatactgttcagttacattttcttactcgagttttggagaaaacttcccagcaaagaaaggaagccgacggaaagcctctctgcggatggtaaacaccacagacgggaacacggcgagacaacgcggctggcctttttcggcgcttgcatgcagcgcaagtttcgggactttcctgtcaagttcatctcgacaaagacaagcgtgcatgcatatacgaagatgtcgacgaaatcaattagggtatgaagttcgtgtttttgacagaatagacgtttcgaatgtggacgtcgagccgctgttctcacgttgcgaaagccttttcgctcgcctgctgtgcatgacacctctgccctcccttgcgtcctcgtcgtcgaagtgcaggacttcgtttcggccgccttccactttcaaggaagacgaatgaaaactcattttatgaaactggagtggcgctgctctttctgtgcgcagctttgtctctgcaagtgaggtttcccgccctcgtcggataagatattcactgaa

SEQ ID NO: 2615 - DNA, 3646 bp, Toxoplasma gondii
  source 1..3646: mol_type = genomic DNA
cgagcataccgccactcaaaaacagccacttgtacttctccgtgaagtggtccttctgaccgacagtccagcagtccggcagggtgccgtcatcgcgcgtctcgagatcgagtttctgctcgtctccctcgctttccaggtcctcagaacgcatcgagtacgccacttgcgcaagcgcccttctgtgaaactccccttcgtcgccttcggtgtcgtgattcgttgagctgcccgacgaccggcctgacttagacacgaagaacccagtgtccgaggcgcctaggtccgctcttcgtgtctgctcactggtctccttcagcttgcccaacggccccggtctgtcacgcaggtcttggcgatcgcgggaagtcaagaataaggaactggagacgctttctccgaggggactgcgttgtcgcaggccgtcgtcgaggcaccggccgcgtggacaaggaaccaagctcgggtcggcgcgcccagcgaaagacagagatggcaggccgttgcccaaactcgagttcctccgacacggagacagtcgatctgcagagagacccggccgcagggattgctccaggcacagcctgtcgaatgcgcgcgcatgcattcgacagccgagacgtaagtcgccgtccccgtcgggttcgccaacgcacccgcatgccgcgaggcccgagtcttcttctcgtcggcgctttccctctactctgccggcgacttcactcagcagcgcccggacgcgtctctcttctgcgtccaaataagcctttcgccgctcggaagtcaggcccctggaagcttgccagtcttgttctcccaaggccgcttcacccatggaactgcgcatcgtcgctggaagctccacgcgtggtcgcttctccaccactgccgcatcgtctcttcctcggcgttcttcgtcgctgtcgaggtgttctgccggactgcgactgttcgtcgcacgcaacggactccgagacagcatcagggcgagactgaggcgcgcagccttctccgaatctcgctctcttagtcgctcgagacactcagctgcctcgcgagtcgcagcgcactccgcaggcccgtctcgcggacggcatgggtggcagagacttgcatccacatcctcgaacggagacaccgccgcgcatgcacgcccctcgcgagttgatccccctgccgctcgctcgaggcgtccgcgttccgggccggtctccggtctctggtccagcacgagcttcccagtcgcggtctgcgagaaggccctcaggggcaggagctcgttctcatccgcaagcggtgcaggcgaaacccgcggctgaccgcggcctagcggcaccgtgcctcgggtgtctctaccctccacggagtagcggcgcaatgccgaggccgcctcgccaagaatgcgctgtacagaccgttcccaagcgtcttccgcgagctcgtctgaggcgccggggcgagctagatcgtcggagccgtgagaccctagggcctcctcggtctccgcgcggcgctggccgccggagacaaactctgagcggcgggtgcttcgcgctctgtcgcggcgcggggggcaggaagaagaagcgtacactgcctgtcggtccgaagaccacgccgcctcccaggggctgtccgagtcgtcggcagaccccctggagactgtcgagagagcgcagttgcaagcgtcgcttgcacagcggccggtgtctaacggagttccggacgcacgctgggtgtcgcaggatcgatgctccaagaagcggttgcggggcggggagaggcaccttttgggcaggtggaaaaagtcgctcgctgtcgtgagcaggcgctcgagaacgcggctgtcggtcgaagatcgtagcgaagagaagtcgggcaaccccgccagatcgcactttccgaggcgcgggtcgaacgctgaggagccttcagccggcgacatggagtccggagagacgccgagcaggcgggaggaacccgcgtacgtaggcaccgtgtcttgctcctccctctgtggactcgggccaagcgattccgctggaactgcactcgacaggcggtgcccactcgctttgggcgagaagcaaaatggatcggcgcctcggtcacttggcactcgagcgggtttgctcggcgttccccactgaggcaagaccgcctcgaaagtcggcagcatgtctttccaagtgctcggaggggcaggcgcagcagagcttttctccaccttgtcttcggggggtttcccgaaggctgtatcggggacgggtcctctcgagacgggagcgaagggcgccgacctgaacatcttgcgtgctcgacaggtccctgggtttcacaggaggcggcggcgcagagaagaagctccttgcgcgtgtggaaggttcgtccacgatctgaggggggaattcagctccgtctgcggagccagagagacagaggccagcgacggaacaaggccgcggtgctctgctcctgccacgtctggaggaaagccggagagagacgccagcttcgccttctcagccgccattcaccaaaggcttacggcgagtcaggaagagaagacacgcctcaaatccgctttttctgccgcgagaaaagcaacccattgccgggggcggacgccgaccgaaacgcggggagccccggtggctgagacgccaccagccagaaccgggggagcgaggaattgagtcggccgtttcttgagacgaggagaacgccgccggcgaaaatcactggacagaacaccaccagaaaaagagcgaccacgcggagtagacatcaaatccgcagctctcccgctcggaaaccagcaagttgcgctaattcacgcttctgacgcgcggacccgggtgtgcccggaggtggccaaatttgtggagtttcctgacaccgcggaacaatgcggactgtatttgagcccttcctcctcccgaactagatattgaaccaaccgtgaatacaagagggccagaacccagcccggttgctgctttgacgactcgacacagaactggggggaagcgtcaattccgctggggcagggaagcgcgcgtcgaaaagccgcccaacctcctcaagggaacgagatctctgcagactgccggcggagagacatcgctcccagggcctttctacagtctttctccgcacatcctcctggaaagcatccggaaactcccgcgttcgcctcccgaagaaagcaagaccggtacggccgcaggcaaaaggagaaagaatgcgagacgagaagcgagagaccactcttcacaatgcccgccccggacggcgaatggcaggggaaggcgggacgcactcaaagagagaacggaaacacgcgcggcactcttgtagctctgcaatgcccacagaaggcgctattctcgagtttgccaagtaaatattcgaagaatgacaagaagtggtgtgtccgcaaaacgcgctttgggtttgcggggagggggggggagtgctctgcgctccccaacagcgccgtaccctcagtttatagcggccgttcccacgagaccccgcaactcaaacaggagagcgtggcagcgaggagtgaggcgacttcctggtaacagcttttgagaagaatgtagggaaaaggtgggctactgcgaaacagaatttatta

SEQ ID NO: 2616 - DNA, 2453 bp, Toxoplasma gondii
  source 1..2453: mol_type = genomic DNA
tgtgtttcttcttactttttggctttagggttacacggaaaggttcacgcagagcggcggtccgccggcaggggtgaagacagaaaggaacagggatccaggatacctagtgaagatcacgtgtcgagttgtttgcagtggcttagtgcacgccgccggcttcgatcggtagtcttgccaatggcttccggattcctggaccctagaaacagacctgtagcttctgcgtcgttttctcctttgtacactgcgaaaggtcgcccaccgatttcctcccctcctcaggaacccacgacagattcggggcacataccagagcatttcaagtgcacagatgtctctacattgtcacctagttcgtgtgtagcttcagtagaaaaccaggaagcgcagtcgccatcgaacgatgaaaacgctctgttttcttgtgccgactcgtgctcttttccgtcccggcggcctccatcgggagcggcaccgcaccacgaaggacaggcccgccaggagagacgaggaatctctcaaaaacgtcaagcagcagttccacaggtcgcatccggaaagcaggttgttcgatcagagaagagaccagaggaactgcagcgcgagagaagctttggcttagcagtccatgcagttaggtgcgttggtgggagggacgaagaggtcgcccttgccgtggttttgcgggcgcagatggcggaacgcaaacggcgggaggccgcaaacagagcccagcgcgagcaagcagaagtgcgggggcgtcagatgcgtctacggcagagtctgcgacgcatcgaaagcttgaaaagaacccaagcagacaaagtgaggtccacgcagatacagatcaaccctcagcgcgtggatagagccgcggtagcccgcctgaacgatgccaactttcgcatcccctttcccacaggaggcacatgtccggtgaaacatgtgttacctcttttggaattcgacggcagtcacacccacaacggggactacaagtgccaggaacggaatgcgaagaaatacaactacacggatggtcgatcgctcgtccttgtggctcgcgccatgcccgctcccgcccgaggggttcctgtgaaatcggggaaacagagcttcttctgttagccctacccacaggaggcgctctgtaggccaggattcaaaactgacaatgacctagtgacctgatgcagaaagaggaacccttggagaccgagactgaaaaggaagagctaattttttgctcgttgtcaacatctcgaggcctcaacaccttggggggcgaccacgagtttccactgtaacttcccaaccagcattggtgatggtagactggtgtcttgtcgagttatgacagatagcagatgtcctcattccccttgcatgtgcgtaaactccctgtttgtcggtactgctacacgcccatttatttcatggtaacgccctcaaaatcttgaagtaagaccaacaagacacaatccgaaacaaagcgtgagtcgcacgactaacacactccaactcccgacttctaagaacaggatgtaactcgtgattccaactgggcagccttatacaagaaaatcgggtcaaattgcacgatgacgacagtcaacactatcgctgcacatcttccatagaactcagtatgcgtcagacaaacgtttgttgatacctgcgagccctgaacacctttgtgagatgatcttgctttggtataggatatcattcactctttacagtaatttgagctactgccgcacatagcctttggctggtcccgcaccttgttcggtgagaccgtcgccataactcaagttcgcctttccatttatttccatacacgtggaacgagtaagaaacgtcattcttctgcattagcacttttattgggtttgtcgatgagacaaagtacacgaggttgaacgtagcccacccaacgtgcaagaacggatatatctgcagacccccgttgccgctgccatcgctgcggataccacgtatcccccaactttggattttctcccaacggaacgccagattctggcattttgctcagcacaaatcagtgctgggagtggaagccaggagaccaagaacaagttacgcttgtcaagctctgacaccgaagaacgagtaacgttttgtttccaatacccccggcctttaaggactcttcgcgtttgtgaactttttttcgcctgaaccaacgcttttccggcgtgtgttcgtctgtctaaaccctaattttactggtatttgagacgtatttccgtgttcctgtgtttatttgacgctgtctcgcacagactctcccgttcacgtgtccgtttttaaggcgcccgcctcgtcttacagtcggctgtgggtcgccccagaatgtgtgcaaatttttcgaggtcttgtaattttctccgcgcgtggtgcagatgtgggcttttgcacgtcga

SEQ ID NO: 2617 - DNA, 3867 bp, Toxoplasma gondii
  source 1..3867: mol_type = genomic DNA
ttcctgagaatcacacttctgaactgctctccacgggtggcccaccccaccagcacatagaccgaatcgtaaactggtatgtcttcaacgcgggcatctggatacttccacactgcagcaaataagactcctacctagtgtatagatttataactagataaaatatgtgtatatatattgatagtagatctttacatgttctgcaagtgctctttcgtgagcggtgtggctggcaagacgatgcagcagtggagactgaggctgcctcagaactctgagaggagaaaacggtgagcggcaacgctgtccatgttctttatttcggacaaatgcaacagacggtagcaatctcaaaattcgagttgcgggcctctctccaaggcgactcagagacttccgggtcataatttgtaatgcacgcgacatatttcggcgcgtcgtctttagagaagagctactgtattagtgttttcgtgaagccttttgtgggctgcttttcttccagttcacactgctgccgctctccatgtcagggagcgagaatagtcctagagtcgcgtcttagaaccagcggcaagtgcgtctgatatatcgtccagaaggagtcagaggctgtcgagcaggggtgttgaaagaacgtaggttggcgtctcaacagcggacagacgagacaaagcgagtttcctacgccgacagaaggcgtggcggcagcactgcacaatgtacgcctacttcaccacccggtggcgacctgacactttcgaatttccccactttctcgaatgcatgcgcctacataggaaccgaaaaacaacacagaagaatgacaccggctgcagcgcgccggtgccgtgtcccctctctccaactcgtgcgcttttaatgcagaaacagaggcattcagagccacgggcgtgtcctacatggctccgtcccgaagaatgattgacgcattgggtctagaataccagcacttgcatatagagaagattcacggatatttgtgcttttagaagaggcgataactgtactgctgcatcgatgataaccgcaggcagattcaggattgaatcatctgctcaagatccacccccggttcgtccatgatgctgcttccagcctctgaggtctgtttgcctcgacagcagcatgcaatcggatcgattggttcacacacacacgcgtcctctttgtttccacacaagcatctgcaaggccagcacaggcaacagaaacacacgccacagaccatccgccccacgcacgtgaacaaaatcagaacgagcaggacgacgccgcagcacaggcccagcaccgagccaatcaagacgccgccgtccaacatgaaggctcacgacgaagggaaatacggttaaaatcttcgaaggggaaagcaggcagtcttacacttgaagagcgtgcgatcgcgtgcacagctttatcaacgtgtgcgtagtgaagagatcgaatcatgctgcgtaacctcttcgctacgctgctgccaatggagccggcacggtttaagggggacttagggggtccagttcctgggagggaacctaagaagcggctaccgcgtctacggaaggtaccaaacgtgtaaattaccccgttctggttgagaactggcaagagaaacgacatcctaaatatttaggcttggagtcgtacgagtgcacacgcatttcaaactagcaattggcagacatggtggatgtcaggcgacggtaattccacctctaaaatcgttttctctgtcgcctaacatgtgaagctctgcaggcaccagtccgaggccttctctagagaatcgcgtctctcgacgcatgcgctgcagtgcctccttgttactccgaaacttgaaccaaagccggaccgaaatcaatcgttcgttacggcgaatatcctgcgcatcgaaggcgactcgaatccattcctaaaacgcgaaagtggcacggctgttcttcgacagtgtgcactgcttgctgggtgcctccgaatgaagactgaaacatgatcacagatgcgtgatccttgctttcgaagcaaaacaaacgggattttttgacaaacactgggcaggtgaaactgcctcctcaaaaggaaaaatcatccacacgtctactgacagcagcgatctggctgcgaccttttattgcgaaaatgcatatagcaacatttatttcgttacagctgtacgtacgtgcacaaatttcaatgtatcttcgtacaagtatatgcaagtgtagggcaagcaagggtgaggacactccttgacccgagagcggtgtgggcgagacaaacatgcgctggcaggaggcacgcgaaaaaggtttcctttgcttttgtgttgcgtggtagttgggctaaggcaagctagggcaaatctcggacgccaaaggacacaagaacgacaaagacagacgggcgaccagcagcggaagacaacaggagcaaagactcgcccgagagcagccgagactcacagcaagcaagggaaaagtcgagggcgcaagtgaccgcctttctccttcactttcggcgtgcctttttaactgaaaatgcggagaagggggcatcgctgttctggtaaaaccgagtcaaaagggttgaagtgtatctgtttctcctcttcagtgtgtgtgaaagccggtgcgcggcaagacagcacagacttttgaggcttcacgaaaagatgcgccgccgatcaaacagcgagaactttaagacctcaagcgcgccttagggcgcgaacagcagagagaaaagctgcgtgctagaggaaacgaaacccagtcaacatttgtaaaaccgccatgttttccggggttatttatttttatacgagaacccgcaggacacagctggagagctgttggggaaaaaagcctttgtgtgtgcgagtgcatgtgcaagggaggtaaactggctccgccgctcccctgcgctggcaatttgccattcttacagctctcgtttccttccccttcctgtcgctatacgcttttcgtttcaggggtgctttgtttctgcgagaccagtgccttgccccttctcgtatgtcaccccgtctgtgttccgggatgctgctgcgtgcaccgagtctggctcgcttcgaggaaaacgaacgagtgtgagtttgactcacttctgctcgaaaagtcaaatgcgtgtttttctccactggtaggacaaatgtacttattttggccatcaacagacgcctgagcccacactgctgcacatccgcccctgttagacaggtcggcattgctttgctcgtgtgtgcgcggcatctgcgtgagacacaactatccagtgtgcacatgcttgttagtaactatgcgaaagagccacaaaatccgctgatcatacatctatgcatgcttgatcatgcgtgattcagtgtcagcaagtgcgagaaactgccggtttgccggcaagagtcgctttttctagctgcatcaccaagagaccaactagaggaagtacatcgtgttcgtcgtcccgacatctccatttcctgtgtgtctgcgtgctttgcttttctctcaaccttccgtttttcgtttctgttcgcgaaatgtcgatcgaacagtgcaattctctgttgtccctcactgcgtttgccaatgccataagacagttacgtcctgtcacacaaatcgccatcattccccctgtctcttccacgtttctgcacaagcacctcacgtggtcggcggtgctcatttgaatccttcgtttctgtgttctccacgttccgtcgcttcccccccttcccgtacaagcactgcttcggttgttttcggcaagttccttcgcgtctggtttcggtactcaaaacgaatcaggagcggctgagaa

SEQ ID NO: 2618 - DNA, 2614 bp, Toxoplasma gondii
  source 1..2614: mol_type = genomic DNA
cctcagtccctcaggaagttttcgtcctccgctttccttgtggtctctgctgctcaggcctcgagcgcctgggcgtctctctgcgtcgccacccgcgtctgcgagactctcttctcctcgagccggtcgacgcacgcagaaggacgccgtctgaggagcaaacttggggatggaaggggagggcgaaccgagggaacagtgaaatggcgagagagctgaacgagcagagagtccagggaggcgaggagcgaggagaccgaagcagagatagcgaagaaaaggtgaagcaagaggaacgacgagcgagcgaggtccagagagaaggaacatacgaggaagagtatcgggtgcgagagagcgtaggacggcggtcgagggggagagaaaggacggggaagactgagagtgcgaggaaagaaaatgagagaagaagagtgagagaagaggaaataaggagatcaagagggagaatgagagagcgagagctgaggaccctgcagggggtacgtgagcgttaaggaacagggaagctctgattggcaaacgcgaaatggaaaggggagaaagccggaaacagtctgtgtcactttttttctgtggatgtctgtgatttattcagtgcgtatatcccgtgtagtcgtgattatgacttgcattggttgaatgcgccgggaactgtggtgtcgcgcgccggaattcctgactcgcgcctcgaaaacttttaaagagaagaagggagacagattctccggacgtccattctttcgaagaaaaacggatccatggcttcgcatctcgcgacttggtgatgcccggcggccgcctcaagtgtctccggtgcaggttctttcctcccctgtcacagggacgtattcagaggatctgatcccgaacagtctaactcgcagtacagattttcatatcaaggtagcgtctgacactgcgaaaatctcatttggagagtcgcacagggactcgagcttcaggtctcaccgggtcggtcctgccccgccggcaactttttttccgttctactgttgcctcgtagtgcgtcttcgaacgctaatgataaatgcatgaagaagtaaagtgtgcagcgttcccgattctcccgaacagtgcagccactgggtccctggaaggtctttgctagcgtacgatgcagcgttgaaatgaagtccacccgaaaccagtgtttcgctgctgaatctcagtctactgtcacagttatcaaagcaaaaagacgtacgcaatgctacgtacgccgcatgtttgcgagagcgagaagcgttcctcaacacggtgtgaaagcgccgttcaagacaggaaggttgttttctgtgatggtaaagcggcagtcaggtgcaggggctgttcgcgggagctaaaaattgcagttcgtttttgctctgcctccttcacaggtttttgtggactttctgctcatgtttcgaagaatcttggcgagttctgcgcgccagagagagagagacacggacagccgtgcaatcgaagttagaagccgcgtgcgacggtgccttcaacgagttgaacgtcgatttttcttccgcagagaaagcgggagaaagagcatttgaaaggaagcactttcgctttttgggttggttgagaaccttggcgcgttggcctgcaaaaatctctacgaggctctggagtttcgctcgagtcttgtcaaattcacccctcccgaaccttggtagtattccccgggaggtccgcgaccggattctcccgcgtttctcgttgtccgtcgactcacaggtgtgcggagttccattcttttcctctgttttgcagacgtcttgaagaatcccgttaaactcattaactgcacgctgcgacactgtccgtgtgtgtttccgtcgtcgtcgccttgccgttcgcgcggttcgcaaagctcccgcagctcctcggcaggcagcagaacagagaccttttctcccaactctcgaaaaacggtgtcgcttttcagattaacaaaagcaaagccatttttcttgacgcttcgtccactcgacctcggacgcacagagacaaaggtgccgtcttggtggagaaaaacatggaaactgaaggactagccgtatacgcgacgagactctggaatccacgaggcccgaaggcacttcctgcctttgggatatgaagtttaaagcgtcaccggtctccaggagctttccaaaggactgaacggagacaagccaagtttccaagagacaatcaacttgcgcctccaccgagagaggcgccacaagaacgagctcagtctgcgtcggcgacaggtcgtttgtgcagcggcgagtcgagcagacagaaggctctccaagtttctgtgggcatccactccgatgcggcactgcagaggggctctcgaggtccagctctctgttgtttttctcaacagcgacaacttctcctccctttttctcaattgcccctctgcctctcccataaacggaagaaactccaaaatgttccagagagacagacaaagccgtacatgtctctttccgttccctccctgagcgtcagtccgcgacgtttccttcctcccttctctccactcttctccctctccctccccctgccgaga

SEQ ID NO: 2619 - DNA, 1407 bp, Toxoplasma gondii
  source 1..1407: mol_type = genomic DNA
ctttgtcctgtttgcgctgcttcttttcacggagttgcgcttgtacccacgcttgcacactgcgacgatgcctcccgctctcttcggcgtcccccttgtccttcagatcatcgagaacagttttgaacgtgtagtcgattccaagttcctttaagcgctgttgtttcttaagaccagacacaattttccggttcacctgtcttgcagaagccatctctccttctgctttattgtgcttaccagcggcaataagccgtgaaggagcccttttgaacttcttgtcagcatttgaaaacaccttttcagacagattttgagggggaacaacgtgacagacaagcgttcgcccgaacatcatgtagttgttcattgcctctgcaacaatatctgcgacttcaggtaactcgaactccacgaaagcaaatcctttgctgttgccagttcgtttgcttcgccgtaattccaccctcgtgaccttcccgaactgtgaaaagaactttctcagttgaggctcaaaaaagccctgtggtaagtgtcccaaatatatgacgccgcggtttgaaaccagggattttttgctgcgtgactgctccgagcgggtgcctgtagtcgtccttgaccgggattttcctagatcgtgtgtatgatcggaagtatctggccctcctggtgactgccgtgtcacggatttcctctttgttcgcacatcccctgatggtcgtttcgtcacacctgccgccttttgtttacttgcatctgactcgtcagccttcccctcattgcccgcacgttgcctctctacagcaggtactctaccgcccttattagaagttttgatacttccagaggtcgatgtagccctactcctatagtcccgcggagacatggaggcttttgccgccttccgcgacgatttcgtggaaaccgcgcctgaggacgatgccgcaggcgtcatggtgcaacactgaacaatataaatgggagaaaacgtcgaggactgcagagatatcgcaaattaaaatgtttccgtggataaaaagatgcaagatacagtaatttcggtaatttaagtcaagcgacagccgcttctgtggggctgcaagtcctcaaaacaccaggatgatggaacgcgattgaatggcatgaactgataaagagacgtagcggagatgaaaatgtgaagatgaaacagccacactcggtgtgatagctcttcagtggagtcaagatagtccgtactagcgtcgtgttttgtcggctacgccgcatgctaagtggtcggccgccctgcatgcagactttttcgcgtgaagtcgcagtcaactgcgcaggagactttggtgcaactccttaaaatctccttttttctcctctgacatcaacactgaaacaggcgggaaaggctga

SEQ ID NO: 2620 - DNA, 4728 bp, Toxoplasma gondii
  source 1..4728: mol_type = genomic DNA
gcattctgaaggccttcggatccggcgcgacgtgaacaagagtctggcccgtctgctacaacgctggacggaagccttggcccccgaaaagcaaggacgcggccttctcccgcaccggcgtcaggtcccccgtggtctgcctgttccctctgccattctgcattctctgtctctcttttctcccggcctccaaatccgtccggggcaaattcgaagtcggaggacgtggtttgatggtccaaggcgggcggcaaaccgcatgcgctggcactctcgccttcttggctcaaaagcactgccgacgcgcagccctctgctcgtccctggtggtctctgccgtttgagaaagcgagagcacgctcttcgtctgcccgctctgacgagagaggctcaccctgttcccggtggaagctgctgtagcgggaggttaccgaagaaggcggctccgactcttccggaatgctttctagaacgtgtgcagagtagcacagtcggccttcttcgtcgacccaggaaggcgggaggtagacgggtgaccgcgtcttctctccgcgcatggtttctcgccgccggcgctaaccgcacactgtgctcgaaaataccattccggggttagtatttccttctccctacgtactcacggcatgcaataccaggggggggcagcaatgaaggcggtctcgttccattttacggagtcgttccatggagtcaaaaagcaaatggagagacagctgatgtgtgcggtgttaaaagcaggtgagacctttccctggctagttacgatacgggagtagttcacgtagccaacacggtccgcgggtcttggtttaaccgaccccagttctactgtgctagcacggtttagagaagaccactttgtttctcgctttaatccctttgtaaacctccgcaacggagacacgccccgcccaacgcatctagacagtgccggcgaagagtcacctctcgcgtacggtcggggcaggtgccggcgggccgccgcctgacagctagagtcattgttttagcaccgacacagattggacgaaacgggaaaagcgcaagcacgcactcaattgagagattgtggagaacgcgggaaggcggaaacgcggcgacagaagggtaagagagtcaccaacaaggaaagacacagaaagacgagagccggcttggaacgaggagtcaccctcaatgagaacgcaaaatgtagctacacgaaagtcatcgaacgacttttcagagggttccttcactcgaggaaacagactaaaagagggtttacactggaaggtagagagaggggaaaaacaagatctctcgagtgttgaggaacggcggcacgcgcgagccagttcactgcacgcgggttccgtaccacgtttcaaagaagaccgtgctgggtagggagtaaatggacgaaggatcgtttcatagtattcatcgacaaaacaaagaagcgggtgagtgaaaaggcagataacgaagaaggacgcatcgataaaaagacagccgcaggagacgagagatgaccacgctggagactcgctagcggatctcgtttctaggcagcggacgcgcgaacggggagcgcatgcggcctctcaaaaaaacagagaacgaaaacgactctaacgcatctcaagatcggaaaaagacgctgcgttctgtgttcaagaggaaaggacgacggactttttgtatgtgtagagggtttcccgttccccgtgtcgctggcatcacacggagcgcgcgagacagctagggtttgtggagtgcgattgcctgggctggcgtttctatcgtttctacgtggcacaaggcattcaaggatcgcgaggctctttgttcataacaagagattaagacggacactggtattttctctccttcatgaagaggaggagggagtttcgtttaaagggtcttactgtccttgtttttcactggcgcaaaacgacagcgagtcccggtcaccagtcatgtgtcggactcgtacgcgtccggagaaaaatgaaggagtctgtgcccacgaaggcattgctacgggaacatgaaaacaggtcccttctcttctagtgaaatgcagtgcttgtatgagcagcttctgctccacaccgtgaagaaactggcgtgtgtctggcattgtgactggagagacgcaaaccgagtctggagccgcagcgatgagactgaagccgagcaggaagggttagttctcgtatatggaagaaaggagtacatgcacactgattcatgtgtagaaatgcaaggtaaggaagaaccccgtccagtctgtcgacgtgagggaagacaggcagaggcaagtgtggagactttgggttgctcttcaccagtcgtgcatgaaagaaataaggatccgccttagtctcaaacctgttcatttaaaagcatatgccgacgaatctaatggcggtgagctcgttcacgattccagaagctggcagggctctgcctcttcatggatccctttgaaaaaagaaaccaagaacagagctttcccttcaaaagaagtcgcacgcctgacttcacacacgtcaaaacatccggagaatacagtcgatccttctcggagagggagggaaaggaagtctcctaccactttgggcaattcgacacttttttagccgaatacgggtagccattccagcaagcggcgcacagacggggacatcgtttcctcatcccgtggcttcctctcctatccccttgtctttccgcttctctgtcaaggctttctttttgttgtatcttctttgtccgcattcattctgttacagagtggtctgagaagagcattttcttcagtggaaatatgttcggatttggagggcgcaagcgataccacctcaggggtagaagacctgggtgaagcaggtttgtgttcaacgttttctgaaaggtgtgtgaaacgaacatgccctggaaacagaattagcaattaatgtctgagagagatatcgaccgactcctctcggtacctgggactcgagtggaaggttcacttgagagatttcgtttttcgatgaaggaaagtctgaaagacacgacttaccattgccaaagatagtgacaacacagggcacgtgaacacaaaactcttgagtttgtcttcatctgtttcttattcatcgcgtttcccgctttcttccggttccccatcttcccaccccagtccggcccttctttgtgttcttgcacaggggagaacgagttagagtgcctgtactgactggatcgacatggcctcctgcaaacggagactcaaagaagtaacccagtgccgcaggtaaccggtagaagagacgaaggacctttccataatagttgggtggccgaggccaccctgaaactgaaagttccgccgaagaaactggtatgggagaaatgtagattcgcagaaactgggacgggagcaagacatggatatgttctccagcgtgtcaatgacaacgaaagaatcatgtaccgtgccgactgatacttgtcaaatacttcctcataaaattcgttggccctgtcgctcctggtgaccgcgcaagtcttatttggtttttcagcgacccctgtcctgcgatttccacaacgctgatgaaagctaaagcgacaaacagagctttgtctctgctctggtgactcggtgacaatgagacacgcctgtccccatcgtgttcggtttgctccttacgtttgccgcttccaacaccaaagcttgaggcagatcttttcgttccgcacactttcagagcagctccctcgctctctggtcttgagagagtttgttgactaaaacgaagatggttttttcttttttctgcaagtaaaagtttgctgcgacaccgtggagcaaatgtgccctggcgcacatggtagcgggtgggggggggtcgtctgcgttggcacctctacgcgagacaggagagaaactgagactagaaaagaagaaaagatcgtccaggtccctcgtccgaggcatgtttccatttttattttgccagttgctccacattggcttcaaggaatgacgagaaccgggtgcagcaaaacgtttgcaggtgactggatagctacgcgccgcttggcactgtgacgacctcaaaagtaccaccagtagtttctcccaggctcttgcttgccatctaccataattagacaagcataggcttgctttcccgcgctttcccaaagcaaaaaggtgcttttcgcagaagaaaaccgtttttctgcacctctttcacgtacccattggcgagatcgccgctacttccgcctgtcctagttgcactcttcctgtctctcttgtctcgtgctcgcacacggaagcaagaacggtcaagagcagatataacagtcttttctgtatcaccctctctacgaggtgactctctgatttacttcttgtcattcaccgttaactaccgagaccgatttgcccggtctgctccaggtcacctccagcggaaagagaaactcatgaagtgttgggtcacctacgctgtcgttctggtcgtcaggacgaaacatgattattccacatgagttatgttccaagcgtaatatatggattactgctatcacttctattaacatcgagagaaaataccactcagacgttagtacgatcagtaccgactttcgggaagtaactaactccggaaatcatttataagcctttatgcgagctttctcgcgagactttgaaga

SEQ ID NO: 2621 - DNA, 2627 bp, Toxoplasma gondii
  source 1..2627: mol_type = genomic DNA
atttcccaggcatgtaggtacctaaggaatcaagaactcatgtttctcgtaggaccagcaagtataattgtcagagctcagaagtacgcctttgcgtatctccccctcgatcgagaggtatcatctgatatgctcaaatctgcattcatgcgttcagttgcatgtgtccatgcatgcgggacttctgtgttatctcgtctggcgcagccactcagtggtctcaggaggttttcgctttgctctcggtcctcagtttgatctcaaccatatcaaccgtcagcaggtaggcgattatctgcacgcagcgtccatagtttcaatgttcaaattcatatctgcccgttcattcacttggaaagttcctcctccgtctcgtgtcacgacttcagtcgttatggtgtccattcgctctctccatatatgtatctatgtatcgtgtcgttttggtccgtctcgcttttatccgttatctagctgtgttttcttttcttccttcctcgttgtcgttctcgctccttcgtttgctgtcccatcgcatgcactcatattgatggctgcctgcaactctctttgtgcagtacgaggagtacggaacgtcgtttctcgagcgattcagcgtcagaggtcgtctgagatgagtcgcgcggtgcgcccccaacgcagagaattcggaaaccatccgatgttcaaatatgtggaggtggaaatatgaaaacaaacatatgtcgaagtccttgaacgtcagcgcatacctacacaggcaaatatatatatatatatatgcatatatatatatatatatatgagtgtgtggatgtgcatgtctatgtcgggatagatccatgctggtgcgacagcctaaacagacgaaatcattcgatgtgcacacctatgtaggtcatcctgtcaggaaaatatgattcgaagtttgagggaaatgaagcgcctatggcgatgtagcatttttaggcgcatgcgagttttttgtgctacaactggcactgcctgcctcatctcatttgtcgatcactcgggcgaaaccatcgtccggctttcaaaacgctgaaatacaacgcactgatcgaagacccacagtcactacgtgatgtgcccatgcgggggacggagggtagagatacaacacctggctagtattatagatgggccaccaaaaatccctgttttcttcagtcacgaatttaatacagatgcccatgggttcccacggctgagagattgttaaaatggaagacaaacgaatttggctgatgttctctccagacgttgaccctccattgttcgcacccacaccgtgtcgctttcaccgcgtctgtcggagcaactgaaatcccaaacctggagagatgattggtctgaaccagctcggtatctcattttctaaacagcaacaccggatgaaagaagcagcaccaggtcgcccgtgactacccagccacatcgccgtgtatataggcgccgtgtataacgatatctgttttagtacgtgtagggatgtatatctacgcctactcatgcggtgtatatgcactagagcacgaggcgtggttttgccagttctgtactgtcctcgaaccggcttttacccacccgtaacgattaccgggtgtcccacagtcttacatgcatttgacggattcttgcaataagtttttaaaggttcgcgtcgatttcgacagctcgctaccaagaggtccaaggtcaattcgtgctcctctgatagcagtttcatcgaaacgtggaatggcgccacgaatcttccgtgtccaggcatcaatttgcgacggcttcggcgacgctccgctcgcgctgaggtgccaccggtgatagctcagttggtagagcggcagactgtagaagtcgcagaaatctgttggtccctggttcgattccgggtcaccggactcttttcgacgtttgttttccgtagagaagacggctttcctctacgactagacttcgatgcaaatgaaagcagatcaccaacagggttatcatgattcgctgtttctccttttagacctgacacaagtatcctgcgttgcttgtgacagtaagtgaaagaaaatctcccccagcaatcgaaactgacttccaacgttatgacgaaaaacagaaagagtgcgggaaccatcccgcgagggaaaaggctgtaaatttacggtacggtcatctagaagcgcccagcagttcgagttccagcatatgaaggattccgcatgtggtagagagtcggtagacgttaacacggctgtcgaagcacggacgaaaccgtttccttacttcctttcgcgcagaaaccctggatgcctagttagctcgtatttgcgtccagtggtccatgtctctccgtaactgccgaactcgaaacaatcgcccgagtctacatagaggcatgttgtgtgaccttctgaagacagaacacaagcctcaggttgttgggctgcctcagcattcggcattccgctcttatgctgcattccatttctttgtccaaaacgtggagaaactcccgctaagaatatccgaggaattgaaccgtacttgtccatgcttttgcgcagaaagaatgcctcttgtagttactgagacaacgccaaccacttgca

SEQ ID NO: 2622 - DNA, 2181 bp, Toxoplasma gondii
  source 1..2181: mol_type = genomic DNA
ctcttgaaaacgtcgtttcctgcgtctttgcaggagagtgcaagtgtcatcctttcttccggggttccgtctacagtctcctcgtcttcgtctttggccttctcgtcgtctgtctgtacactcgacagtgagtcgctcatggctgcgtcctccacgcggttctcctcagcattcgcgacgggagattccgacagtttcgagttctctgatgcgtttgcttccatttttgctcgcgctccgctgtctgttgagcttcgttcgaggaacgcccgggaaaatgtctgcaggctcgggcagggaatctgtcggcagctcttagagtttctcccagagagagagaggcgccttcgaggtggaggcctgcaaaaaagttctttcgcaactggaagaagagcgcaggagacagacagaccgagagacagagagagatggggagagccgagttctgtgtagtcgtcttctctgtcacgagtggggcgtcgactcaagtgcggcaagagccacagacaggtcaactgctggccaggaagagcagcgaaggacggcaaaagttctgcgtttgcacaggaagaagcaggcgaccttcagcgattcgggacagaaacggcgtgcactggggcggctctcgttttcctctttttctgcgtcgtttcttcactctttcttcgcgcgcgtttcgagatcgctcaaagagacgggagcgcgcaggggcacagggcgcttccgtctttcgcaggcgagacgattccagacgtgaacgagaaaataaaatcttccaaagtcaagcgacggcaaagcgaggaaaaagcttcctcccctaaaagagctctctcccgaaatgggtgcgcacagtgtcgagagagtggacggcgcggcgcttgtctggatagagaaggagactctttgagtcggaggcagtcgcgttttaaagcttcaagtgttccgcaaaaactgaaatgggagcgagactctcggagtgcgttcgtcggatccggcacacagcacgcaaatttggggtgtttctcccgcggtcgtgtgtgcttttttcgcaggcgggcggcggtgttcgcggagccgtctttctccgaggaaacgtggagattcgtgaaccaatgacgctcaatgctcaccgaggagaagaaaagaaacaaatagctccgaagaacatctgccgagtgtctcgcgttccccagcgccgctctgcagcatacagcctagcatcttcaggtgtacatacaccgcacgcgttcggcgaaaatcgcagccttcagtctggacggttaccgctctgagcggcgaccaggaaagagtcggaagacggggacagcgccagacggcgaacaaggcgcgagtctcccgtggtgaacgaggagaaaaacaaacgatttccgcggtgatagaagaaaacgaaaagactgccgtcgtgtctccaggtcggacctcagcgcgctcgtctccatacagacacaactgccagcagagtcgctcgagagagtcagagttcaggcggcgtcgagccagatacgtaggctgtggcggcgtatcgcaaccaatgtatatagagccgaagaggaggtctccaagccagaaaatgtggctacttgattttcaagtgtgagaagaaatccgagttggaaaacgcgctcagtgggctgtcgcgcattgcagccgcgacctcttcgtttcgcccttccagcctcacgtggtgtatgtacacccgaaaaggcattgcgaaaagacgaaccgtgtccccgtcctccacgtgtgcggtcccggtttcttgtccttttatttgtctttcttcggtccactttctgcgttttgtggcgagccttcttatccactttctcgcagtcgcgtgtgcattttctccgtcgccatttctccccagggtagtcgcttctcgctttcagcctgaccccctatttatgcaatagaggccgccgcattcaacccgaccctcggtgcaagacaacctgggcaggaaacgatcaaaaaggcgtccgagaggaggcgaattcccctcgtctttgctcgtctctcaggcctcttcatctcttcggattcactccaaagcgcctttcttccctcccgtcttcagccgcaccgtccgcctcctttctgcctcctccacttgcccgctctccgccttttgtccttgttcgtctttcacatgcgaaa

SEQ ID NO: 2623 - DNA, 5034 bp, Toxoplasma gondii
  source 1..5034: mol_type = genomic DNA
ttcgaatgttttccgccgacactgtaaggatctaattttctcacatgaaggaggcgctcgcagcagtgctgcgttcagcgcttctgggcttctggaacgggcccttctgcactgcactcctgtggagttgtgcacaaagtcaaacaccgttctatccacagtagcaatacgaatctttggctctagtactgcgggccccaaggttgggtgagcgggggtgttggctcttcgaagcatctctttgataagagaatataggtgagctactcattactgcaggcgcgtgcaaggctggtcaacccgtggcaaggatttccggaggttttctcgagctcttctgaactattcaaagggttcagtaggctgcgcagactaacacacgcgcttctggagatacacaagcagtatcgcgctctcgtagcatgcactagtgaaaccaccgaatgtacaagctgaccaagcacacgtccggtgactgcggcacacggacgggaaatgagtctgacctgcggacccacacggcccttacctatggaaaaggacagtgtgggggaactgaacaaacacggtttaaccagttttgctgtgaatagtacaataacgtatgcacttccaataccgtgaaaatgactcatactacctgcttctccacgcatagacgtaaataaacccttctttgatgtgtcgctgagtccggccaacgcacgaattgctgtcccacgtataacagtgatcggctgtacgaaatgaatttgatcaagcagtttcctggcagaactctccagcgtgcgccttcaaaggcacgctggcaacggaagagccgaagtagggagctgtatttggttatgagtgctgacggacacggaacctgcagcacacggtgcattgttacctggatgggggagaactgcgaaatggcagaacatcaccgcgaatgcatgtacagaaactggataatttaagaggacaaataggatcttgcctcgttgaaatactcgaacaaacaggagcgaaaaacctcaagtcatcattgtcagttgaaacgtggtgttcgaataactgaggtaggcacggttaagcgataacgtccctgttcaaggttttactgaaagccgttccctggttgccgaaatcgcctacatacacttcgcgaggcttgcgttatgccttgacaaaaatcttcgcgcaagtgatttgtgacaagttgcagtgactcctcaatccgtgtggagaccttgtagcagggaattcctcttcctgtctctctggctttttcgttgcagaagaacaacagcagattagtgcgagaaggctccagaaatccccatcgctccctccacgacactagctctgtcacaaagcaaggcaccgcaatgtgtgccactgcatttcccttgtggtgaaacttcttcatggcaaagcccatggagcccctgggctatattgaaagctcgacagaagcactttcttgcggctgggcctaccgtcggtgacggtgacaaatcgagtgatgagaatgtgaggagcggacatgcctgtagcaagcttctgcttgtcttcggggaacgcctttgctctgcgcataccgtcgctgattgcaagttaattgcggcttgagcctcccttggcacaaccctaaaagcatggctttccccacagaaaagtagattatcagctgacacgtcttctgtgaacgtgtgggagtcctcgctcgcgaagtggtcggtgtcccagccaaatgttgccaaggaaaaactgtcgtccagcaagcagctttcttcgtctgaaacctctatgccagagggagccgagtcgagctttgtgtttgtctccggctgtatattcttgattgtgaccaggtcttcgcagtccacagcacccgcaaatgcttcttgacacggccctagggcgatttgaacacaagcctgtgatgttttacaaccgctctcaaaacctgaggcaccgaagagctttcgttccatttttgctgtcggaccctcatgcattaactccacaccagcaacaatggcatcatggattgtatcgaggaggcagagaggagtatcgacattccgttgtgacgaggaaggagtgccgaaagcctcaaagcatcccaaagcgctgcgttgtgaccttgtcgctggcgatggcaaagcagaaaaattccagatgtagttcatgaagagacttgagcgggagcaaacgaaaggcaaatccgaagcctgacacaaaatactgtgactacatgaagattccttgttacatgccggggtactttctgctgatctgctgcgtcgaaagcggtggtgtgagcggccaagggcaacggccctcacccggacgtttgcggcagaggtgggaatgaacacgtcacatccgtatggcaggttcctcggtaaagaatagtcaacccgaagtcctggagagcattccgggcacacagagtgaatctcgctgccctcatcctctacctcgatgcgacgcacgaaagaaacatcagtgagcgttcgcctagtcccacgttcaagtggatccctgtgtgctttgcgaccccttctggtttccggaaacatcgcgaaattctcaactcaacggacgaacacacttacgaataagcaaatcgcaacggtaaatacactggcatgggactcgaagctctgatcgggtaacacagctgtgcgagcggctcgtgacactagcagaagtcgcgatgagaggatatctacaagaagatcaatacatacgaggagcgatataaacgattgaaacagaaatgaaagaaccatggacagatccaccctctcggtagcaccgccggggcagcgcctgcgagcatcggcgtcgcgttggccgtgaaatggcgccagcctttgttttcaaatgacagattgcgaacgggagagctggtgctgcctgagtcacaatattgatgcttcgttgcagctgcaaccctacgctacagcgtacattgtcgctcactagcggatatgtaaagaggcaattcgaatggtgtagactccagtgtcagccttccgaccgtccaagcgacataccatcaaagtcggagaaaaagtgagatagtgcacggcgtgctctgtcaactgtgtccacgaaagatgacggcaccagctgtccaggtaggtggcaatcagatgcactgctacaacggtgagtcgcccaattaaaaaacagaagcgagatgcagtctcggtgagttttcagggcttccaatgggcacccaactttactttgaaccgaagaagcgctgcgcagaacgggttaccgaaagccgacgaagtcctgtgtatctggttcacatttctcaaacataggatcacgtcgggttcgcttaatggccgcaacagtatcggccggatttgttgctcatgcatcagttgtttgtattgacaaactttgtgcgtcttccgatggggactgatgaagaatcgccaggctgtcagagagctgaacatgataacaacgaagcgctgagggcttcacgccagcgtaagattaaccaatgagtttcatcttagggatgtggttcgtgcccggtctttataaaaaggtattcctcagcaactgtgtcagtggtggccctgatccgtaacgtcagacagtacactcgctccaacaaggtgacagttttactcatggtcttcatttttgacgcaccacacaggtccgtgtttccggaactaatgaatattttttcccttgtctgaaccaggttgatatctcgttcacccaagcgttgcacaacggacagccactcatgtgtgtgcttaagaaggacttcattgccgcatctaggatagcgggctgacacggaaatttgtattgtcccatcttgcattatggcaaagaagtgcctaggttcatatgcagttgaacgggagcgcgcttcatacacctgaggcctctccattttttgcaaaatcagatggatgatcgaagaaaagactctttctcagcgggctgtttgctgcaaggtgttcccgacgtcagtcaaggaaaaccacttcatcagccacaagcacaccactttagtgctttgaagtaaaactgtgtaagaaaacttgttaaatgcagtgttcgccagcgcatgctgtagactctcaaaactggtggtttccgttttcgcgtgtttatttcataatgaattttctggtctcatatgctacgccccaggaaggatgcgtgagtacagtggttgtctatattcacactgtatccttcacgtatgtgacgtagttcagagtccaggtaaaccagttacgatctgccgaccgtcttcctttggaggcgttcgcggaaaaactgcagagaagctccacgaggaagatgagacagaggcgggcatcttgcgcaactcgccaagagaaacgaatgcacgagacagaagtgagacacgagagagagagagcggcagcctatggtttgttcggtgaaattgtctttgtcggatatgacatgccccgcttgtggactgtggactccactgaaacttgcggacactgacatcggactaacaaagggtcgtatgaccattgcgacttttgagccaactgtaaaacgagaaaatcaactcttggatgattactcattgtgcccttataaactcctgatcgcctcactttctatatttgcttcgtcacttcgtaagagttcttcatcttacacgtccccttcttatttccacgacaactgggcgttagcaattccaaatccatacagctgatcgggtccccagaataattgttccaactctcttgactaagctatgtacgtgcatctgctcacgcgtttcagccttaacgcctttagaagtgaaaggaagtttccatttacctctgaactggtgtgactgtgaagagcggaggcactatattgatcaagtgattatgcctcacggcgaatactgcattttccctgacaaagtttcacctgtggcaccactcccactagctgtcgaagcagacgtcttttaaggaagtgcatttgaactctgtcattggccgtatttgaccacca

SEQ ID NO: 2624 - DNA, 2310 bp, Toxoplasma gondii
  source 1..2310: mol_type = genomic DNA
ggaaaggtaggccgcgaggagagcggaatctgagaagaacgagagggcccctcgcgagtcaacgacggagaccggttccgagaaaaacgctctccccttcgctcctcgctgcgctgcagagatcgctgccgcgaagcgacagtggggttcagatacgaaggcgtcccgcttcttcggcgggagggcgaggagacacttgcccgccgcgtggggccctgcgtgtggggcggcggaggcggggcctcccgcgcagacactctgaacgtttcggagcgaacagagctccttcgacaggcactcatgtcctgcgcatacgcgtcgcctccagagaccgagacagagagagaggcggccggcgagacctgtccgagagaagacgagagccgcgtggaggcctggcgaggcgacggcgcacggagctgggaggcaaacgctgcatgcaccggatgagagaagacagcggcagccacgaggagcgaaggagaggaagaagaggcgagagaagaggaagacggagacggggagacatctcgtccctttttgtcctcgctcggcaggagcggtcgagcctcgcgcgcgagagcagactggacgggaggcgttggaggcctgttggctttcgcgctgcgacggatcggagcttccccgccactgtgagacaaggagagagagaaatgctcccggcttccaactcttctgcctgctggaggtaagtcggcgagagaggcggcctgaggcctgctgaaacttgtccgcgtgtctgccgaagcatgccctttcttctccgcaggctgagaccccaaggacccagactctgtggcaagcgcccccaggtggggtccgttacgctgaggcaggagaggcatcgcgaaacagagagacagaaaggccagttgaagccagcggaaaggagggtgagaatggcaacagagaaaagggaaggaaggagggaaggagagacagagaggagagacagaaaggatgaccgttagatgagaataggggctgcaaagagctgagagacaggctgtcgaaggagggctgtccagaggagagagaagtcgacagcgatgaagaggcggaatcgatcgacgcgtggacgggggcggtcaggctcctacacactcggaagtaggagagtacgcgggtggcgacgagaaaaagcagagagatggaggatacacggaatgttgaagagaagagggcgctgcgtgagacggacggggagcagaatgaggagcagcttcgtggcgcaccgaaccaggccgttatggagaagaagggaactgcgtccagattcctgctgaggcggaggcgtggagggaaaagaacttgtttctcttctgaggaagaaatcctcttattttcgagactttcttttctctaggagacccgtctttataagaggatttcgagaagacacgacgcacacactgctgcgtcgccagagagctggcaggtagagagaagccggagaaagcgagagcgtcgccgccccttccttctgataggcaccgagctatgcaagttggcagctgcgtgcagagcaggttcattttaacgcttgaaatatactttttctctcctcgcaagtggtcacatcgtccggcagagagggcacctggagggcccgcgaaaaacttggttctcccctttgcagaagaccagaagagagacgatgcgtcgaggcgcaaggccgtccctgaggtgtctgaacactcagacgaggaccctcaggagctggctggcagaaaaggagagaaaaatacaccggagaaagaaagttcgaggcacccgagcgccctgggcccccggcgaaactgccgaaaaacctgcttggggtcggtggcggtgtcttgaattcttttcgcatgccacgtgaggtgtacatacaccgcgcagcccggagcgaccacccccccaaggcgcgttgtgtaggtacaccccgtttttcgcttgttggcgtcgaactcggtttttccgtatttcttcgcgcgactctgtcagcttgctcttttttcggcgcgatctcccgaacgactccacgtttctcgccgcgacaacagcctctgatttcatcacctttcctcgccgcgcgctccgcccactcaagcgccgtcgtcctttctccccggttttgcgctcgccacttttcgcacggggctcgaggtccttgccctccgcgtccgcagcccgtcactttttctctgtcttctctttctcttcaggcgacaactcgggagatttaacgctgtgaatccgctgttcccgcgctgtccatcgcttctctgctgcggggcctgcgctgca

SEQ ID NO: 2625 - DNA, 4593 bp, Toxoplasma gondii
  source 1..4593: mol_type = genomic DNA
gaagcagaagagagaaccagaagagagaggaggacacgatggagagagcgaagaggaagcgagaaaagaagagagcgcgaagaggaagcgagaaaagaagagagcgcgaagaggaagcgagaaaagaagagagagagaagaggaagcgagaaaagaagagagagagaagaggaagcgagaaaagaagacagagagagaagagaaagcagaacagaaaaacgacaggaaccgttgatcagctcacttctttttgaatgcgtccacgagcatccacaccatataggggatgttttctcgctcgttgtatgccggcaagatcacggaatagcgcgtcatcgtgagggacattgaacatggaagaagctgtcgagagaaattgaacgaaactcaagaaaacggagaaagtcgagctttcgccttcacgcaaaagggaagtggacagaagtctgctctcaaattcagtcaagtttggaaaaaaagaaactggaggaacagagacaagcgtggaatccgtgggcgctgaagaagctcttcggcgaagcaacgaggaacacaggcgcgcgagcagagaaagagagagaacagtaaaacgaacgagcaaggagagaaagcagcaggaactctggaagaccgccgaaaagagagcgtttgcctcagaacgcgatctcgctcgggtgtgtgtcgaacactcggccttgaagaggaacgcagctgcatgcagagtttcagaaaaaggggaaaactcgaaagccgacgaaaagaaagagagagatgcgaagaaaaagacgctgcaggacgagttggaagaggtagaaacagagggccagcgtgtggcgagcagttccgcagcttctgcggtgcctccgccctgggaaaagcagaaccggaggaactcgagagacaaagaaagaaaggctcacgagaagaaacgcgacaagacagcatgtatctgtgtggagtgtgtacggagaatctgtcgcgcagagtgggggaaagcaggagccgcgaaggacggttcttgagaaacgttttggcagtcctcacggcaagcagagcgcatgcagaagcgaccggaaagaagttggccaggcgacacacactagcgaagatcaaagcaggacgctgagctcgacacagagagggaaggcgaaaagaaaagagatttactgcgaggactttttcccgaaaaaacgcatgcgtcaaccgggagtcgaacccgggtcacctgcttggaaggcaggtatcctaaccgttggactattgacgcctcgagcaggaaagttggcgcgctttggccgagacgaagctcccttcccttcttacaggacctggatcgcctccagtccagtaagaagaagaaaagagtgcaggagaggagaaagcagactgtgaagtcgacgagaaactatgaaggcagcagggagaaacctgcagagttcagttgtggtttcggagtcttcaccaacgaggcgcgcaggcgcgggaagcagccttctctggggtcgttgggtcttttccgccttcgtgttcaggaaacagtgcttctcacgaggaaagaatcccagttgctgacagctggaaagtgtgtagaatacgagtgtcggctgtggcttctccagtggccgtagcgcgctagaaagaagcgaacttctgcgttcaccgtcgcattaacgcagctgtttcgagggacaccgccgatgagacgactcacgcgtccgatcgttaaacgagacagactctgaaagggccagatagagagacgcctgtcgtccgcgaagacagcgaaggcgaaggactctcaaggtagaaaaggtcggagaggagatggcaggaaagaatctgtagaaagagagaaagtcagggaacaactcgaatgcaaggtcgcgcttccatcgggtcggatgcagcagagaaaaagattcggaaaaggaaacggttcttcaaaaccgagaacaagcctctctggagaaacatctgggcctgcctgtacaagaaaagacagtctatggaactccgaaatcccgtggatgaggtgtaccaggatcagcttgagtcgtcggcatctgaagaaacggtggttgaccgaaccacaggaacctgatttcatgtatcagggagtctagcatcagcagttgttgcttgtctttgaacttcatgcgacgaatgcgtcaggaacggacacagtgaaccgcgaaacaacacacagcagtttttgtcacggtccatgtatgtccgaagtctgttgcctccagcttggtacctcgtcgctgcctctgggggttcttggagtctgtcaattcacagttctccattcgtccctggttgaaggaagcgagcgagaaagacttccagcgagttgagtatttcctgttttcatcgagagtgaaccgacggaagaagccgagcagcaagaggcctcttctttttggagagaagcaccgtgttgaacgtgaaggactgggtcgcgctttccttcagctcgtcagtgcatctcgccgcaggtaaatgaacggctttaaaagtgtctctggagacctttgaagacagaacaagacgcatacgcggttccccggatctgagaagtcaagttttcttttggacagcgatgaaaaaacgagagcattctaaggactcagcgagggggcacaagatgtctcgtcgcagcagtggctacgtgttgaagtgaaatggagggatattgacaaagttcatctttctcagaggcttcatgtttaggcttgcttgaaatccaggacttggtatcttctctttcaacaggcaaagactttgtttcttgtttccttcaactgctgtcaaacagaacgcgcgttttttgtgagcagccagacacgtgaccgagctcgagtatggaacttttttcaagggagggaacattttgatgcaggattccgttggactttctctcgtgtcttcgttccggggaaagagaacctctgtgtcgccgcagacaaacgcagcttgaaaagagtgtcattcttgagtgcgcgttggtcggcactcgcgagaagaagtcatgaattgtttttgataaattcgtttactgtgttgctccagtgcactgaaaaccaagggaaggccacaggggtgacttccagactttggaaagctgcttctcaggcacaacaggggattcgctctctgcctcaggtgaaaacagcgtctcgcacaaaactctacacgagagacaactggagaagaaagttaaccataggcgggtggcacctcgagataagcagacaaacacatgaaggcgaaccgggggaaacgcgtctcaacaggatgcgtctgtagttttggatccacagactgaaaatgcactttttcttctgtacgagaaggacggacgatcacatctcgacatgagtggcggattcgacagatcgagcgacagtcatgagcgtcctctgttagtgtgaagagtctgatgaagaaaactcgctgtcgattgccgaacctttacccactttgtcaacctgacaaaagggcgaacggaaagtgtgtttagagaaggggatggtttaatggttaggttttcttcttttctcagtttccccttccccctcatctcgtgaattcgcactcagactccagccggacttggtggcgtcgtccacctttttctggaaaaccgagtccaacaaggagagggaatctttttcgaagtggaatcgaagcacatgcgacggcgatgagcctgtggactgttcgcatctgaaagaatccgatgtttcgccgaatctccacagcaggagactgttctacgaggtctgaaaacacggctggcccccaagttgagatggtgtgtgtgcggcacctgaaaaggccgttggtctcttgagcaaaggacagtggcaacgaacgagcaaatgccaaggagaaaacgaaggaaaaacgcatttcttcattagaaagaacggtcgaccttctgtgggggaagaacggccgacacgacggacttctgaagtgagataggtcgtctgtttttgaatgctgctgccgagtctgtcagcgcttgtttctttctgcactttcgcctttgccgttttctcaaagaagaccgggggttttctcctctttcgttcctcccatgttccgtcttgacactcgcgagagacatccggaacatcggctctatttttttcaatttcctcgaggttcacgggaagtgctttctagatcactgttctctttgcggcgccttcgtggtatttggcttctccgactcttcacatttttttatcgaataccaagtaggtcacggcgtaacttccactcaaatcttctttcatttcctgtctttaaagtctgtatcggcctccgttaacctcgctcggatgtgtggcaccgactctctgtctcgcgatcgggacctcgagtttttctcaatggatgcagcagccttcgagtctctcggtctcatccctgcctcttccccattggaaatgaaccttccctcagtctcgcattttctctctacctcgctctgccttccactctaggaactccgagagtctgtcttcgtcgaaggacgagacagaggagcacctgtgttctgtcgaaaaaaacgaaaaa

SEQ ID NO: 2626 - DNA, 1875 bp, Toxoplasma gondii
  source 1..1875: mol_type = genomic DNA
caggcagcgaccttcgagaaaagccattcatacgaaattctagcttcccgatctttcaatagcgcatggtcacaccgggatgagagagcaggatgtccacaccggctgacaacggaagaaataagctcatcgaacaaggccgctgagagaggtgccgttctttcatttttgttctgtacaaggagaatgaggtattcttccatgcgtggtctgtattggcaatactccatccgttaattgtttaaccgctatagccggggctgagttcttaaggcagtgctatcaagcgatgccgacagcttctagacaaacgtggataccaacagggtattgaaaaccaccggttttagctgtcttcgtaggccagggacgtggcagtgtagagccatcgacagagccttggttgtcaacatctcagaaatgcagccgtactttcatcattcaatgtaccatgtctctgtaaattcgcgtcgatgccaaggtgaacacgcgcctttcagattctaaacagatatgatctttgtagaaggataccgctatccatcactgtggcactcaatgtggacagaggcactcggtgattctgagtttgagtccaattgtaagccacagacaaccacgtccgtcggctacgcttagtctatggagattgtgaaattaccgcaaagccgtatgatgttgaaatttaacatttccagttgctctccagcagaagcatattaatagtcgcaaaagcatattaataatcctgagagattgtcactctcagtacgatggcacggtcacaatctgagtatcgattcccctcgctgtcctgtgagaagtggactccaggtctctcctaccgtgaagctaactgaaagtttctacgcgacagtgaagaccgcggaaatcgcatttcagaaaaagcgaaaatccctcgaccatgcgcttctttcagcccctcggattccgcaaaggaagctgcctgccttgacaattcaaccctcatcttgcgtcagcaggggcatttgctaacagcgatgatggtaaaagcagaacagaaaggaactgcataagaggagcctggttcatgcccgcctcatcagattacgtgcaaggggattagtgctcgcgtgctgtgatcatgattcactggcagcttgtgaagccgaccgggccggtcaccgccacggcggcgacagggaaacaagccaaaagcagtcaactataaggcatctgacagctgttccgatcactggtgcaggaacaagtttccctccctataactgcaacattgacgagagactaatcaggaacatgggatgaccgccgacacggatcaactgacttgcggtggctcgtgttctgcgggtctcgttgctacaccaaaaaagaaagacgactattaggatcttgtttaggcatcctgcagtattccgagtcgtgcgccaaatcgttttctgttcgagaaagcgttccgcagatctcaagcgaacagcgacgcgtttcggtacatgcaactgcgctagcacttcaataccagcggcgaaccaggctgcccgtttctcccgcgtctggccattggttcggtgtgtcctgaactcgctggctgctttggttaggctaacggatttgcgcgtctatattcttcacgttcgggcagcgaaccaattttctgcccgatcgaatgcttaagaaaacttgagtccgcggctggaaagtggtactgtgtagaaagccacaggactggttgtgtagcttggtgtcttcagttgggagagggcggtcccgcaagctgttcgagtcctcgagcggcttgcctactagaaaatacacggacgcattttgacagaagcagtgattccacagaagcacggcgttcgatcgagagta

SEQ ID NO: 2627 - DNA, 2114 bp, Toxoplasma gondii
  source 1..2114: mol_type = genomic DNA
aaaaaggcctcagcagatagctccagaaggcacgcgagagtggctgtaggtgagagcggccattcgatgaccgaggctgacggtgtggatggcttctggggcacatacacggaaaagatgactctgcgagacgcccggagctttcgcggcctcatggagatggtgaaagttgcgaacgagactgcggaattggcattttgacgtttccggtcctcggccatctcgtgcagctgactgggggagcggtgcatgcgctgcggcaacattcttttgttgacagctgaaaagagtgaaatgcagtactgtcgtccctttgatgatacgaggttaacttgcaccagtgcggattttatttaaaaagtgcctcatactctgctcctgttgtcagtgcttgctgtggttgcaaattcttgtagcaaaagtaaccttctcagcgtggctctatacgatggaatggaaccggtgaatgcgaacagatcgagacgccttttacttctttcctttccaaatgtggtcggaagaaggcaccgagatagctttacgcaaggtggtagctgctacgacgcatctggtgtggctgcgcttgtgtgaggcaccttttctgggtctctacctcatcacctataagagataagcagcttctacagtgcacatcactgactgtcggtagcgaggcgagtcacgatcatgcgccacagtcggccctaaagctatgctgtattcgcattaaaaatatcccgatccgttttcgacgctggctccgcgtggagtgtcccccaaaaccatgttacggttaatagtcagtgccagccacagttcccttagaacatggacacggagagacgtgtctgtttgcttcaaaggtttacaggcactgaaaggtttcatgtcagtcgagcagagagccttgtgttgcagtgcatgttagcggttgtaggcttcacgaggaacgtgtttgtgcccccgtaagttcagcacctctgcgtgaagaaacgaagattcgttggtgtcaattttgccttgtgggttgatgaagccgtatgggaagagttactcatgatgcagaaataaccaggaggttgcatcgaaactcccggttctcgatgaagttggaaaacagcgcacgcagtgattattgtttgagattcaaactttggacagacgaattgtcatgcgtcaacaattcacgactcgaaatgtagtaagcactctttacgccgaaactcttcttaatgagcctgtaagcaaactctgtgctgctgtcgagcgcgcagtaccaaacttcgttgcatgcattaaccgatcgcaagcattcgggtggtttttccgacttgctacgtcggacgacggaaactttcattctcgagcgacaaattaattttgaattgcttaacagaaacttgctgaacaaaatccagtgctgcatacaatggatgcttctcgcgcgaagtgtgcagttggatgtgcgttggattttttttttgcataggcgactgtatcacctagaaaagttggcctcatttgccagctgttgaagcggtgtgaaatgttatttgtgcagtggcatcgtccctaagggatcgcaaagcgatttgttcttttttgtgtaggtgggagtccgtgtctgcgcttcccttcctgacggtatctcttttcttggcctacagcacggcagtaacacagtttgcttacctacctacaacttttgcatgctctaatttttgcagtcgagttcttaaacttcatgctgtgtacacgagaaaaccgcgggcttgcgcgtggatttcctctcagggcgcttcgctcgtaccacttgaaggaagggtgccctcgtgtgcccggactcaattttttttcgtggcgctcgccccctcatcatcctctccgtcccatgaacggcagaccttttgttttctatccttcgctgttgatttcctgtttactctgcttgtgcgccacgagtcattcagctggtactgtcctgttcgcaattgaaccatcgttaccgattggaaagaatccatccgcgactctgcttccgcgaacaagcacgcttgtccaattgtcttgaaaactccttgtcgtgcaatcaccttctgacgggtaaggcacaa

SEQ ID NO: 2628 - DNA, 3001 bp, Toxoplasma gondii
  source 1..3001: mol_type = genomic DNA
cttcttgcaagaagcgggagacggtagcagcaaacatgtttcttacgaggagaagcggtattgttaccaacactcattgtaggttcttccatctcgtcttcctacacagcaactctcgaggtttggtgacctgagcattatggcaaccggcgcgagtcgatattggagttacagtggattggctccattgcgcgattcgtcatacgtatgctctgtggacgtatcgtcatgccccaacaacgtttcccgtgcattttggtttatagtgatcaccctcatcgtttcactggcggcggcgtttacctacgcaacaggccaaaatgcaggtatgctgtggtaaatgctgtcacctcgaggtaaagatggctggtctcaggatggcagctgaaatacctatttagttcctcgacaccctgtggtgggcgttctctctatgataatgtaagcacctttgtgaatcatgtttgtcgtggagtgcatacgggttccgagaatgtattccagcagaacattcaagacggcggaaaaaccacggagtttgacctattgtagtcgttgaggggcgcgcgaactgcgttttgcccctacatttaatgtgctttggctttaagttttccgtttgccttgtcgcttcacagccacacaactgttcttctcgcgtaatgcacgagccgttgctatgcttctgcacccgctcctcgtttcatgacgggctcgaaaactgcatcccacgggattgactctgaaaaaaacttcttcggcaactaaactcttctctgtacaccagcgagacgcttgttgatttcaattgtccccaccattttctgttgtcgcctcatcgtttaggaaactgtggaggaaaagcggggtgactctgcgcggacatatctgccattgtgcttcagtcagtttccgttgagctacatacggcgtcacgtgggcgggagtcccttctaaaatttcccgtgcccaagctagcgcatttgcttagaataattcaaacttcactaatggtcctgcgggctaacaccggcgttcgtttcccatgcattatgattcgcggcgtatactttgcaggagcatttcttcactagttcgatgtgtgggagtccaccacagatgatatatgcctttagaatacggatatgacggttcgtcaaggatctgagcgcaaaacttgtacagacaaccagcgctcacgaaccggcataacgacaatcgcgtgacggccgacaaaaaccacatcatgctgaacccaaattgatttgttcttcagcggaacgatgcggagtacgaaatgtggaccaaacgacatcaacaacccccgcgtgcgtgaagagaaagaacacttgagcaccctcagaggaaaaccaagtctcatagcttcgttcccggcagagtcgcgtttgttgcactctattgaaacacaccatggcggacacgcatgcgacaacgaaacctcaccgctgaccagcgggggacagcgctataacccgcaaaaaaagtttcttactccggtgtcctggagaaaattaccatcgaaatggcgatgttcacggagattgagaggattgcctggaatgctggtccagtggtactcttttcctctgaagccgcttctgtagcgaccgttaggtctctgcagggtcacttctgttcccgaggggggtgttggcatggcgccagttgcgcagaaggagagcgtgtaacggaacgaccggtgagcgtaacgtctcgctgtcacctgagtgggggtcgtccgttggtggcaggagaatcgcgcttccctgcctggcaccgggtacaagtgacaatctgccccttgcaaggccgcagtctccggtgggatggggacggaggtccccatctctcgggtgatgatgagacgcgcaacgcctcaggctggaaacagagcagggaaaagtgtccgctgtggcgcagagcagggatcacagagtgtcaccccggctgaacagggcaggtggaggagctcctcacaccgcgtttttttttattacaaattatgttatgtatatacaaccgacaaccccttatgtctcctggtgacggtttcctgcatctcatgtgctagagggggatacaaatttcccggtatgaagtcagagtgtcgcttgcagcgcacaaaccccgcttttgcccacatgcatggacttgtgacgccttctcggggtattagatgttgttcttttgtgcatttactgttttagtaagcctgttgagaatgaattctgcggaccacatacctgcaattgacatttctctgagttagggtagctggtgttgccggctgccgtcgactgtgtcacagcgcgctaaatactccgccgagtagccgccagccaggaattttaggctgggcgcataaccacaagcattcgccacactacgtttcgatgagcgggggctgtatgccgcagggaacttgtgagaacagaaaacgcaattacgctacagtggatggtcgtcaacggagtgctccgtcccatccaagtggaaggtttacctgcggcagtttgcacacctcgtgattttgaagcctacccaaccacggatgtttccccaagtccagctggatgctatcgtgatcattgtaacttgtcgcaagggatctgaaatgagcagcgagtgatcctgctgctcattatcactttcaaaagcaccaggttgcgtcacacagcgactgccagtgttgacaacgattttgtggcaatctgcggctccggcgacagtttgaagactctgtctgtaagatggagttccattccgaagaaagtgtgtgatctgaatgtgagtgggggacaactgttctcgatgcagtgtacggggactgagctctgtttgagcgaccctcccttggctcggctttgaatgtctgacccgcttgtggacgacttgcgaggtttgagcccctgctactcggtggagtgaaaccgccagcacagtccaggagcaatcttgtggctttccttgccagtcgaaa

SEQ ID NO: 2629 - DNA, 2400 bp, Toxoplasma gondii
  source 1..2400: mol_type = genomic DNA
agacgggcatccatggccttcagtgcgcgtgtcagctgaagtaagtcatcaatctcctccaactttttctgtatctttatcttctgaagcgccgccctgagtcgtcgctggttatctttgatcaggtcaaccagccttcgtcgaggtgaaacagcaggtcccctttctgactcaagctcgtctgcttctagcttcccggtggcttctctgtatgctttcttgatggcttccaactgcttcacagctcggccaacttcgaaactgatgtcgaagtccccagatccctgaacccttagaatatacacaacctgatccgggtggatgtctggcaaactgaaaaatggaacaggcaccgacggccctggtactgcaataaaacgcggatggactaccggtgcaggtggcagaacaggggggggcatcccttcagtcccgtactgttcttctgtctcatgctgatgcgccacctctgtttccggcaaaccctcctgttcagttccacctgaatggaaatcgtgatcggataacgtcgtgtcaccctgttcctgttgttcttcacagtccggcaccacctctcccacagcgccagtcgcggcttccacactagcacttggagattccacatgaaagtatgacggggtcgatgctgaatcactcggaacggcaacgtcctctgagttctcatataaaacagcgtcttgtggaagaagggtcgcaatggacccggaccgtcgagctcccgtgcctacttcatcaaaggactccacttctggtagctctggcaccctgcacgccagttgtgccaacacaacgccttgcaaaacacttaccaacaagaagggtgactgcaacttcccgtgcctacacgtagcaaaactctacgacgcttgactcacctttggctcaatcctacggttgctgtggcaagggtgacaaacaagcctagaacacctgctgcgtgcagttgccttctgcactgtccgcaatccatgttgctgtgcacagtaacgcaaacaaaatagcgatcacttcagtgaatacgagtgccacacgcactacggtagtgtaacactgcgccgccttcgctgtgatagccgtcacccaccaagtagcgctgctgtgcctttctgttgcctcccctgttaccgccacccccgacgctcttcctaccaggtgctttccctggtcgcactagtcgacctccttccccgcagttcactctatcgtctctcagtgaccgagtgccatcatcttcgggtaagatgcttaccctccccccctcctccgcaaatcagcatgcctctaaaccccatggatggtcagtggcgtccgactgcattaatacgtctttagtcccgaccactacaggtcctccaacgacgagctgttaaccgcgctcgtttcccttcctcaaaccgctcggaatttgggtgatccaatcgtgcgtcacccccccattaagatatacacagtgccagtcggaagctcgtgaccttacccggtgtgatagcgcgacgggagatattgccgtctctctcgttcgtgtgttcctcgactggtttgcgttagagtacgtctagcacacagaacaaccaacggcgagtgaccaaactaaagctcaactcttgagaagaaaaattttgtcttccaaccagtgtcttgcaggctctctgtaagcgtacgcgcacacatcggcacgcttcagacacagcagtagcttgccagatgtgtctacctgccagtagttcagcgctgtgacgcactggcatacgcaactgcaactccaccgaaaacctcgaggctgctagtactggtgatcgtatgcgacacgcggattcacggcgtatgcgacaagcgggattgctgatgagcgtcgttccccactgaagcgcgcggagtcgtgggcgaccaccggtcacctggcgtctcagctgcgcgaggcacccctctcatagcgtggtactcgtcacgaataccaatcgctggggtcgcggcgggaggaatatgctgtttgttgaccatacgatcacgctgaacgaaaacatggtttgagacgccgtaagcgggcacaggttgtttgccctcgtctcattgcggaccaattcccggtccaccgctgcgtctcgactcgacggttgtgaccaccccacttcgcattgggcaatcggtaaagccataacattactttgcaattttatcggttgaaactgccgagcgagcttgcgtttttgggtgctgtcttctcccaccttttatcagttaagttgtacagtgagtgtcagcttgtttcgacacgtctgtatagacgcaactcggtttgcttgtgttgtttggtggctggccaaatcaaaggctattcatttttcacttgctgttgttctttgaagaaatcaagcaaga

SEQ ID NO: 2630 - DNA, 1456 bp, Toxoplasma gondii
  source 1..1456: mol_type = genomic DNA
gatgccaatgcgctaacaactgaagcaatactccgtcacttcacattgttgaacatgccgagatacagagcctgagactgagaaataaaccgcacagggcgggaatggtcgattggctagagggtaaattgcttttccgccctcataaggacgtcggaaatgcggcacggttgtgcagaacgtcaagacttctcttttagacagtgttctaataatataaagtcaatgtgacaagttcaagaatcagacgctttcagctttcgttcgaagtccacagtcgggtgagctcggggaaactcggtaccggcctgtgagttgttttgccgggaacgcaggctgagagtgaaaagcggtcgcggtctcgtgtttttttccacctcctccgttcaacacggaaaggaggcactttggttgaccggttgacttcctcatttctcttgcccttgaaacgcggtctttcgtttcttgctgcgatgagcggacacagcggtttggacggagtcgcatgcacggctcttgaaagaactccacttttctcgccgtgctcttcgagaaaatgcagtacttcaacgctttaatacgagcgaagaagtctcgcggagagagaagaaccgagagagaagagagaaggttgtgtcgctctttcgaagacacccagaaggtcagctgagaagcactcccctccaagagtcaccaccggcgtccacgtgaacgaggagtccggagtgaagaaaccttcgatcattgagtcggcgacagaagcctcaaaacttcgaaccgaaggaaactaaactttctaagcggaacataatttcaagtcctctgtgccaaccagctttcactcactgtatgatgcaactttgtatcgaccgcaatcggacgcagcttttcgaagcgagagcacaagaacatgcagttctcccttgcacttgattaagaacgacatcacttatcatttggtcaaggaaaaatcaaaaattgccggggaaagaaagaaaccttctaaaactgcggtcgcttgcgacgcgccagaccctgtgccgcttttgtgtcgtcgacatcatctgcatgcgctagctaggtcatcttaccattgcatctgttttctccatcttttctctcactttgtgcgtcgtttcctccaatcctacgcctttccctctctctcttctcctcctctaccttctccctctttccttttctcaacgcttgaggacgctctgactctccaactctcatttctctcctttcttcccccacaacaaaagagacgctgacgctccggtgtctcgcttcttcttcctcctctccttctgttctcttcttctctctctccttcgtcgtctccctctgcgtcttcgctctctcctttccgttctctcttttctctccttggtttccctcagtcttcgctctctcctgcgtcgctcggtttcgaccgggatctgctaaaaaa

SEQ ID NO: 2631 - DNA, 1927 bp, Toxoplasma gondii
  source 1..1927: mol_type = genomic DNA
caccactggcggaaggaaaacagaatttcctcctctctggacgccacgacttccgccgtcccctctcgacagccagacgagggagaggaaggcaaatggcagggagacagcaggggaggcgacgcggcagccaggcggccgtcctgcccctctgcggagacgcctggccggggagagagagagcgaggagccctgtctctgtctcttcttctgccttcctccatttcctgttgagcgagaggagaaaggacctatccgccgagcaccgggggcctgtctaaaggtgtgtacggagatttgcttgcttcctgcgcgaggcaagaagcggaggctctcccggcactccactcaagaagcgacagcgagacggatacgactgcgtttccttgctcctgtgactccatggacggttactgaacagggagggggactgaggagaaggtgaaagggcaacgagcgcaggcaggcaccccgtgcgtcaggttggctgtgttctgcataacaagtcgcgacgacggggaaggaggaggaggatgagagcctggcatgacctcacagtgggtcctggagccgcagatctgaggcgccgacgaaacgaagagaaggggagaagaaagaagcgccgacttgccgcctggtgctctctggagagtcgagaagggatacggaacacagccgagaagacaaggccgggaaagagcgtcgaagaaacatgctggcaggcctccagacatatctgaaggcgacgcaacagagagaatggaagaaatgtcgtccttctctccttttgcctcgaagaaacagaagaaacagccgccgctattcccctggattcctgcagaaaaaattctctgctgtctcgacaccccgtggagggcgagaagaccatgggtcgtggcgacctatacaccggggaataggcgcgttttggcaccggttcgcggctacgaaaaataactcgagtttggaaacgagttttctcgtctccatgtctcgcagggcattccagtttcaccgtgaagctccaggtgcgtcaaggcggttcagcagccagcgtgtgcatgcagtttgtgagaggcaagaagcagcgacccgcagaggacgcaacagaagcaagaaaaatcgaccgcgggtgtgtatcgctttccggcagtggaatgcgtttttcctctctgaacagtcccagtttgtctccctctcccttccctcttctggagtcttcaagcattttctcgcgagctcggttccgtctttttgcagacctcgcaggtccccggccactgcgcgctcgagagacgagaaaacgaggactggtttcgcccgttcatctggcttttttctcgttctctctctacgacctctctgcctctgttgagtctccaggcgcgtttccgactcatcgttcagcatagttgtcctcgctcttggactgctgtttcctctctctctccctcagtcgccgggtgcgtagttgaaatccctttgtgcaagtcgagctctgcgagttggatggatgtatctctcggtctccatctctctatttttgcgtcggtctttgtctctctctatccgttgatctctgcacttgccgcagttagagagagttttgttgtggtgaatgacatcctgcctgacgtttttactgtagggacaccgcctcacgcgctgcctgtcgctccgtcgctttcctgcccctctgcgcctcttccatacgctcctctctgtgggagagaggccgaatggatgggtcgccacgaagggtaacgaaacctcttttgctatagaccttttccctgctctccgtctcgccataaaactggaactcgcgtttcttctcgctaagcctacgattctcgccacctgaaaacgaagaaaaagtcaccgctgacactgcgccaggtcaatatctctgttctttcagacgcca

SEQ ID NO: 2632 - DNA, 1610 bp, Toxoplasma gondii
  source 1..1610: mol_type = genomic DNA
gaagagaaaagcgaggaagaagccgagatactggaaaagagggagacgggcgggaagcagagagcaaccagagcggaaacgcatgagggcgcgcagacctcagtcgaccggggaaagacgagctctcgctttcgcgagaggggagaggtcggctcctggaaacgaagaaacgtcgcgggtgcgacggagacgacaagaaaacaacagtgccaaggagatccgaagcggagagggttgagagagagaaaaggtcgagagagaaaggacgaaaccttccacagggtagaggcaccgagagaagaaagcacgggagaacgagagagccccgtagagattcacagagaagcgacagggcgtctgtcccacagaaactcgccgaaacagctctcgggtctgttcgctctggtgtacgccctgcaagtcacttttctccccggacggcggacgcggggaaggcggccgctgtagagagacagaaagacgaagcgtgtgttccctaatgagccagatgcgtcctgggcgaggcgtctgggtgtttcgaggctttcgttttctaacgagcgacgaggaagtgaagattccggggcctccgatgtgagaaacgctcgtcagaaagtccggcttgtacgcaagacgtggacgagggaggcgcaaacaaaggctcccgtgacgcggcaccttgaaaggtccttctgcccaggtgcatgcagagctgcgtggtcagccgaagaggtctgcagacgaagaaggctgttcgcagcctcaactcagcagtctcgagcgcagctgggcggccagagagctcgcgaaaacgcgggggcgcgcggcgcgttcagaacggacggaaaaagcaggggaatgcacgcctggacgacgaactgcaagagtccgggcatgcgggacgatggcttgcctcctctctcttttctcttgggtgagaagcgcgcgaggctttttttcgcgcggcagggcgaaaaaagccgagaaaaccgcggccaaggatccgaggacggacgcagtgtcttcacaggggggacttgcttcacgggagatggacatgcactgaaaaaagctacgcgaagaagtctctctgtggcgccaaagttcaggagagcgttcaagcagaactcccgcgggtgtgcgcttcccggcctctggaaatcccggggaattgctgggtgtacatacacctcagccgccagccggacacgaggtgacagttccggagcgcgttgcgcaagatgtttcctgtccgtcgcgcgccggggaagaccgcgccttttttcgacggcaaatccgaagcgtcgccagttctgccgaggaggtgcagcttcggtctctcgcgcgaaggaaaaccgaggcacaaaacgcggcagccgctgctccgcaaggtcgatgttcgggtctcgcgcaaacttctgggtgcgagctagttgcgcgaagtaggctcaccgcattccaaatccctctttttcttctttctcgcctcgatttccgctcgatcgcgccctcgtctgcacacaagcggtctgaacctcccctactctcccctccaccctccttcttttcagcgctcccgcaaaaaaagcggccgaatgggtcggcttata

SEQ ID NO: 2633 - DNA, 2308 bp, Toxoplasma gondii
  source 1..2308: mol_type = genomic DNA
tcctgttcaatggtgacgtcgccgcgtttttcctccttccgttcttccccgagtgaaccactatgtccgtttaattccgtgtgcgacggaagatcacaatcgtcttctttcctgcatccggtgcactctgtctcagcgttaccctcctgcttttgcacggaaccaacctggacacctttcgacactgtcaaggggtaaccaatatgtttcttattcgacaatgccgaatccgtagagaaataatcacaagcttgaacggaatgcgtggtcatacgtgatcccaccatgggaggcaccatggacgaactcatctgcacgggagagaagaacggggatgaggtagggtgattccccaggtcttgttgcctgacagtgtatggcatgggttgcacttggctgcgaacattcggagctccgggaacacactgaacgggcgacggaacgtaggtttgtacgggagttccaagacagctcattgtcttcacacttacacgatgatgggaggaacccaacgacggcgcgtaagtctgggcatacacctgttccctcggaacgtgaatgatctcccgaggtaatgcgtcctgttgcaaaggcatatttgtgaaacacgctttgttcggccaggcccgtacaccttggtgctggggaggagagctccttaggcgaatactcagttcattgctctcacttgtgactgacctcggacaagagaggcaatcgatcagagccccggcggctgcagtgcacaaaggtcagcatacaacagacccacgggagtcaacaacacgataaagcttgccttggacagttcttgctggtacgggcatttgtcacaggccaagtctcctaaaacaataaacaaacacccctgatcttcattgtagccgtgtgggggccacgaaaaatcacttactcgcaaacggcacttgccataaggggatgtgatccgatatttgtctttgcagggccgatgaaggttcttcgacgtacgccattgtagaccctctaaaacgaaactcctcaggaaaaacagattgggccgtacaggaggacgaagtttaccagtattatctgcgtgctcggcgagttcaggttggcaagtcaaatcactcaagatccgaaatagtgtacacgcaggtgaagcaacttggcgcccctcgtcgatgatctcgtttccacgaataacatggaattgtgtaagtctgacatgaagctgcaaaaaatgacgagtttgttacattcgcatgcccatcgacaggctgggagtccgcgtggcccggtacgggaactgcgtttgagtcgttgctttccccggctgaacaaaaatttcaccgtctcgacagccttactccagacacgattgacgcgcgtgatgtatggaagttcaactctgacttcgcttgattttcctataaagaccagtcgtcgtattgatgtgtacctgtcgcggcgggaggtgagccgttgcaagcccacacaactgttcctcacgagcacagagaactcagggctgccaaagcctcactctcgcttgacttgcgagggggaaagtggactgaaggtacacataggtgtgaaaacattgcgtgaaaaggtgcttagaatcagaagcctactgcttcagcttggcacgcgcatgtttccaattggtctctacttccgattctgcgaatgcagcaggcaaacccctcgatgcgagttgccttggcgacggggcacgcctcgccgtaccctcctgcctccggcatcgcacgattcatcgacgccgtctctacaggaaatgcggaaagcgatcagagcgatgtggccgaagatatggcatttttggtgtgtatatgtgaaactaaagggtgaaataggacattttgtgtgcagctatgtagcaagaaatcattaaggaacgggacgcttctctccctccctggcaatcagggcagctagcagaacgacagaatcatggacacgacccacgctgcgatactgtgcttgtcgagacctaacgaggtctcgcaaatttgccgtgtgcgtttgtgccacgactggtgaacgccggccgtaaaaacgccaattctttgcagaaatgtgtggagcggaaggttgacgtcaaatcactctggaaccgtctgtcttccgcggagaagaaaatgactcgcctggaaaactccctccacagcatcaacatgcacggggatgtcccgcgctggcgcctgacgtgaactagttctgagacggtgttttgcttcgtgccaactatataccactactcgttgtcttccatccttcttcgacagtcaaattctgcaaaaca

SEQ ID NO: 2634 - DNA, 1895 bp, Toxoplasma gondii
  source 1..1895: mol_type = genomic DNA
aactcgagtttctccatcgtttcaaagacgtccttgatgcggctctgcaggacctctgcggcctctcggcgcagctggagaagccggaccgcacgtgagttgtctccgggtgagtctccaggaccgtggacctcgccggcctgtctctgcggctccaaatccgccgcaggccgcgcctgggtcgattgcccgcctgcagtcgcggccttctgcatgaggagcaggtcttcttcgcgctcctcgacttggtcgtcctgaatgacgtcgtcctcttcgcctcgctctcgggagaagctggcctcctcgctgaagtctggaagcgccgcagccgcgaaaagcaaagcggcagaggacgcagactccgaccccagggaacggggacctgcggagcagcgcgcatgtgaaggagacggcgcgcgagagaaggcagagcgaggaaggtcgggaagcagagtgtgcagagcgacgaaggtcagaagagcgaggatggagaaggagaggcgagaggagacagaagtcgaggagaggccgggcactgccgacatgcagggcgttctgttcgcggacattgcggagacagagaggacgaggcagacagagaggacgaggcagacagagtgaacgaagcgctttcctctacgaaggctgcggaggtagggtgacagatctcccccgagaactccttacacgcacatagacgcaggaaatgacaggaaaagaagagagagagaggggaaggaagaagaagagagaacgagacgcaaagagaaagaggagaggtgagaaggaacgcgagagagaagaagagaatggaacagcgacagaaggagaccgagaaagagaaagacaatgagagcgaggagagaaggaatgcgaggaagacggactagagagaaagagacgcccgaggtaaatggtggatagagaacgcggcctcaggagagagggagaggagacgattcagacaccgagaggaacgcgtgagaaacttgtctcctgtcgagaccctcgtgtacatttgaccagtttccgagagccgagagagaaaagctttgccgacgagaagactgcactctggcactgggcgccagcgacttgctctgtagagaaaagacgcgtctctccagttactctctggaactcagtacagctgcatggaagctgttcacaaggagacgagaggaagagacgaacagatgaaggagagaaggaaaacggtcaagcgcagtgcagaaaatcacaagaacggaagacagttacacaaaacatgcgcatgcacgggtcttcttttctcggagacagcagccccgggacacagaactcgagggcgcatgcactgtggcgcggtttgtgtctcgtctccccgcaaaacagccccccagaatcttttttctctccgtattttccgtcttttttctgttccacctgccttcctcttcaagttgccggcagactccccagtagggacggttccagttcccgcagcttcctttcgcatgcacgcgttggcttcgcgcccccccgcggcctacgaaggcgagacaccgtccgttttctctcctctgcatccccgctcgaggaaaggctggagaagctcagagagaagagacggagaggctgtcgctgccggaacgcgaaggagggtgacgcgcgacagcgcctcgagagagaagagcacctcggtcttccagaaagacgggagactcgaaaaggcgagagacgaagaggagacaaacgacgaaacaacagagggcgacgctcctgtgtctgacgcgttcaagcgagtgtatctttgtgctcgctttccttctgccttccaaggtcgcggtctccccgctctctccactcccggacgtctgcactcgcttcagcgctctcacctcttagcaaaacga

SEQ ID NO: 2635 - DNA, 1745 bp, Toxoplasma gondii
  source 1..1745: mol_type = genomic DNA
tgtgttcagtatgcagacgatattatttcagtacaagatgaacgcgagatcttgagggaacatcgcttaccttctgggagtgccgtgtacctatgtcggactggttgatcagagctgagagagcaaaggttgccacagacgccacagacaaacactcaaaattgattcagtgcctgcggagttttctccctttacagttcagccacgagcagcctcagaatgatgttgcaatacatgtactttagtctccgcagaaagcaaataatttcgcacggtgccactgtgcgctgccagacatgatcctgagatcagtgtgaccacatgtccaggcattcttacttgtggatgacgctggtggtccgccggcgttgcgagcgggattccacctgaaaacgacaacgaaagggcatgaccgcgttcacctgagtgcttgctaagagttagtttgttaacaaatagtctatcccacgaaaacgccatataatggtaggctaaccatcagtgaagttatcaaattcagttccggtttagagcaagaaacgtactctggcagagagaggtgatgggtttgccagtcgagacttgataccttccttccatgcctgcaacacagcggaggcaggacaacatcggctctcaatgcgtttagccacatgcacgcggtcacaatcgagcgacggggtaccgacaacttcgaccgtcccaatcacgggcccgtcaagaatagtaacatccccgacactgtaactctgatgaaacaagagccaaacaactgctggatcaatcgtggtgagtttccatggcatcatattcatttaaaggccctctttgctcaccgcgacaaaagccgcagccgtctcctcgtcaatggtggagaagtttcctgcctccaagtctctgtgcagacctacaggcaagcaacatccaggaagaaaaggttcttcaccgaaagggcacatcagacacgagcacgattttggaggggaagccacttacagtccacaatgctgaaataaaccgcctcaactggagaggcaggaattgttcgagataggctcatgctgcgagtgattggcctgtcctttcctggaatttacatcgtcgaaggatggcatcaccaagatgttccgaaaaaattaatcacgttgtgctattgtggacatcttttctgccactacgttatcacgtgaggtcgcggttgcatgcacgcatgcttgtgacattaaccggcgctggcgtttcaaatcttcatgaaacagtcgtctgtactacagagggtgatgaaatgccccacaagcagattagaccacaaacgatcggatgttattatcggaaccaaaaacactcacggccaccgaaatgcacgtggaaaaagtgaccagatatatcctatcggacacccatgaagtccacagcttgcttgcttgctcctggtactgcggcctttaaagaagggttttggagtaacttcaactctagcagacaaggcccctttgaagagaaatagtatgtaagaaacactttcagatacatataactttagccaacagtttccgcgcaatccacgcgttcgcagacgccggcaactcgggcaacaggtgtatttacaccttaatttctaatagccgcagctcatcatcagttttgcggcagagtgagcagctggcttcaatttgttggcaatgattgcaagcgtcgtccaagaacaagctttccagtctaaaagctggagcgattttgtaaca

SEQ ID NO: 2636 - DNA, 3165 bp, Toxoplasma gondii
  source 1..3165: mol_type = genomic DNA
ttgaaaagaccatacagcagcgacacagtggttcaagagtctgtgctaggggaggcttgcaggttcctttcgccacttctgtaaaactcgggaagcagaacgggggaagaagacagtgacatctcctttattttctgccactgttactttcctttctgagaaacacagttcaaaggctgcgttgaagcacggtgcaatcaagcatcgttggtatgcttttcttgatgcgcaacatgtcaggcgtattccactattcttgttgcacacggaacacagaggctgcgcatatttcggcaagacgacagtctctatagttcccgatgtatgactcgaatgagaacaaccagtagctttctcccctcccacaaaattcctcgatgtacaggagagctggaaggtgaggacacttgtttgcgaggcaagatccggttcgctctgttccctatttttcttggttcgtttgcgctaagatgaataccatggctttgggggcagttattcaaacggaaccactcttatcctgaaacactcgcatgccgccactgtacatgcgggggcagggttcacaggaaaggggtttccctcacatttcctgcttcatacaaagtctacagcgtcggcggcaagcaggctagcagtttaaaatgctaacaaaagaagtatggatgcacaaagcaatattcttcagaagtctgcgggatgtcctccgaaaggcacaaacaatatctggtgcgtgcccctgcgggtgctacaagcagaaaggccgtgtagccacggatttcatggaaggcactttgcggaaataaaatgataaatcggtaatcagtaacgaactgggtttcacaatgtggtgtttgtgttcgtacactgatttcctaggaacacggaccgccaacagttctatttttgtttttttctggcaagtgataggctgcatagtatggagtgtggtctcgatgtgatgaagatgatggaacgtcgcatgagcgccagatatgtcgacgaacctcagtcatttgtgacttctgcgggatgctttgtggtacagataaagcctgcaaccgcagaatcgccaccacgtgacgttaccttgtgaaagtcaattacagatgcactgttcaacacaatttgacgcttcagcaaatcacgaaggatgcgtagcaacgactgttttgcctaccatgggacatccgtcgtttttctacagttccacaccgccccctctgaagtgccaccgtggagtgttgctcgcttaagcgtgtcagttgtaggcgggaggttgtgttagttttctcatggggaaaccgcatttctgcccaccttaaacagtttctcaaacatatcacaacgcgccggagggcggactggcacagcagcaccacattctacgtttactatgcctctccgcattatcacaggtaccctgttcttgtctgattgttgtggaagcgaactgtgccggactgttctcgacgcagcccttgctccttggcacacaagtcctagagatcattcttccacaacaacttcgttggtgtttttgtccagtttacctttcaagtctgtttttcaagcttcactttccttcacaatgtccgaagcgccctcaatgggaaggccaggccactgagctagactgactcgccagcagtctagccgttcctgtattcaaggaccgccgagcagggctgttgttcgtgcaacagatgaatgcccgtctgaaacgattgtgaacatggtgaggcgtttgactgaatcttgtgacaaatcctccagttcagtgcttaaatattctgccacactccgtggttctgcttccaactacaaaccaaaacggcaggtgttacgctgttgtactgttcttcattgtcgatctgtactatgtcgtcctgtaccagtttatgactttcgcagcgtcaatcgggacagcgtcatcctttccgtgctactgggatatctatagcttatgcagtcaaggtttgctagcgcccctgttcttacacgcttatactgatgagcgctcgctttaccacgtctgtataaaatagtcgcgtttttgatcaacacattgaatacgcttccatgcaatcacgtttaaaacagtttacgcctgtggaatcacaagatacgcttttcaattatccctgcttctgtacaccatggcgatgataagtggtgccgcggacgcccaagaggggcacttggatccatcaacagccaatgcattatgttccagtgaagagtaagcggtattcagaaaaaaaggaagtcagtggagacgattggtgaacagcgagggaacaagcgaaggaaaacaatactctaacgcactgggaactgataggtggccaaagaaatcgcacgagcaaggtaatcagggttcgcatagagaattcaactccaaaacaatgaaagagagccaaatgtcgcgagaggctgcagataaaaactgccgaggcagggaccgccacaagctgaggaataaacggtgcggagacaaataaagaggcaatgaatagatagacgttggtgaattattcttacgtgtgaaacagcggcgtcatcttttgggaaatcgacttctgatattgtttccacgcgcgatgccaattttagaactaatgagcggttactaattcgaggacttacggaaaactgttctatgctgcacatgctgtccgttgctgtcatacgtctgcagcggttatgaccatggggatctgccatctgtatcgaccaacccttctgaaggaaaacgatggcgtaaaccggtcagagctaccaggagcctcgtgggtgggatggttcgatttctttttcgtgatcctattgcgtacatccagaaaaccaaacgtgactttggaggcggttttatgctcatgctagcgtcaaactacctcctagttaaagggatggcatataacctcacacttagcgcctccgctccaatatttcgagaaatgctgcatttggcggccgagaagcacaatgttgcgtcggccatatatatgatcccttggtgtttgaaggggttcctggggacactgagcgatgtatttgctccgtctggctaccacaagcgccctttcatgatcgcatcttcactgctcggtgtaaccggagcgatacttatatacgcttctgcgggagacattgtcttttata

SEQ ID NO: 2637 - DNA, 2131 bp, Toxoplasma gondii
  source 1..2131: mol_type = genomic DNA
agtccgcactgcgtcgaaaaagaacgtcaatttctgcacagcgttgcggcttctgtaaccttcgcatgctctcaagctgtttgcgccccgcttcttcttcacacgcccgactccacagttttgactcactcatgtcctcgctcggcgctcgtttgagaaattgtagatctgtatctctccgaaattatctcgatttacataggctcatatttatgcttctacatccatacataaatatatgtatctgtatattcgtatattcttgtgcatatacgcacacttatacatattcctatacaatcgattggatctgtacacaaatatgcatatttgtatgagtttttatatgcattctatacatgcacatatatatatatatatatgcgtaaatatacacatgtatatatatatatatatatatggagaatactgctgacagaccgttgtgttgggtggtgtctgttttttttgtgtcttctcacgttttgtcgctgtgtcctcttttctgtgtgcattttccttgatggtgtggcctccactttttcttgcgtacgatgagtttcgtgcgtcgaccggaagtcgaccgcccgagagatttctcctcagacaagcatcgcaggagtttctgcggtagcatctgtgttggcgtggttgttcagagttccttcgttccgcgagaagcgaggaaataaaatacacgaggaaaggacgtgtcgatgaggcgcagagaacaccagagccggggcaagcaagtcttccgtttcgtttctgtcttcagacattccacttgactctgcggagtcttccaagttctcttgcgtggcgacgagtttcgcggaggcagcctctatatgggaggccgaagctccagcgacgccctcgaaagatttccgggtcgtcttcttttctctgaagatctcgactttcgccttcagacttctcactgcggtgtcgctcgcactgtgtggcaggaagagcgttggtggagcatggcgcgccagtgcttcctccgcgtcgttctctcggcattccgccggctctgcccgtccagcgacgcgagccatatgccgtctctctgcgcggctcgtcgttttttttcagggattccagcaagaaaggacgataaagacatgcgctcgaggatccggcgctctgcgcagcgtcaatcgccgcgccgttctcgggggctcgctcgcagctggccactcccctccgtcttcgcgtttttggcagaggcggcgcgcgcctgcgaggcctcgcatttctcgcttcgcggcagttgtttctccttcgacaaacgcacactcttttctctcagttgcgtcttggctccgaattttttcttgccaagcaccccggtttctctccatctccctcctcaccttcttcgcttttctctcgcacgccgggtccgcccccgttcccccaaggccgcttcggcgaggccatctcacctctccctctgctcaggcgtttctctgcgcgaaagagcgcgctcttcttcaaatccttgacttctcctcgtctcctctcctcggcttctgtgtcgcgccccgctgcccttgcccgacagcgccccccttcacgcgcgagcgtgtcttgtgcagcgaacttgtgttcggcagcggggcgccgagaggaaacgccgaaaggagaagagactcgccattctccacactccacgggcatttgggcaacttcacttcaggtttttcgtcgcgttcgccactggccaagccgcgaccgcgcactgcggctgctttggaagactccccggtggttctctgcgctctcctctgccttgttgaaaaagccgcaccttgacgcgaggtgtacatacacccgagaagtttctcgccacccttttttctcccgcttcgctttgccgcagcgcgctgacgactctcgtgtcttccttctctctcgcggacaccctggcgcgcctttccaaccacctttctccttcctctcttctcccttctcgacgaagactccgacctccgctcgagctttcctgcctctgccgccgctcgagactgccgagccgcgcgacgtacgcagaccgtcggagggctcgtgctggcgtctcgcgcgagtttcgctcttccgctgcttcagaagaaacgaaaaa

SEQ ID NO: 2638 - DNA, 2433 bp, Toxoplasma gondii
  source 1..2433: mol_type = genomic DNA
attgtgttaacagagccaccgatcttctctcgctgccgatacggtaggcccaggaactgcgtcaagtgacttttcttgcatttgaaagtgtgtttgcctcttggaacgatacacacttccctttcttctgtaggctgtgtagcgcagattctaacgattgctgtcagggtcacgatgtatgcactgtcatctggttgctgttcgtctcctggggcgcttttgaatttcttgcaagaaacgagaatctcctgggaaggacgactttcgcttgcgttgacgaaagtacagaatcggctttagctggaatcccttcgttactcgtgtgtttcttcggagtgagtgaaaccccatgtttttctagcgaagatccgtactcaagtgccaagcgcgtctacatggctgtttgattggtgttgtcggagacgggcatccgggaaaacaaagcattcagctaggactgacaagtttcaccgttgggtgtagtcgttgtgcgaagtgaactctgcgccttcgcacagacgcatgtctcatgcacgttcctctgcatctaccctaattgttggacactcggccagcataatcctggctcaaacgacaacacaaatgtcagcttctgctttcttggagctttgcgtgcttttcgttcccttgtcttggaactcaagcctgatgcagaggggcatgcgtcccggggcgccgaaacgggcaagatgacgacgttgtggaatccaaatcgcagctagactcgagtgttgttccatcagatgactttatagtcgagtggaggcttctatggatttcaaacagaaaatgtaattacagaaattccagcttcaggttcgcgaccgcgtctgcgctcgacggtcccgagcgatgctccagggtcgagtattgctgtttttggtctaagaaacatttgtgtccccataacagcatgaaagccttgacagtctaagaaaggcggcaacacgagtttttctttctctgctagccgaattcttctgctcgattcaatcgcttgcacattcgcgcgatatgcacgccgccgcggtcgccatgccgttttcgggtactcctccacgccggtttcccctttcgcttttgaaattgcgtctcgaggttttatcctgatgagtcttcccgtttcgcgccaaaagactaaatgcgtggcttcgtccagatatacaacccctggaaacatcgaattcaaatgccgaggggcgggatcgtgagctgaacatcccaagtttcgatcacggattcgcgaggtgttttcggggatgtcatgtacgttttcacaaggacgtttcttgcgacttcccttcaactcaattgtgacaatgcgaccactttgatgtaccgtactctttggtacggcactctttaccccatggcactgcctagctcgttgaccacagaaactccccgttttgtactttccttttaccaagctaaaccagtacgtttcgggggacgaatagacgcatccaccatgggaaatcaattgcttcatagctgctgcctcagaaattggaatcgaccgggcggttcggcggcgtaggagtcactcgtgcaaagcacggattccctcttggcgctaatggctcgggtgtctgtatacaacgaaaggtccagatcccggcctcccgcgcggcgagattcctcaacagtttctggtggtgaccttgtctcagatctggtctggattgagaactaacatttccttgaggccagtcaatttcaagaaaacgccaagtgtcgatttctgagtgcgattgtgagcgcagtgaccctgaagagaacctgctcctcgcatgcacggtggacaaagagggcacatgcagaaaaccgattcaagggagtggtaagccaacgaagaacagtttcagtctgctgttacctggcaaacgttgcttcttcttcactgaggtttcacccacattctcggcggatacaaatgctttgcttccgaagttcttttccactctgttccgtatgactctgcaagatgcaagaaacaaggattcacggcggttcttctaagccttcgagctgatgagttgcctatctcacacccggtaagagcatcgattcttctccctgggatttgtcgctgtccctccctttatgagccgattgacgtttgagtcgtgactgtgtcgcagcggaaaccgcttggtctccaacgaaaggattctctctcgttacgtctcgaccgtactgaaagtggaactgcaagtttgaatcgcgtccaccctctcggtgaagagacactctttgcacctgtcccaaatggacgcccaagaggtctctgtgcctcatctcccgcagcgttttcatgtccttctgtcgcagtctgagaacctcagcagcaacgaagtcgcacagcttcgctcgacttggaaactcaactggagggacgcgacatacaga

SEQ ID NO: 2639 - DNA, 3677 bp, Toxoplasma gondii
  source 1..3677: mol_type = genomic DNA
cgtcctcgtttccagactcaccagtgaccgccagaggcgtcattccaggagtcagctgactcgtcatcggcgtgctgccgtccttcccgggggtcatgccggcgccacccgtcatgggcgtcgatgctccaggggtcagccccgcagcagcggccgccgccatgtctgcgtccgagccgccgagaaccggcgtcgcgtcccagcgacttcgcttccgacccatgctgggcgtctgagaccctggagcgatcatcggggtcacgttgccagaaccagcgccaggcgccatgggcgtgacgctgcccgcgccagcaagaatcggagtccctgcttggtcgaccgcgggggtcgctccccactgcccaggagtgggagtttcctgcgcgaggtcgcggacaaaacacagcccctttcagaaaacagtgacggatattcccgagagactctgccacggaaaacgccatgaagcagaacgctgcgcacaagcgaatatttaaaagcggcggactggcgggccgcctgtccgtgaaaacgcttgcgacagttgtacacagatgcagtatagagacgcagtgacactgtccagattagagatcgggtttggccctcccattgagcgaaagcgcccccgggaagatacccgtgtagaacctgccagtgaggaaactaaaacgcaacaaatggttctcgcgccacatcggggaccgagaacaggacgcaaaaagaggcgggtgtctggcactttttcaagatctctcactcgaaggtgtgtaccccgccttcattcggtatatgccacacccagtcccaagcgtagtgactccctgctcacctgtccagtgcctccgatcgtgggcgttgcatcccatctgcttttctttttgccgggcgccgcacctaggcctgttctggcgcccgcaccttctcggctgtcgctgcctgcgacgagcggcgtttctccccacgcgccgggggtctgtccaccggcatggagcggcgtatcccagcggctgacgagggccgccgccgcagccgcggctccttcttcgctcttgccgccgccctgcgccttggcacgagcgagttcttggcgctcagcctctgtgaggccttcgtcctccgcgccggcggtgccccagtcccaccttctgcgcttcttttcggagccgtcccctccgccgagctgcttctgcatctgaagctgcctctggagctccgcgtcctcttgcagtttgcggatttgtcgcacagctgcttgcttctcgcggtccaagtgctgctcgagcatcacgtcggcgtaggtacgcgcgctctcgccgcgggacgccgcgcccaggtcgccgtcggagaagggatccgcacgctcgggggagagcgctcgctggaagcgctgccggcggtaaaagtcttcgcgggcggcgatcgacttgtctaccccagtcgcctccacgccgtcgccctgctgagccatcagcatgcgctcgcgctccgcgatccgcgccccatcttccgtcgagcgttggccgctgcggctcgcgcgagacaccgccgaacccgagccgccatcttgtgccaccaaaggcgtctctgcgtcgatttctgtcacgtaatgcgccgccggcgtctcgccgtaaatatgcgagtcaaaggcgacgcctgcactgtccgtcgccgccgccgttgacgacggctggttcttcccactgcttccgttgttctccattttgcgattgaacacaatgacaagaccccgaagacgctgcagaaggatggaagaaacacgcgcttcgtggcagaaggaaaggtgagaggagccaccacaacgaaaagaaccggctgtgacaccgacgggggttagacaacaaacagacgagagaaaaacgcttccctggattcagcgcacaggtgtttcgactgcagtccgaaaaaagtgtgatggagaattccctagagacacgtacgacgcatgcaagcaactgctttcacgcgtcgtgaggaaaacgaactgcgaagcccttcacctcgcgctgtgtgaaaaaggacgctcaattgcatcaaaacaatctaggagatgtcctctgaacagatccttcgtcgtgaagcgcgtcccgcaactcgtggcaaaacgctagcatccgatccgccttaaatgggcaggcagcactccagaggtattcacatccacggcggaggagaggcttttccctacaaaagagagaacttgacggcagacagagacatcagcaggagttacggccatcgtaatgcgaacatattcaaagaaaattagagaacaaataaagtgaaggaggtgtccgagaagttatgcctgactccaggaacctggtgactacgtgaagccaacgcgcggtgaagacgggcacgatatcgagacggggagccacagtgaaaccgacacttgggaaaaacaatgaagatacacataaagattcacttccaaagcacgatatacgaggatgagatagggagacaaataagagacattaaagtagcagcaggccggtgtcgaaagaggacagcggggcggtggaacgcgagaaacactgcacactcgtagagactgcttgaccgacagttggaaagattattcgaaaaatgcgatggtacgaaatccctggggaagcatcagctcttgtggcaacagaattttttccagaggcagtgaatgtttctgtggagggatgggccaaaagcatctagaacggggatagacgcttccctagaggaaccggataaacagaaatccatgacagtaacgaacagtccacttttgccggccaatagagatttccaccgctggataattgtttccttcttggttcgtgcgaaaaaaagaacaggatacgaggaggtaaggagaggaactgagcgagacggtattttgtaggccactcagacacaaacaagatgacgctttctgctcctgtccatgccttaacgaggatgaaacaacgaaaggagaaaagcgctttaatttcagcagatagcgccagctttcaaagcgcggaaaaaggcaactcccacacacctatggcaaagagaggaacttcgaacaacgctgaccatgccccagggacgatccctttcgtacgatgtgcatgcaccagcctgctcgtggttggggacgcagaaacatcagcgcactcacaagtggagaaaaaaaccttcgggggcagcggtggatctccggacaaacctcccaaaaaagtacaagagcatatgccagaggtttgagagagggtattcgcggaaactgatcgcaactgtccggtgcatcttacaggtactgttgtatacatggttcgaagccggagggttccattggctcttccagactctttgcgcagcgtcccaatagaaaggtggctcacatcctgttgttgggcccgtcgaaggaaagagaatgcgtacattgtttcaggtctttgtttcgagtttccgtctgaggtatgtcgctccataagtagaacattcacgctgcaagcccacggtccctgtccattccctatgaacagatgttgtgcgttgggtctggtagtctcggagaaaaactggttccctgctcggcgagccaaagcaggcactgtctatacacccgacgacactcgaaagcgtgcaatcgcgctaatccttgttcctctcatttcaaagcacta

SEQ ID NO: 2640 - DNA, 3155 bp, Toxoplasma gondii
  source 1..3155: mol_type = genomic DNA
ggcaagctgtcctgatcttgcgaatgcattgaaatgaacggtggtctggcggggggagaacgcggagagtcggactcacgctcaggtgaaaggagtgaagggaacggttgtgggaagcttgtgggacgaggagggagtggttctgggctggcagcaccttccgttgggctagcatacggtggcggaggatctttaggcgcgtcttgcacaaggccggaggggccgaaatcgcggggattgccatcccgattttcttcctcaaagggctcatcctccctcgacattgtgattaccgtacagaagatgaatgcgtaaacggtggcgaaaatgacagcaatcgcgtggttggcaatctgccgcttccacactggaatataagcgaaactttgctcgccctcgctgtcgggggtcaaagccgcttgaccatcaacgacttgaacgggccctgaatccacttttggcgctccctttgccgccacctctgttgaggtccgtcccagaaacagttcattccatctgtggcttgcacgacgcgagtttatcaccgcaataaccactgccatagctatcactgccgtcgcagccgccaccagcttggcagcaggcgccttggcaaccagttttttagccttttctcccctcggagacgaggctgcaaaagctgcgacccgatttgttggcggatgtgtagacatttcactcagtgtcgcgcgtccctcgcgtttgtcttccgccgtctttcctctacggaacgccgtggcagcaatcgccggtagcagcaagcacactgataacgcaagagcgaggtgaattattgagcgttgactcaggtatcgtcttctgaatggggttcgccctgcagagcgagactggctcctggcagagtgcgaacaacccgattttgaacattctagtgacgaacatcgatctccgggacagtctgaagttctaccttctgtttgtgaaaaagagttttccccgtcagttttcgtctctgcagacggtgttctgaagctccgtgacctgtcatggagcgcacccctgccgggctgatacctgctggcggcagcctcgtgaatgctgagctcaccacatgtcagaacagaaagaagtagacctaaaagaaaaacaaaacgagtggatgcaatgcgggatgaaacctccattcttacccactctggaggactgtgagaagtggaaggcgacactgcagagtcgtctacaagactatagacccatgcctaggctttcaagcgcgtaaaacacagtcaccgccaagcatttgagtatcctcctccctgcgtcaaaccttgagctccgtggcaagccttttcgaagaacatgatcacaggactcctatcccaattacggtccagtgccaaccgttttcccaaatatgcatcaaccccacaaaaatggtacaacgtgaggcgcactgttggtggtttccgagcgacatttttgaacaaagacggaagcctaccaggaaggcaaaagagtttcagcactccatctcatttacaacgtcaactgtttaccacgggtgttcccgcagttgagcaccaccgtttaaggagttgactttcccggaggggctctccagaaaactcagcactcatcaactcgagacatcgaataaactccgaacacttttattgcaagttgtcgaacgtttcgaccgaagcacgtgagttaagttttaacgcctcgacaaaacaaacgactggagacgaaagaacaccagaagcaaccgaatgccccacgagtggaaaattctgttccgcttcaacgagaggcatccgaagcattttgaacatgggaccaacgggcactgtagaagggacaaaacatgtcaaaaatgtcagtcttaacgaaggacatatgcatcgcatgtctctgcgtaaagacagtactgtatccatgaaagcccccgccaccggccaaccgtggggcgctgttgccccacttttccctgttcatggaacagggccacaggtcagcatggcgcttcgtgaatcttctttgaaggtacttgttcataatcggaaaggcgaactagcagtgacccccaagaaagtacaagttcagttcctgcggaaggcaactacaaaaaatgtaccgacagactccgcctgtagccggccgcccggcactccacgattgtgcctgctgctcgccagagtcgtgccccgacgtggcccaatcaacagggaaatcgaaactacatcttagatcccactgagttcacctttgtgactgtcttccccctctgacgtagagccaagcgccgagggatcgtcgtaatcgagggtctctgtgtgccggcactgagtttatcagcctgcttacctaatgaaccctgtgaaatctgcagatgtgccgagacgctttgtacaccagggaacctgaaattgaaaagagtcggtcggaaaagacgccgtgtttccagtagtagccaaccattcacgggacatgtataaccgaaactctcctcgtctctcttctacatgaagggcaccacaaatgcccaaatgagaaatccggccacacgcgcacgaagacacggctaaacttcactttccaatgtattatctttaactggaagatgccatgcggtccaggtgctttggaacgactcccagtggttgtggacttctttattgagtgcggtgtgacgaacactaccagctcgaaagatgctgactacaaatcgctgtttaaaaaaacagggttgaccggtgttgacccgcagtaacgagtttggtcgtatcctggatgcatgtgatctgtcgtcaccagacaccgcacgcagtacaaccgccaagagtgccaggaacgatctgcccatgttgttcacaacacctccgtaggcgaagaattcacatttcagcaacgtatcaataactctcgaatacagattttcctgggtcaggcagttttgaacgtccgttttgatcgagcgtttctgagggttcgcccgtgtggggtaggcgtttggctagctctaactcctctccgtgacgtcgtagtcaaaacacataaaataaggttctagcgcagtggagagtctaatgcaagttcaaatctttctacgctctgttcgcttttatgaacaacaaccaaacaatttcataaaaacacaaatgccaccaaaa

SEQ ID NO: 2641 - DNA, 2703 bp, Toxoplasma gondii
  source 1..2703: mol_type = genomic DNA
ttgttcgacttcgctggaacggcagattccaagctaggcgtgtctcttccaccgttccgtacagtgcgtctagagaacgtcttgtgagagaacggtggtatgaaacagagcggtttcaccacaggtgaagacgcatctcagctcgaaggaggcacttttgttggaataaaccggtacgcggtttctgccaacacagtgctatacgcgaaagccaaggaaagctatttctgacagggggttcacagcgacacccgagcgtgaagctcccagaaaatactgcaggttcaggagcacgctgagcagctgtcaaggcaggctgtgtgtggtgagacgctggacacacagagctctaaaatcaagtctgtatccaccatccgcacctgtctccgaagataaaccgaactccgaagtccgcccgctcctgctcaaatcctgcagaaccttgaatctgcgagcaagcatgcgtggcagacaacacacagactgctgcacatgcgccagtaaagttttagacacccatgcatacgcataggaatgcataccgcaaggcagctgctccaatccgcacttagtctagacgccagaccatccgtttgtatcgcggcttcggtcctgcgagcaaggaagaagattctgctgggggtttcgtctggcgttccgtcaacgacgaccacacccggggcaatatcccgactcgcgcggtgcctgattccctgcagttctccgggaggcgccagacttcctgtaccggagaccgaaccaacatttcgctttttcaccaccgaaagtttatccttcctccttctcgtagagcttttttttcttttttgtggacttaccatagcggccattttcccgttgtcagaaatcgtgacaaagattttgtcagaaaacgtgacgcataacacggcgacttctttcccctcgaccaccagcagtttctcctggactgcaggagtattgatgccttccttcctcatctgctgagcaagaacttcgtcctcctcctcggtggaatgtgcatggtctacttgcctcccatccctggcacctgctcttgtgcgttgttcctgcgcacactgtcctgcagcaattgccgccgctgctgccgtcgggacttcggggagtgcagctgcagcttcggcgattacagcgtccatggtgggctcgggaagaaagagtaagtgatgttctctcggtcaggacgatggccaatccctcccagtggacccgcagtcgccgcggacgtctggacggtgcaacggcagaggagggcgcccggagcaatgacggtttggtggagaaaatttagaaatcagggaaagcggatggaaatgtgccaggtacgagggaaggaaatgccttgtcgcggcctggtcaagaccgaacccgtgggatctcatacacccccacccagcaaagagtattcgaaatctcttgaagatacagaacagacacagagaaagtgatgttggttttacatcatgaaagcggcagtgtgtctggtagtgtacagcaagctattcggttgctggattgagtgatacggaagtgtcgagtaagcttggtagagacgttttaaactgcgtgttgacggccgagaagtctcaggcagcggtatgtttgctgttgtggcgaaagaagagcgaaacgcggtatttccctacagatatggatcgcgttcaggatttcgcgacacactctctcggcgccgctgcagcgtacgagcagcccaagtcgctgcgaacgcggaagactctacccgcaaatttgccgagtccgttttttccgttttgtgtacagctcttctttctcacttccgcttcaccctgtgcaaaagccattctaggagaggtattgggatcctttcttgtctcttcgtctcggcgaagaagccccttctttccacgccatgcagagaaagccgctcaaacgccgcccagtttccggtttggacggcgtatcggctgtttcgggggggctacggtaacacgaggtagaaggtcgcgcgcgatgccctgcaaggactggctggcgaaatgctgcacgttgctggggtttccctcacaaggggggcacacggtcttttcgcatgcatgcactcagtgctcaattcaggggagtggaaagcacgagcgaatgaaggttgtgtcgtgtgcgcgagagttctgaggggaaagcgctgcagggttttttggcgtgtttgctggctggaaatcgcgcgcgacgggaccgaggactttcgaggtcttttctttttctcaatctggcatcgccagaaggtgtcagtcttgcggcggaaattttcaccggggcagccccgactttcccgcctcgccactgagagatttatggtactttgaatcgtttttcagcccccacgacgcgttgccgttctccgcctgtctctcttatccgtcaccggttccatttcgtccttcgtttccgtagcccactcccggtttttccctctgtctctcgaagcctctgtctggtccccagtcgcaaagcttgtggggggtcactttttcttcacatttttctcccttacgcagtcacggagttcccctaaccggctcctcagtccttctcgtcgttttctcttccccggccttttcccctttaaccagggtgtctatcgcggcttttcggcgcccgtcacgtcccccctgatctccgcttctgctcgcgcctaccgcaaga

SEQ ID NO: 2642 - DNA, 1810 bp, Toxoplasma gondii
  source 1..1810: mol_type = genomic DNA
ccagattggtctagtgttagagttcaaatgtttcaagctatgtgcctcgtctttatggactgagaagatactgatgtgctgcacacgtgcggatgcttcgtttacaagatgtgtagtccacagcgaacgcatgcggtttcctcagcattttcttgtgggtcgtctctgcggcccaggtctctacaggaaatggtttttttattgacgatgcatgtcaccacgtttccatcaaaaacgggaaactgatcatctttcgaaaaggcttgatgcaccgcaagcctctctgcggtgatccttgcagacgcttggcgaaaccgttgctgttgaagtaagagtgaagtgtgtccgatgtctagtttcttgtctgaaaaactgtatgcggccctccctttctcaacggatatgggagttcctgagtaatcatgcaaaaaacgaactcaagtgtgctgaccttcttcagctaaacgtgttggcggtgtccccatggtcgaggccatggtcacagatgttgtttcgcagcaacacgtgaaaaaggaaggctcttgtcctcgtaacttctagtagaggaaaaacgaacttccggtgtgtggctttcttgctaccttgttgcactgaaaacaaaatatgttcttcgtttcaaaaaaacaccagccagtggaaaagcttggaaagaatcaaacgtgaagcccccatagtcctttctcgtctttcgcattcttactccgcgtcgtgttattgtgcccctgcttgctcttgttcttactggtagtctaggataagagttccaaacctgtgccgcagcacaccctcagaacgccatgtttagctcttacgttgtctggagtcaagccacgaattcttctgcgcttgtaggtgcgctgccctgcaatcgatgcacccaaattaccaccgcacaaaagactacatgcacgaagcactagcacagataccgatgaacccacaaactgaaatccgagacggcagtacaccaaagcagctaaaacgtgctgcttttcctggtttgttaactccaaaaggatcgttgtaattcctcgacaacaggttagaatggtgttgcgttgctgcgcgcttaaatggcatggggtggtttctgtgtcaagtctgtgtactcatcaatcgcacttgcgatccacgtcaggtatatttttgtcgttacccaatgcgcttaccgcatctcagcatactacaacctggctgcatagattctgcaatgcccaaaagaaagtgtcaacatgctgacggcgaccgcggcgcatatgtcgtgcgtgtctactttttccgtatgctaggagtccacatagggacgcacatgacctcggccaatctacttatccacgggtgtgtacgtacatgtcttccgctttccacgtcgaattcatcttgtttctgattaatgttttcggtgtttatcggatgggggccttcgcacggttgcaggcgtttcaattgaggacgcgttacgtttccccgtgtgctggggtgaccgtcgaagggagagctgcaggtgcccccggcaggtggcacgtgctcgacgcggtgcggaaagaggcacgggaaggtaccgttgcgctccagattagaggagcggcggcaaagggaccttgactaatgatgcttttccggaccttgtctttgtgcgtgaactgagtgcggagctagtaacccgtctcagcggtgatgggaacaaggtttgtcacggcagcatacttgtttttcggcaagatacacggacagctttgccgcatgactaacgttctttacgtagaaggagcgtaataaatttgcaaga

SEQ ID NO: 2643 - DNA, 2126 bp, Toxoplasma gondii
  source 1..2126: mol_type = genomic DNA
gttaaagccattaaaacacactttccagacgaaacggtgttgctcaccaagctcggagatttttcatggtagctgggcgactaaaataatttgtgtttttccgaacctggaccgcgtttacgaacagatgagtgcgcctcggccgccgggagctcgaaaaccgtaaagatggtaccgatgacctctgtgagcgtcaaacttgtgtccgtatgtgactctctacactcgattgcaaaacaaaatgcacggtcgcagctatgtgtcatcccaattggctttcacacagcgtgtacacgcgtactaggtgcagcgcatgcgtaagcgtacacatgtcccccgggggaagttgctgcttttttttaattcgccgagacgctgactcgtagtagcgtttgttaagtccgtgaccgatctgaggaaataccatgcggttgctgccgtgtatcggtggggtttgttattcttcacgaatttcaaggcatcggatgtgaatgcagggtgtggcagcagtttggctgtcctctttttattcgagcgacaccgataacgatagcccgtgcggagagaggtatgttggtgtggcagttgtaagcacgtgtatcgtctcccactgagtaatggtgcaaggaaagaatacgaaccggtgtactttggatgctgcaaaggggacgcggaagtgtctgtttaggctcgccaatcacaagtgttaaacctggatgggggtttcgtgtaaaggcgacttacgagagagccaagcgccgtcaattcagcaaaacaaacgccaaatgaagccagccaccacaacggtggaacttcaaccttgtcgctatcaagtccgaatagtgtgcatggtcgagcaggggtgtatggtatttggcatgggagggaatttcctttcgctatcatttttcagtgcgtgaaaagtgggaagcaccgagaagcacacaatttgcaggggttccacgtagtatacacgtacaatagtacgctcatgtttcgtgttgctgcatttgctcggtatttactgactcgtgcagatacaagtctccggtgattgaatgaggtcaaccgttgagcactgaggaacattgtagttatgaagttagagtagcggattatctgggaaattcattagcaaagtagtcagggaaagagtggagctgcacgaggcgttcggactcacgctttgttgcacccggcgttgatctgcactgccactggcgtgcaagagagtagaagggtcacccacgaactgcgatagtatcgtgcaaggggtttgttgctttttcttagttacgatgagagaatttgagaggcggcaaaaactggaggtggtaaacagtcatgaaacgtgaacgcccaatttgacctcgtcagtgggctgcaaacggcatagctgaaatagtgagacacgaacgttcgagacagccacaatcatccagaccacgtttagtgttacgaccaatgacaccactaataaagtgatattttgtttcgaacgccatagaaggcttgataacggaattgtcatattcgagatgcccttcgctaaagccgacttggcgcggtagctacaataagggctatttgcatgacgcatcttccatgaaagacacacgtactcgtagctggacggcagcgagcatccccaggaaactagtaatcacatcgtgagctgagccttagcgagcgtagcgtctgctcatatatcacagaattttgcctacaattgtggcattgtgctggtgtttcgtgcgtagtgtccctgtgtcattgtaaaattgggcaaaacgaacagagacgcagctcgctgtggctacatggctctctactgcatttcaaagacacaggatccaaagttgcgattgacagaaaatgaaagcatttttcatgtcaggtgtcagacacgcacctctgtgttgtcttcaatcacaaatgtttggccttataaacacaccgcgcgatctagaacgctcgttcgtctctgctgaaggacttctttacgcgccatacaatgcctccgcaaggtcactctgagaaagccgctgaagtttccctgtacaaacggggtttccagcctcgatgaatttgggacgcctcctcttctctctgagaattctcgtcca

SEQ ID NO: 2644 - DNA, 2481 bp, Toxoplasma gondii
  source 1..2481: mol_type = genomic DNA
cttgacaagctcgcagctgagcgtctcggagaaaagcgaaatagtgcgaacggccaccaaacgaaagcgtcttttcgacggggcgccgagtcagacgaggaaagttcgctttttgcacttttatcagagggattcgtggagtgttgtcaggacggttaaatggtcgacagggtgacagctcgtaaagacctgaaacgcgcgttccgttcgtatatattttcaacacgaggcgatcgaagtgtatatacatgccgcaagggtgaaacgtctaggtgtttctggatttctgtcgaacggccactcctgtccgtgtcaacctctcgcttggtagatgcgtagaggactgaaaagtaggcggcgcctgtggtcgtggccctggtgtaaggcagaagctgtcaaggttacctatgtgtcagccgagtcatttcagggggaacaaacgcgctagaatcacggtgatctgccagagccaaaaggcagacgacactcaacgtgcagctacgatctaacggaagacggtggtggtacgtacataccgggtcccagcagtccgtaacgctgcaggtaacaattggggaagtactgaggatgttcaccattttctgcggacgaacacgccacacttcttttgggtagaatcatgggcaaagcacagacgaagagaaagggccacaacgtttttgaggaacgacggcaaagaaaaaaacaacggtagtgtccattgttagaacgcgacacggaaccgtcgaaacgaacagcgcatgcactcgtgcagcagcagcgatctctctgctacagccgtgccttatctgccttcgaaacccagatgaggggacggttgcaaaaacagcttcagcgacttcgacaagacgttcatgtggcgtctgtgacagaagtgcgtgtcttatctctcgttggcgcatttctaataaagactgcacgtgtcacgcaaacgaatttagacgataaaataataccggactatgcatgcatatacctacgtcgccacgtgcaagacgcttctcgacaccagttgattagttcctgttttccgggctggctttatatccatcacaatggtgcatcgctctatcataaactagagcggtacctacataaacgaggtgtggctctaacgcagccgtagcgccactgcgtcactcagaaaggcgtatagttgagatttcgtccccgttctggggcctcgacagcgacgctgctgacaaacacggaacgctttgaccgacgggaaaatccaaaaagacgacactggagggatgagctctgagagcgtgacttatgcagcgcgcttcattgaagggttcaagggaaagtacagggtgcgcgaaggcacacggaaaggacaaccgtcaccagttggacccatacgaagcgatcttttttcggaacaaaacttcgcccaaattgttattttcagcacagcacgcaaggatcacacgttgaattaggtcggacgacatatttcaccataaatgcttgtttcgctaacatgcagacggttgcctcgggaaccgcgtggctgtcggttagagtcaaacgtttcgctgtcgtcagcatccggacttgttttgcttcgcttttgcacatccttgggttttcgtatacttttctgtctgagtccgaagttgggggaaatggtgaggcttcaaactagcaaaggcgacgattggtgtggccgccgaacgaggacaccggatgtgtaaagagtgtccaccatgggcagttgtgtaaagagtcgatgatcttggataaaaaaaacagtgtgctaccaaaggcgtcaatgccgcaactgcgaaggattttctttttgtctgaatgacggttggtttattaaatgctatgacgctcagcacgcctccgattggcacttacaccgtacaatagcagtgctttctgcaggtgcttggttcagtgttttcttctgagacataattatgtgtaagaaacacatgcaaaggattgaatgagtgtgttttcaactctgacaattgtgtgtcatactagaaaactctacgaatgacgtgatgaaaccggtctcatcaataatcgaagctcaaaatcttgtatccatctcgatgtgtatctctctccgtttgtgaatatacagatgcatgcgtacatgaacatacgtatatgctcaggcagataaaatacgaaacttgcatgccaacgaggggtcccactacagagattttccgtctgagaatatcgaagcccccagttctggttgaagaacacacgatcagcgtccaccagggagccgtagaaataaggacagcaagcgcagtcgtgttgtccattttcttgttggggtgcagaaaatcgcgtattcgcaggagcttggctcttcctgtttttctgttctcttcctgttccccacctccctcctcagcactatcctatttacccgtgactgctttctttcgcaggtacacgcagctttcgcgcacgctggtcata

SEQ ID NO: 2645 - DNA, 4689 bp, Toxoplasma gondii
  source 1..4689: mol_type = genomic DNA
gccgacttccaggaaaaccatgaagagcttctggtcctctcgggcgcctgcttctgcgccacagcgtcggcggaggttccgccgttttcctgggcaactgaggaggaggctgagacgcttgtctcagcctcgatcgcgaggtcgtcgatccgacgtctcagctcctccaccttcgctttctgttcaggagagaaaagcgaagaaggcaagtcggagaggcgtggagccggcttggcgagtaggggaggcggacctcctctcggattcgcggctctcgactgcgactgctcggtcgcgtctccttgttctgcgtccgctgccttgtctttctcctcgtgagaaggaggaactccaccagtccctcccgacgccggaggcgcggccgatactgacgccgcgcctgacttctcggcagagaatcccccagagctccctcgagagacgtcgccggccgggcaaggctctctctcgtgcggcgcagccatcgcagacacaaaagaggaagaatccaaggggagaaagccgcagaaaaagaagaaacaaactcaagaggcggcggaaggaagaggagaagctgagggcagaagaaggtgagaaaagaacaacgagagagaaagagaaggagaaggtgagagaaggagaagcaaggaaaaatgaggagagagagaatttgaaagagaaggacacgggagcgataaagcagcccaagccttcgtttgagaaatgcacaaaacccagagaaaagagcagagagacggaaaaacgcggatgttatgaaaagtacagcggcggagagaagagaattggctgagttctcttttttcgaaaaaaccgcggaaggcccgctgaaggctgcacgggagaagcgaacgccgagaaggctcgaaacaactggaagtaagcagggacaaaggggagcgagaaatcgccttcagtccggggacaaaaagaagtcgatttgaagttttttaaagccgagaaaagccggaaaaccgcaaagaagagccgcagctagttgcctggagcccggagtgcgaagagattcctttcgcttgaagctcgagagagaggcgctcttgagtcctaaatctttgcgcagaaagcaggaaaacgaaagaactgaatgtcatttctctcagggtctcgtacggaagaacgcgtttctgtcatctttctcttttttctcaaacgccgaacgttaaaatcagacccgacagcgttgccctgctgctgcctgctggctaagcagcgtcccgattgttcctcgaacggtccgcgtttccttacttctttccagcggaaaagttgagagcagtgaaaaactctctttcggagttccggcctctttcgctgtggctcttcacgggaccgacaagcctgaaggttttcaccggaaccgagttaaaactcgtcgtttctcacgcatggggaagagcctccgcgccggggaacctttttttcgttgggaggagcgcacaacgacggggaagtcaggaaggaaagccggagtcttgcaggagaaaggcagctacgcgttgaaaagaaaagctgctaaacgcctcgagagtcaaagtcggccgtgcaacaagccaagcaaggaaggagcgttccggtccgcccgagccgtcgggtgacccccgcgattttcgcaggggcatgaggaagcggcgcagaccgacaacgagcgcggaggaggcaggaaacgaaaaggggaccgggggacagagcggggaaagttcgagaaaaagaaaaagaaccgccacacagcttttcgcaactcaaccatgaacgtaaaacgcgccgaaaacgacagagaaaacagtcctacgcaggtcgtacctaaacggagaacgtggagacgcgaactacaccctgcggagattttttcaggatgttcaatctcccagagtctctctttcagtcgaatcaaaaagagtcatcgactacaggagtcctcctctgtaccctagatcttctgtatattgcgtaggtttcttcgattccccttccaccactgcaagacagaggagatctctctgcagtcactgtgtatggaaagaaccgtggaaactgctgtgtttttctcgcgtttatccttggtaaagaatctgacgaggctccgacagcaacacggcttagaaagacagcagtctggaggaacatgcgtcgtttccgacacagttttcggcgatgtacacacaccaggcttaactccttcgaaggtgaataggagggtacttggacaacttgagcatttaaagaaatggtggctttccgaatgcagtgctctgggaacagtctcctgaacgacgttagagagtcacgaagaggacatgaccgaagtcgcatccagtaaacgaagcgtttcaacgtctttacaaactccacagagaagactgtaaatagtcttgtctcaggtactaccacatcccgttagacattgttttgcttcgtttcttcggctttcttttcgttcgaaatcccccctcccccccagagacagacgcgttccccaaggggcgtgaggaaggaacgcaccgtcgtctgtcactttctcgctctctgtttcttctccccgagattggtgcaaaggctggaaaacgagacacgagcgagatgcccgagtgccttgagcggcggcgaaactcgaggcgtccaagtgaatctggaaaaagtagactgagaaagaggaaccgtttacgtgtgttttcatttcccaacaggttctcggctgctcaaacgcgcttgccaggcttctcaccatcgttctcctggctttcatgtttgcgtgagctgtttcgcgccagcaagctacgacctccggtcactttctcttctgtgcagtgaacagacaggtagcaggaagcttctagcaattttttcggtgaggtcagtagagctctctgcctctgtttcgcatgaacctgcacacacctatcttcctcactggatgttcctctgggtcccctttcccgaagcaggtagcatcgtttcttcaactctgcatgtgacatttccttttcccggtcttcgtgctcctagatcgaggcctcgacgcccatcctggagttcccctccgttcagcgaaaaacgtggagctgctcagctctgaagagatggagaaaaaccgggaaaagccttctttttccggttcatgcagactcgctgacaagcgtgcattcactctgcttgtgccccctttgagaacaacgtgactttcctcaactcgaacggaaccaacaaaggcactggggctttcgggagatgtgagaactgaacttttcagcctcgtgcgtcttctcgttatgctttgtcgagagtggagacacgcgtcgcaggcaagtggactgtgtagggggcgttgaaagtttttcgtcttcctttttcggttctaactgcatgcgtttcggactttgcagagcgcagtgggaaaactgtcctgtggcatatgcagagttcactccactcctcgcctttctcgacatcgaggcgagagaaacctcaggcgttttgctgcttctgtaaaagtaaaggccgaggagaaagcggtggggggtttgtggctgacatctaaacagcgacgttcgcggatctcgttcaagcgaagctggtgcctttcctttttctggaaacgtttcctcggttcctccctcgctctctctctgtcctcttaacctccctttgtggagatgagactgagatctcatgctgcctgaagcgctccggcggtcgttcttccttcttcaaagggcaacgccgttctttacttcgcctggggcaccgtgaggggagaggtcgaggcagcgaagaacagcgagggggcgaagcgacggagcaggaaacaaggcaagaccctccgcggggaagaaaggaaaaaatggaagaggcggcgtcgaaaacgactggaacgagagatcggcagccgcctcggggagacacacacacacccaggcaaagtagaaagggagacacagacactctctgggcctttttcgcgtgggctgctgaaaaatgctgtgcatgcgcatgccgacctgaaggagggaggtgaattcttggagtcgaaagtccttttcctggaagaaagtcgaccagtcgcgccttcttccctccatccgagagtacgaagactccgaacgacgacctccgtagctcttcgccgttcggttctctctcccaggctccgtccgcggccaggctctcactccgtgacagcctctcgtgagggagaaaggagaaagagagaaaggaaaaataagataaaaggggaaaggggggagaagaaggaaaggaaaagggacgaaaggcagaaagaggctctgttgcatagcacactcggtataaatatcggagagtctcaggcttgtttcttgctttcttcgctgcaaccatttctcttgtcgactccggcgtcctgcgtctccctgtctcctggtgcgtcgtcccttctccacggacgcatcgagagaacgaacctttttcttagtcgactgtccctcagtgctttcttttcctcgcaaaaatccgctcgctcctcgtcgttcgctcgtccttggtcttctttcttcaccttctcccttccctgtgccggccttcttcctctccttcctctctccgtctcgccttcgtctccttcctcttctggcttctcccttcgcgctttttctgggtccttcctgtcttccgaga

SEQ ID NO: 2646 - DNA, 1168 bp, Toxoplasma gondii
  source 1..1168: mol_type = genomic DNA
gaaaggaagcatcgcatctgtcacacgaggatcttgaacggtcgtcgcctggttgtccaagtaaacgggtcgcgatcccaccactgcttccccgccgctctcaaaggctccagatcccgaagaaggagaagaagaagaagaaggaggagaaggagaagaaggagaaggagaagaaggagaagaagaggatgacacggaagagaagggagcagctgcagacgcgaggaaaggggagaagaggtgcaagtcagaagcctgtgggtgttgccgtgaggcagagggcaggagcgcgggtgaagtagcgttccaggacctgcagaagggggagttttcttcggtgttgaacgtcgcgagcgtcgctgttcgacgttccctgtctgcgaggtcaggccgggacctcaaaggacctcggtgaagattaagaaagctccttgacgacgcgcgcaccgctgtcgtctggagagggacacaggacgcagtcgagaagagagacgagagaggagagaacgaagagcgagacgaaagagaagaagagcgcgaagagaacacagtgagaggcggaacggtggaaagagcatagcagcgacctctgcagggcggtgcggccgcgcaggcgactttcgcgagtcgactcatcttgcacgagagatccgcgggagctggaaaaatccaagaactcgggggaaaacggagaagttccgggaagtgagagggagggtgtgaacacacaaaaggcgcgaaggagtgacaaaaaaaagaaatgcagcgccaaaggagacacacgtctctgccttgttccgtcacttgtaggacaagaaagctactgaggtctctatagacacccgaagctgcgagcttctgctctctgcacaaaacaaacgaatccgtcgggaacgaagcgtcaaaggcgcgagaaaacgcgtttttcgtttctccggcaaaaaaacggggaaaagcggcgaatcgcagtaaagtcgacactgcgaaaaagtctgctggggtaaaacgagaagaccgtctgcgcgcgaggaagaggaaactttttgggtgcgagaaccgcgtcgcgatgcatgcaaaaacgtccacgagcggtgaaccccaagccgagaaggaaaacgatgttcgcagggtggagaagcgagcgcaaaattgcctttcttcagcgaca

SEQ ID NO: 2647 - DNA, 3847 bp, Toxoplasma gondii
  source 1..3847: mol_type = genomic DNA
ttgtgtcctatgtctccggctacttgctgctgaagtcgcatcaaggtacgcgcattcgccaaattgatcttcaacagttcgttgtgcaagcatatcaggtcgggcagcatcgcggagaaatcggttgctccaatttgataagcctgctcaacagggattccgtctgcgagcatctcccagtcccatgcaacgtagacatctgtgacgcacgagtaacagcggaggtcaggactcatgagcggcgtagtatccctacttctgcttcccatattttcacacgtattaatgtcagactacgatcgggctagtgcagttaccaacaaaagggtttggcctgtggtcgagaatgacgtggactgtgcagcagcagcataagcgaaagatcttgctcacagggggttgacatcgcttcgtaccggtggcagaaaattgatatgttataagtatctatctctcgcttcgcgtgaatgctcttgcgacaggtgggccatcttactgctacacagtaccgaaagatcaatatgtgagtcgtaagtatcggacccaataaagcactgttactaccagaaaaaaaaccagaaaactgacctgcgtatttttgaaaatagtccaggaggcgcagcacgctactgactgggcgcctgatacgggtgtatttgccgagggggtcctcaagagcaggttgattcatcggatcaagagcgtcaattcgctgctccaacggcgaagtgctcgccgatgtggccttgctcgtcgcagctctcttcgtctcatcctgagactcttgttcaagagagtccggtaacggcggcttggttaaaaattgtgttcggatctgccccgatgtacgcgtcaatgtacgttctaggcctttaaccgcaccctggaccgataaaatatttggtaatgtctcgatgtagtcgttgaccagaagtggaagcaacgtaaccggtggcgggggcagccgtcctcctccccgaagtgactccatctttactaaggcagaaaacagcaattgtcgttatgcatcgtatctcgcattgcatcttgttgacacgacacacttgaaccgtaggtgttacgacacaatcctgaagcggttgcgttgtgttgaactgcacaatgcagcggagaagatgaccctgtcgggaggcgggaaaaagaggaaatggataactgtaacagcatttctgggtgaaatggttgcgaccagaagatacatggcgtgcacacacagggaacgttctgtcaagctttattaatcctcccaacttcctatattctgtgtccctcaactcattctaaacgggggtcatggtatcaatggcgagagctggaaggacaattcttctgtctgaatacgccatttgtacagcatactaacagacgtacaatgacgaattgcagaggtttcggatgtgtacaacactggagcaaacgcggtatcctaatccttgggagaaccggacatgcgcgcccgctggaatgagacgccaacccatcgagttattggatataaaaatttgcatgtgcataatgatatggtttggcgagcttttgtacgaaacaaaaacagtttgttctctgcctgaaacaaatcaaacgactgaagtctgcccatttgcagttctcatcgaccgagggactagctagccgccatacgacaaggcaagagcggaaaaaatgtggtggcaacccatattaaagttcgaacttagagctcttcacttaatgctccctccccaaatgttgttttccaaaggaatatgcggctcttgtggactgctgaagtgtgctcggtagcggtctgacagggtgacgcaaggttggcggtcaccgggggtggagactcacagcgctcacggcaatcaccgatgttccttggcatgacatgacagcattctagaggtggtgttgctagtactagaagagatcttgctgcgcaggtctgcttcctgcaccagaatgggctggatctaacaagccacacagaacttccgacgtctggcatacctcaaaacgccgttagtgatattctttacttgatcaatgaaacatctcgacgtctggagcgatcatagcatttgagacaatactttttcggttttcaggaagtattccgagtcagtcgcgttttttacacaacgaagtctattgactgagcagtgcgtcgtgttcccagcatccgacaccacacggatgtaggcttggtggtttctgaagcgagcctaccactagaagcgttcgatagaaagtatgctgtcagagaagtttccgttgctcatcgaagatgcccgtgctatttacgggcgtgagtgtaagcattcttccctcgggtcagtgcgcttgtaaacgtattcactaccaagatgctgattacagaacggccaattccagactggcggaatccaacaggcactaaaacgggttgtttctttttgcgaggaggtaatttacagtgatttagctgcgtgagatgttccccgaggcaaacactggacctcccttttgcagcagaactgaaggcgaacggactatctgatgactttccgcttcggtcagtactgcagttcctcgatgcgtgaatgactgacagtggtaaacgttttgtgtgctatcgtttacggtcgcctaatggaacaaatgctctctaactcctccgagcatgcattctttccacctgtaggaggttagttatttttgctttcaacttcagctgagaccgaagataagaaacggttttgagggtcgttccctctgcaaggatatagctaaacagaaacgtttgctggtttttgttcactatgcttcgttcttgtcggtgtggtcaatactttttttttctcctccatagaaatgaacagcgtgtgtggcctctgagtgacatgtggatgcatttaaaaacgtttgtggtttttgctagaacgtaaggacaacaacgaagcacgctagtgctgccgaacgtactttgcggggacccacatccggcagcgtgttcggcttggaaacagctgttagagcgttagcaagaaggtttcacgcagggaacgaacgaagaaaagctctgctgcgttgactcagcgtctttgacttgagtcgttccagtgcttcgcttttgatttcttctttgattctagcccttcacgtttttcttcaacagcgtccacctcactgtagcggaccgttgacagacgctgtggtcggagaatgagacaaattttgctggtttggcgcgttcggctaccacgacagattcacgcttgaaccgtctggttccctctctccttcttgactgcatcgactgcctatagttatttctgtaacggcggtgcttggatgatgatatgctcgggacattcaactgtccaaactcggccaggcacaaagcggtttctgttcgtccatggtgaaatcacgaagaagacatcgatgctttgccaccagcaacaggaatgtgccgtttttcctttcactataatttcccatagttcttcgtgtatgtgctcgctggaattcctgcgccatagcgactgctttaaagtgttccatggtgtactacaccctctacccgctgccgtatcacaacgacacgtgcggcatttgcgaatgtttttgacagcatgccatataacacgtcgctgatctcgaggaattggtttctacgatctttccgctcttcttaccgggttcgtcgactttgggtatctttgccatactgaagctccgtccttgtctacgcttccgtagaactgttcctttgggtcgcgaaaacgtgtgaaaagcgacccatccgttttatgtagtgctctgacgaaatctgagacccgaaacctaaatgtaggcagca

SEQ ID NO: 2648 - DNA, 1979 bp, Toxoplasma gondii
  source 1..1979: mol_type = genomic DNA
aaaaataaaccagatggtgtggagtttctctctcagtttcctcaccaagcatttggctttcgtcctgtgacgagagggtggaggggctgctgcatcactcgctcgaggagcgtccccgggagaactggaaagtcaccgacgcagagtgagctgtcttcctcgtcctccttctcctcgttttctgtaatgctttgatgcgttgcaggagtggatgcgcggtctccctctctctgcgcgcgcgattcgatgcctcgaagccgcaagtctctcagctggtgcccgcagttgcactcgctggactggtcgcgctcgcagaactgtcggagcgcacagtctggcgatcgacatgccagggagacgctcttctcgcgatgggcatgaaagcaattttcctcgctctgttctctcttctcccctcctcgtgtaccttcagcgctctcctgagttacactcaacacatttccatcctcgacaccgtctcgagactctccagaagaagagaaggccgaggatgaagaaggccggaaggagaacttttggaccagttgagagaagtgagtcggtttgcgtctgaggtttgccgcgcaggtgtcttgctcgaggaggcggtacgccctggcggtgagttcgaagcggtagagaacttcgaccaagtccgcgtcgttctgaatcaaatgcggaggatagcgatccaacagacaagctacgagatggtacgcgtcgacatggcgttcgaggaacatctgctcttgaacgacgcgcttgtcatgcaaatacaaggaaaaacatgcacaggtttgagtcgaggaagctccaaaagccgacgaagagaaggaagaagagggtggaggtgaagaagcggaggaagcagaaggttgaggaggagaaaaagaccgcggaggaggacgctccgcctttggctcggcaggagcgaagatggagaggaaacgcatgaggagagaaggatggagaacgcgggagaggagagaggagggatgaaggtgacggagggagaacgcgggaggcagaagacggcggacgaaggagggtgaagcaatcgagaccgaaggagacgacaaatgcggacgagagtgagacgaagaaagaccagttgacttccgtggaagactcaagcgaacgcagcagacagagagcacccgagccagtcgccgtcgctgtatgtcccgcttcacctcggtcctttctggagtggagaagaacctgtttggctgaaagaaaagaagactttccggagacttttcaaacacaagaagttcctccatcgaggctcagctgctgctggggtgaccttgtgcgtcgtcgtcgcttgctgccttgcatgcacagtctttgccgactcgtcgcatgctcgcagcgatggaagcgagactgaacttacagtcaagttctttggccgatttttaaaagcctgacaggcaagtcggtttctctggctccctcggtcctccaccttctgcagctctgtctttttttgttcatgcgcagcaaagccgcaacagaaggccgcgaaaaagaaaatacgcgcctctctcccttttgtctcctcagtgggtgtttcatcctcgtccttcctccttgcaagtgccgtcgccttctgtttctttttcgtaattcctcttccgttttttctatgttttctcttcttcgctttcttctctcgcagctcgctcctccctttttccagttttctttcgccgctctcatcacctcgaggctttgtccggtgtccgcccctcatcttcgtatttcgtccttttcctgcttcgcttcggttctctttttttctttgcttcttttcttcttccctccgcagagactcttttcttcttctcgaactcaggcactttgcatgtttcacgcaggcgctcgaccccgcttttgcttttcaagagaatccgtctgatttcttgacgttttttttagttcttccaacttccctcgacttcccgtttcaacca

SEQ ID NO: 2649 - DNA, 2654 bp, Toxoplasma gondii
  source 1..2654: mol_type = genomic DNA
gttggcgtcaagcccgagagaagatgtatgtcggtggagaagagaggaagaaagaggagacgcaaaggcgggagacgagaaaacatcgacagcggtgagtttgaccgctgcaacgaagcaaaagagagcacccgcaaggtggaacaggagacaccatgtgaagaagcgctgaaacgagtgaacctcgcacgaactccccagctgagtgtggctgacgagagcgatgaagccgaaggcaatgccaagagccgttaccatgaactgcacgacagatgaccagaacaaatgctctttccagagattgtgggacaaatccaggctcccgtcgcggtgcagaaagcggaaggaaccgaaaaatccgacgagaagaagactcgtcgacgccagcaaaagaagcccccagagagcaaggatgcgccgaaccgccggcttgtacgcctggtcgaggatgtctacacagcacacagagtcaaaagcctctgttccaaaaaggtccgggccttcgtagacgtgatcttcattgctacacacagcagaacggttccgttcgtcagactcgccgcccgcgtccgcgacgctcctcgccttctcagacgcgagtggaagagcagccgaaagcgattcgcctgtctcgtctccttcgcctctatcctctgcactcggatcgcccgccaagacaccgccctccatcgtggaaacgagggacacacagctatgggcggtcagaaaagacaatagacacgcgaagaacgcagagaagcaatgaagggagagacaggcgaggaagggaaaccagcaaggaaagggacaaactgaaagagggggagacaccagaaacaagacagggagggaaggggaaaaactggagagggtaagaaagaattcgcgtggctcctccctctgagaaagcaaagtaactgcatggactggctcagaagatcaaatcgagttttgaacgagggaaccttccctctaaaaatctcacattccatgcatcgcaaccactcgcttcacgtaccaactgaaaaatatgtgctgaagaagacagtccaatttagtcatagttatatatatatatatatatatatattgcagtactgtcactgcaagtttacgaagcaagagagacaatactggtaggtgtggatttttcgctctctctctccgttgtagagtgacagatttggatagggtgttctctcaccggggagaagctcagggagaacggaacttctccgagtcctgcgagattccccaggggatcaccgcaagcgggcctttttctcagtggcatgaagaggaattcttcgtcattcggcaagggggaaaacacgtaagaaagagggcgacagtggagaggccggcatccttcgcgactcaaacatggaagctgcatcattctgtgttaaaaaacctttcgggcgcaagcaagacacgaccaccctctcccgacataaggcgccggaaggcggttgcaagccacggttaatacctttcattcctcttcttgggagtaaacacgaaaaagaactttgcaagaaagaagaaaggcatctccccacatggctaatcctacgggctccagactaaaagtggacatgcgcgttttttgcttcaccgctagctccctcattgccgctctggtagcgggcttcgagtgacaagtcaaatgaggcggcctccggtcgcctctgcgatttctagccaaggagtccctcaaaaggtagtcccgctgtgttttcccgctaatttgtgcatgttttgtgtcgcataaaacatgcgaattccagtcttgcggaaaagacctatcggcctaccgacgctgtaatcctgcgcgaacaccttcgccgttccgtggcgcgcatttgagtgagacacgtaacgctgaagacacctgtcacaattgaacgggttcctcctgggacttttcgcagttttgcgtgcgcgttgtacaaaagtgctttcctctcgatctctgcgaacgtttcaacgctacgcgccttatgtcgaaaaaccttccgacggagagtgtcttgcgacacgaaatgcaagaaggacagcctgcgagctactgtgcgttaactcaaacccgaaaggaaaattcatccatagaacgggcccgtaccttgcgccagactatgcgcaggcaggaacgtaaattgtttggttattttcccgcatcttcctcgtgcaacggcctcgcccgcaatatcccggcttccagaagtcaacacatttataaaagtgaccgtgctttcagagtcgcttgatgcagattcagctgtacgaaccccccaagtgacaggcagtgctgtgttttctttatctttcgcggcctcaaagctggctggctggacggctatctagtgagtttcctgcgaaacacgggacagaagagcctggcgaaagaacgtttctttcgttcttcgcactcaaagttactgaggaataagagtacagcagtcctcataggagtctgggttcgcctgtgtcatccacattttcgtgccgagtgtcttctttgcattgatttcgcggtggtccgacatttctgccttttccttcaccgcaagccggtctgctacctgtcttttgtttcgtcgtatcggttctgcatttcctcatctccgcatctacagttcgacaattcacca

SEQ ID NO: 2650 - DNA, 3370 bp, Toxoplasma gondii
  source 1..3370: mol_type = genomic DNA
tgagtgcatgatgacaggcctcttgccagctggagaggaggagagacaggtcagagacacgaggcgagaggagagagcaggcgactacaaactcgaaaaagagcgcgtgcgtgttcgtcgaacgacggtggcgacgggtgcgactgaagacgggagagcagcaaacctaggggttgtttttgggtccagttttccgttaagtgtggctttgtttgttgctggcgaggagatgacagtaaaggcgacaaacgctcgcagaggagagagacacataggacgatacgcaggagaagtggggtttcttaacaccaggagcagagagcaatgtgacggttgtaataaagacggcaaacgaggagcggaaagacgggatttgcttttgacgagctgaagacaagggatcgcatgactcaggtgctcctgggaagagaggcagaaagaagtggagagcgagggaagatagaaataccgtcgaaagagaagagagaaacagtgttctcgatgcatgaggtgccggggggaagcgctatctgctgcggagagagaaactctcctgcaaaagcacggatgagaacctgggtaaaatagctaacacgaggcgggcaggaagattcagaccgtcagaaactgcagacctcggccgacaggaagtttcgcctttatagaaaacgaaagcgtgatggttttctggacggacgacatggaaacagaaggggcttggatgtttctgtgccgttgaacacggccacgaagagcaaaaacagtttttcccatgtacgggaggtctacaaggacgcgtatgcctcaaatcttgcgttccggatgggtagtcgagaagagattcgaaactcgaagcatgcaaaggcctgggacgaaatgtaacccatgtagattcaccgtgaggaaaccccttgaccgggtgacgtcttcgacaagcaagacaggaagcatctttgtcgctcgaagacgcttgggaaatgtgactgagacgagaaaacagagcacctcttcatggtatgaaagaacatattacagaagcgactttcactccagcgaaacgcacttacgagatcgagactctggagattgagagcgactgttcgatcgattcagcgctcgcggcggcctttgggggccgcgaccttctcctagacgcgagactcggcaggcaaaaaatggaggaagatcagtaaagagcgtgaagaacagagaagatcgtttgctttttagcgagaagaaattgacgcggctgctgcacactccagggttcaagctcagcgttggcatttctggggaaagagcatgcacagcacgcagattgagttctttgcacacggctgtacttgcaccggcgcgcagccatggcgaaagcgcggaaggaaacgtaccggaccgaacaagcttctctaagaatgcgatcaaaattgaatggtagaacaagcggtcgccatcgcagctgtctttgctctggagctctggtgtcatccacttggacgaagttatgcaccgagacagacgcgtagcagccaatcatgacgccctgctatagcaggtgacagcggtagtcaaacacaggaacaagaagtcagtgagagtaactccttcatgacggagccggtggacggtacggatatgcgtgagattaatgacacagaaacgaagggccggttgcaaacggaaaggtgcctcgtgcttggagcagaacagtacaaaggtttcaagccgatcgggtttgtgtcctagacagggaacagtgactaacacaaacggcaggttcggggactgtaaccgaggggaattccttgaactcaagcagcgcgagttcctctatggctgcagcagctgatgaggccgacccatcagtgtggcgttattcacgtgacacagcggcagacgtggcagggcatcgcagtgtgacacatcgcagtgtaacagtacggaaagtaggttgtacaaatacaactatgcccacaatttttatgaggaaaagggagccgcaaagttctcgtttagcgtgaatctagctagcagagcccacgtgacccggaacgctgtccggtgacaagcacaggagggctttcggaggcagaggggcggattcatccttcagattggcaagacagctgaaactgttagtttggttcagcgttacagattgtggttagtatggggactcagtggtggtgcgcacctgtagcgggattcagacacccggtgacacctgccgtgagattccgctattttagtggtaaacttccagttgacaggaaccgcggcgcgatgctttcaacattcaacctccttgattctaaaaacaagtagaccacgggtgtacagtaactcacatgtctaccgtcagtttaaaagaatctggaggcgaccccgtcccttccgatgcggcggaccctaataggttcgtcccgcttctcgagttgattccgtgtaccgttggcccgaacactcatccctgcggattctcaaatgttattttgaaacgccaatttattcccttgactgtttcgaaacagtagcgtcgcgcctgatgcctcgcgccatgttaacaatgtggaaaggctcaccctaatcgacatcggtggtgtggttccctcaccgcagtccggtcctcgattcccctcagtcgtttgtgccgtctcgtgggctgcgtggtgaagtaagagatacacaaagtggaaatcggacacgtagaccttgggtactgtggggttctctttgcaaattccatgtcaattttggcttgtgcgacagtgcccaagaagtgtgctcttcccgtagtggtatctagtggagcagtccatagttagtcaacgcaagactcacgtggctcgagcgggcgtggggggcgatgcatgcccgctgaagagctgttcaatgccgatacgatggctgttgaggggctgagcgggagtcagaatcgagtgcttggcgccggtcagcggaggccgctgtttcattggcgggtgtgtctcaactgttcctaccggacgggagttggtggaccgtaccttgaatgcgggtcgcgtcgtgtggggacacaacgacgaggctgcccaattctctggtgagacaagagcgactcgtgaccttgtctcgcctcgggaatccatcagctgggctgaagcaaacagtccaaagcggtggcgaaaacaagatacgaggactgacgggcttcgtcccggaaagcgtgcacgtgcggatacgcgactactctctgtgtaactcgcgacaagattttctttatgtgcgtttgaggggggctggaaccattcgagcgagcatttggctgacggtgggcgccagaaacgagccggtcagggacggtttccttgacttgacgtaaattgggctacaa

SEQ ID NO: 2651 - DNA, 4598 bp, Toxoplasma gondii
  source 1..4598: mol_type = genomic DNA
gttaactctaccgctgcaggctctggactttctccgccctctctctgccctgtcccctcttcaagacagaagcatgaaaaggcactgcaatgcttctcactggtcgccagactgagcaaagggaggtcacgtggtattgagccaccgacagacgaagaggatactgaggcagaagggaagatgcgcggggcttcgagagacagaagcatcattctaggaagcgcgcggatgaggaagggctcacgaactgccggcgggaggcgcttgaagagggcctctactttgctgtaaaactgcggcttgaagaacggcaaagacggtggtggacgcgctgtctcttcgccctggcacttttcttcgtgttggcatccactgtttgttactccaccattcgaagcactgccgttcggtgccatcgtctgccctagacgcatttccacctggagatcgacaagaagctgagttaggtcgcgcggacttaagccccggtctctctttccagaagtcgggagcctctcgcctgcacccggcaactgcgcttccgtcacctccctctctttctgtttgtcgttcacttccctctcatctcgcctacggtcggtcctgcgactggcttcgaatgcgcttggatagtacgccgccagataccgccgaagcaccgccgaggcggcttgccagtacccgcaagggggcggcagctggtgaaacagaagaaactgctttttcatcctgcctgccgggaggtaagcggcgagatagacgccaaatcgcctgttctgcgaacagaaaggtgcgcgtgaaggctcacttccaacgggctgcgaagggcctgcgcacacatcgaccgcggtctgccgatggctatttgttgtgcgagtaaaaacaaaggacgcacttcgtgttaggcgtgtatcaatacatacggaaatggaccagaccaggtggtgcagtcccgcgataagtacgcgggaatgacggctcctcacatgagacacagttcaaggcaaccccgaagtacgacagaggccggtgtcaatacacgtgagaagcgcgtgtggcgaacgcgtggcggccaaagattgcagcagcaagcaagacagcgtccagccgggagacacgagttacaccttgtccagcaggcgtctggcttctcttttgtccaaggagtcgcagtgacagttgagttgggaaggaaggaacgaattagcggacgttgcgtcgtagtcgggaccgcaatcgactcttccacgccaccgaaacctcatgcaaggtcgccgcgacaacacgcccagctcagaagaattgttttcttccgtccaacggcgttttctatgaaggtagacaaacacgaatcttcatggacccttcacgtgtgcttctttttcccgcgtcaatagctgttccggactcagctgaatatttctgttctagcgcatgcaccacgttggaagggccggcaaggtggatggctggttcgcggccgagtttcccggaaaaagacgtccattctatgcatcaaagaagtgtggatccaatgccgtcgattgtctgcagcactcggttttccacacgagggagaatgaaggttttttctgactgatccgcaccgtaaatccggaacctcgacacagtgtgcagggcgtgtgcgtgtgcgcgtgagcggcaagcggctcgcctggcgcgtgcctgggtttgaacacaagctttgatagaaacgacctctgcggtgaagtcccaaaaccagaagaaagatggaaggaacgtttgttactgttaagcaatgctacctgaatgaaggagtctccaggaaacgctgagctggtgacaaagtcacgagaaatcgttcgagtatggggaaagtcttacagaggagactgaggtcccgtttgaacggtcccgcctccaaagcgacctgccgtgaaggcggtaggacacacagacgcagatacgagccgcaaatgcaagacacaagatctgatggctaccgccagtccacacacctgacgatgtaaagagacggaatggaagtttgacaccgcaacgtattggccttctctatttcatagacaattacaaaggatttcctctcctactggagtgtcacccttccgtcacagcctgcgttttctggtggctaagcacgtacgtgttgcgtaacaggtggctgcgaccacgtttctaacggacgcagtgtcatgtaatgcaccgacgcatttccccggaactgtctgctcccacaagacacgtggaaagtggtacattggaccaacggcacatgcaaacgcgtccaggttcctcgataaaattttggtgttagttgctgcctcagtgacacagcggatgccgcgccacctgagctgtttcatcctgtttttacgtgtttcgtatgtaggtttctgttccggttactcacaagacaagtcgaacaacagggtgtttcaatgggagcatgtggctaccatcatgaagctaggctgtgccttgtggtgcctcaaggtcctctgccaagcgtgggtgtcttgtgcatagttccaagcacatcaggcatgtcaagaatctgttctacagactggcgtgccgtcggcgtagagccgactcgtagaacaaggtgtaggtccattcgtgcagacacgagggactgtccacttcgatgtatcaagcacttcttaggcaatagaggtggtggaacattattagtcgaagcgtggaaaatctgaaggtggctgagacactgccagtcaagagctcaagattacctcgccggccgccaggaagggggatcggcggcctgtcggtaagaacgggcggtgcacctcgacctgaatgacgaccacatacaatgacatgctaattctaacaccacgatctgttttgtctatttatacgagatcttggtcttcttttgtaccacaactgctgggtcagcctgacagtaagcatggctgtacttggctatcagggggatgtgcccggcggccaactgtattccacgggctcatcttattattgcttcaagtgcactcgagagaagaacttcatgcgagaatgtaaaccagatagaggcaggaaaacttgttcccctgtgcagcgtgttggtcctgcccctcgtatacacgacccgcttcggcacacccggtcagggtgtctccagaccacaaaggattacagggaaagctatgcacggaagtctctcgcgacaacctatgttttgtaagcaccatttgaagacatcgaaggtgaatgcactcgtctgtgcatgaggcctccacttcggtgtgttgcacatttccgttattatgcatccaagtcttgcgatatgcacaccctccgggaagacataacgtctggcggcggttgtgccgtctagtgcaccgaactagttgctgtcatgactttcaagggtcgaaatggaacgggctaagtaaactttttgcatgggcacaccatagtgctacttatgtggcagcaaccgagttaggcttcagcaacatttgtggcaaccgctgcattgccgagttgctacccccactgttggtggatctttctcggtgcttgttggggaccgttaccgtgccggccgaaattttagtttccctaacggaatctgattttcgacgtgaagaccgaagatcctgtcaaatttgcaaacacaagacaaccgctttctaagggggtgtgttcactgctgtcttaccagcaggaagtgacgggaagaagagctgcgagatgagttttgtggtcaatggaggtgatcggtttgtgtgtccgccaccccttggaaggggggaagaagccacccccttgcttcttgttgcatcagacgcggggcaactacggagcgcgcttttcgcaaatggagggaggcacatctgccacgaagatagcgacagcatggctgtatgattaccacaagcttgcccggacaatttctgtctcgatggtgcacgactcccgtttcaggcgccgtgattaacaaatacccgccattctgtgcacgttgtcgcggttccaggaaaactcgctgccgggcacggatcgacgcggtgtctgtacaccagcaccggtccacggcttggcactctacctgttgtgagtgtggatagtttctgattgccagctcggaacgtccaactctgaggtcagatttagctcgcattggcacgccttgcagcagtcggcggctttctctggcctcctgcgcaggacccgggttttcgagtgaccgtcgtttctactgggggcttgctgacgggtagacagcgtgcagctgactcagatgccccttgtcaggccatgaacacaacatctggcaggtagtgtttttttgttattcagtacgaaatctccagagactcgattcagtgtcttctctgcggacttgaggcggtcttcgtccgagggtttctcgaccgtcaccaccgacttttttctggtgggtcgctgtgcaagcctgaccgaatcgtctttacctttgtagcagtcaggagtcgtctgccggccactttcggggtgtgcgccgttggcgtcctcctggactcgtcttgtctcgaggcgtgtgttaagcggctgtctcggagcgtgccctcggctgtccatca

SEQ ID NO: 2652 - DNA, 1922 bp, Toxoplasma gondii
  source 1..1922: mol_type = genomic DNA
tcgcccgagtaacttcctcatgtggtcctcccacatagcctgcagacaacatttcgtttgacacaccaggcacaggccttctgggaaaacagtgttgaatcaatgcggagacacttccccgttaatcaacttcgtgtcgcactcttggcaaatctgcagttcgtgttgcctttgtggcacacacagacttacggcgataacggcttccgccagtgaatcaaggtgggacgcacaggtaccagtcattatgaccatcccttcaccctgaggcgctaggccgtcagaacccctttgggccgtcaattccgccttctcagagcccggtgatgttccatcggcttgactgcccgagttgtcgccaatcgtccttggttcattcgcttcgttcgtagagtcacgaataagttgctgttcacgaccagatggctgtctgtcatctacccaccccatacgctggaccccaggttttttccagagggcaatgatcgactgagccttgtgtttgtctcctgcccgaacagctgtgaataacgggggtaatagaaattgggggatcttctggttcttatctgaactacgggtcaatcctgtcaccaagggaatagcgtagcaacttccgaatccgctcccttcggaccacacgtagcgcctgttttgctgtccaaatggtcgagctgttgaaaaccccctgtttagcgtcttgtaggcagcgaattttctcagttgtctgcagccatcgcgttctaacttcctaatgagatgcgacggaatgaatgagcgggctgccagcctgcagttcgcctgttgcattaacatactgggtgggccttcctgtgcatcccacgacggtctacgccagcacggcctcgtggggttccttatacacctggattggggttgaagagcatgcttgaggcaggctgaatggaccagacttgctagtgatcgcagaacagtggcgtccggcgaatgcgtgcacgcgacgtgtgtgaacccgtccatgtgagacgggatatccctgtgaatggtgatcgcttcagctttgatagaggagagcaacacacggccgaaaatgcacactatgacggaagatactaacaaaaaataagagttctccatcactgctccccgctgcggcggaatccgccacaacacggtaccattgacacactaagcagtatcaagcatgattttaacaaaagccttcgttaatacgagtccctggaatgcttcgcgtttttcaaagattctgtcatgttccacttccgtagccgaacgagcgtcttctgatgcatgcagggaagatggtggaagacaacgcatgcgtgcaatggacagtcccaagaagatatcttttcacttttggaattctcgtactgggcttctctggcaccattcatcttgaagacacacccgttcccatgggaagggcactaaagtttgtcttctatggtgctgcacttcgtcagtcgtgacgaccccgtctgtaggtggtgtgtcgcggtcagtgggctccagcagcttccatgatctacacacttctggatttactttaatttcacgaaatgttcagtcatagacatcgttatcctgttacttatgctggaaccttacaggggttgctggcctgcaagacttttgacagtcctcctccagggaggagtccgattaaagcttgacatgtcacagaccataggcaccaggcattctacttttttgtgcggaaagcgactaccgcgactctgggcttgggcaaggacaagttgataagaagccttcttggcgccctcctgtacgacggggtaggagaggtcagaaacgagtgccgccactcggctattttgttgcagttgtatccagtaagggtgagaacaccaaccgtacgaagaatcaaaccagttcaccgacagggaaaggaaata

SEQ ID NO: 2653 - DNA, 1781 bp, Toxoplasma gondii
  source 1..1781: mol_type = genomic DNA
gaccttgagaacgaacggcctccagctgagagttgcctctgcttcgcgccttccctccgcttgacttccagcgtcaccttctcccctgccttcgcgggattcgcttttggcttcaccgaccgcgttttcttcgtctgcgcagcggtctctgcctccgccttcgtttcctcttccttttccatctgttgcgtctcgctcctcggccgcgcctgtttctgccttcagctcctcaggtccagcgacgaagtagacgttcgcctctttgccggtgctgattgtgccgcatacagaagtcagcgcgttgcgcttcatgagtttttcgatcagtctgcaggtacggttgtcgaggacgttctccgtagtcgccctcgtgtctcgcgtcaggccttttgcgcggttcgtccggttttcctgaactttctgcagacctttcagaaagtcgttcctcacttggtgaccccacgcatgcggctctgctctccgccgctcccctgaggaacgcaagagtcgccctgcatctcccttctgagtcgcaaacgaagaagaagaggaagaagaagaggaagaagaagaggaagatgaagaagaagatgaagaagaggaagaggaagaagaggaagatgaagaagaggaagaaggacgacccccaggactattcgccatggtaagaagagagaagaaaagggaggagagaagagagaagaaaagagaggagagaagaaccggacgatgaggaagaggagacttttgaggcaagaagaaagatgagcgtggaaagaagggacgacgcctgcaccgtggatggaagagagaagaagtaggactcgaagaaaggagcgaagacgaaagagaaaagctgggcgagacaccagctgcacaaccgagacgcaaagggagaagataagaagcgaaaaaaaagagaaagaaagagaaaagaaggaaagaggacagaaggaaagagaggaagtttgctctctcggagatccgcgccttcaacgactcaacgaggtttactttttttttctcgctttttttctacccttcctacgactataaaccgcgttgcgttccctgacgcttttttaaaacatcgagaaaaggtcgttcgctgcgcgggcgttgctgttcacagtgttcgcctagcgagtagaggcggaatgcgagattgctgaagcaagcagaaaaaggagatgcatgaacaccgaagccttccttgcttcttctcatctcttctgtctcctctgttttgtctcttctgtctccgcggcgccgcagtgtcaccccacggttttttcttgcatgcgcggcggagctgcaagacacacaggtcgagagagaagggcgcttcgcgcctttttcctcaggaacggtttccaaatgcaggaagttcggagtcttccagatccagaaaggccatcgtggactgtcacctcacgggagctgaatttcttttcctgcggtgggaagcgatctgagagatgtttttctctccggacggactgcagaagagcggattttttcgcaagttcagaacgctttcttctctttttctttcccggccttctcttgcgcttctctccgccttcctcgtgggtgctcccagtttcttcgcaacttctttagactttttttctccaaaaacgcgcgctggccctcggcgtccgactttcgagaacacttgaaagggtgcagacgccgcgcgtcgatttttattcttcccccgattttcgtggactctcgaacttttcagaaagcttcttcttctcctctgtccgccacga

SEQ ID NO: 2654 - DNA, 1647 bp, Toxoplasma gondii
  source 1..1647: mol_type = genomic DNA
acgacccttgttgaagaccgtaattgagctgcgttaacgaaggttcgaaaagcctaaggccgacccgcatgcaagattgctgcattgtgcttcactaattgaagcagctccagcgtcgtttctgaaatgcgttgcgctattggacaataccctgtcgtgaggttttgagtgcagaggtgctacctccgcggagttgagtcttgtgagtgcagagagaaaagatatgtcaaaatcccgtaatgcagcggtccagtagcgcagaaaaaaatcaaaggccctctagatctaaccgagagagttctctggcgaagcaggaggcacgctcgaggtcacgataggaacgcaactaaaacgatcagatcgtaaatttagttcgacactggcctggcaagtgcgctcgcacaggcacaccttctccaccggcgccctcacgaaaacacagggaagaatggcctgcaaaagccacaggacgagagtatgaatcgaggacttctgctgtatccaagaactctcagctgatattcgatactcaggcacatctaggaaagtgccggtatatttgcttttctgatgcacataatatatatatacatctatatagagagggttgccactacgtcagtgcggttgcctgagcttcagagagttcttggcttgcattctgtcatgaaagttcgaaacacccaacggcgtatgtccttacactttcatccttggatgactgtccacctggatgtcatgtaggtgtgattctatgaacaattatacactgaggaacctttgtttcttcgtctagtgatggctcatcgcgcgcacttcgcgtgtttgctggctatagtcgagctttgtcaccgatcacgcgtagtaatcactctctgtcctgctagaaaaagccacaaggtaaccgagtcgatttaggactagccggaaacaagctctggttaattcgggaaagcgttcgatactgttatgtttttgactcttctttccgtggcttgaacgagtttctattacacacgctttgtgtgcatgttggacgaatgcgtatatgcatgtgcggagtctgcgaacggggttgtgtcacccactatagtgcgacacagcaaaggaacttctttgcgtagcagccaagaaatgttcgatgcaatcaacccaatgacccttcgccaaaaaggggaaaataccttgaatcgacaccgacgagttcgacgagggacggaggtcggtcaagtcttttggggcagctgtctctcaactcgagaatgataaacaacgcccggccgtgaggtcgactcgcggtttttgagttccgaaaactgtgacattctgttaatatctcctctttttcttcgagttcttcatcgttgtcgagttttttgtctcctaattcgtaaacctcccaggtggggaaactccgcttgtcgaaactccctgtctatttgtcgtgttagttcctctccgccctccgtcctcgtcccgtttctggtgtctttctgctgcttttcttcttcgtttcctcgcttcttctcttgccttattcgtcaggtgccgttacttcctccttgccctgttctctcctccctccgatccccgtctccgcgtctgctctctgaggcgtcgcacccggtcttctcttcagatctggga

SEQ ID NO: 2655 - DNA, 2454 bp, Toxoplasma gondii
  source 1..2454: mol_type = genomic DNA
tgcgtctattggtcgaatttacgactacgtggattttgtgcgctggtctcctcctgtatttcaacaaagatccgttcatgagtgctacggacccccccgatatattttcaccgctagtgtttttgttggatacgaacccggaatggcagaggagcagcggagcaagcagcctacttgggcgaggcttgcgatgcttctccttggtggcttcgcgattggtttcttcgtttacgcaattcatgagcactacttcaccagagatgatggcgtgactcgacaggctccgttactctctcgactacgaggaatgaacaccgaatccgtgacaagggcatcggtaaatcgggacagcacaccggcgatttctacagcggacccccagccgccttatgcagtcatccccgcattcacggatgccccctcaaactcaaactcgagcggcactggaagctctgagatgctggggggttcaattatttccggtggggatagcattctcgtggacacgtctgcgcctgcctcccctccccaaggggccgcttccgaagctacttcccaaaacgcttccttgattaatgtgctgcgacccgaagctgctgagaagcaagaagctgacgcttacaggatcgtcgcctttgccgttgacgacagtgaacacgttatcgatgtaacagacgcggagccgaacgctggtgtcctcccttagaacacacaatgaccgtggcttcacgtggcctttataagtgcatatcgacctatgtgtgcttacgggtatcatttcgaggcgtgtgcgccgcagtaatacgcgcagtgattctgtacagctgctgggtctttacacttcacttgtctgctgcgtgctcgatttccgtgacgaaccaagccactgtgctacggaaggcacccacgaacgaaccagttgtagtttggttgctagagggcctgagcttgagcaaatggagacttgcgtgtgtgccgcaaaatatcccttagcaaaaccagcagacagcgacgcgtgaagtttgcttgacccatctccttgccgacattggggacattctgactgtgattggaaaaaatgaccacgagcaatattagacagaacgccacgttagcggatctcaggcggatttggacaagaagctgtttttggtcccgctaggggacaactgcaacaccagcttcacactttgaccgaaaggtaatcctgccatagctgtctgttcgcttaaaacaggtttttagctatttaaacttctgtgtatctgcgtgtatgcgactacgaatgtccgtcgggtagagaacttaaccagccgttattttgctcattatccaagaggaggtcctgtgcttgaaaacaggcaagccatcaaaccgccgagtggaccgccttcgcaacatgcaaaccgtctcgtatggttggtcagaagcctttgttttcgcatccttcctatgatacgctgatttggatttctctagttgttctgcactctagatgcagtcgactgagatagcaccataaacatgcaccactattccgtcgtcctcacttctggtagtcaggtgtgtacactccgaaacgtcctgtttttcacttgagagactcgctgtatcacagacttgtttgaacaaggaaattcctgtagtcgccccgcggcaatgactcgaccgaccataaatcagcggggtgacccatttgtccaggtgactcgtcttgaacacgagagagaaatatgctgacattgtagcgtccgaaacgccccccttccatggctggatacgggactgacgcgaagaagtcaacaatcctgtttttttttctctctcgtaggcactcacccaccaggctaactagccgtttgtctaagcctctcagttagttcgcagtctgaagggcggggacaaagacaatatagatgcaacaacaaccgattcagcaacgctctcagcttttttttatttccgcatggtacttagactcatttatccatgcaaaaaacagctctctagcacagtaaaagcaagacgcacgggtgcaataactaccgtgagctgcctccgggcatctcccgaccgttctcattcaccacaagaggggaaccgtcgagctgactcgctcggtatgaggtcaaagtccgtcgcaagcatttattcaactctgcctgcctttcaatttaaggctcacattttcaaactttcgaagtccctgcttttctgcacattcttcccggcaagacattgtacgccttttttctgtctaaaaatcgcccgccgtccacaacccaacttcagcgttctcgacacgtagcccatggcccccttcctctcatcaagacgaagcctcgttggtttcatgtgaacgagatctcggcaaacatcccttcaccgatcctggctgccaacgacaccttcttcacaaaaatcgagtcaacaaagcagaggaaaccgaaaaaa

SEQ ID NO: 2656 - DNA, 3309 bp, Toxoplasma gondii
  source 1..3309: mol_type = genomic DNA
aacgagttcgtttacacatccagcggccattatgacacctgatagtgtgttgttccttcccccttttgggtgggatatgcgatgcttctgtctaagtatgtgtgtgttgtcaaggtttggagacaacaaaggatcttggagcactacaagcggttcatctttattgcctctgaacaaaggtgggctgtagaaaagaaagatcgaaaacactgctgtatgtcgcagaaatacgaaatcctcgagtgtatgcctgtgctgcgatcaggaatggcactgcagtacgctgcacatcgttaccttgccagttcccctagtcattgtaaaaaaactacagtactctccccacactgctaatgatatgaggttgacggatgctgttgattgagtgaatggggtatacagcttgcggatgatgtaatgccctcgctcttgaggcctcttcgattgagctcgtgatactctaaaaagagctgtgcctcttggtactggtctgcagcaacccatccccgctatgcctagacgcctgctttctcttacgtgaccgggtggggacgacacagtggggaaggatgcatggaggtgggtgctggtgaccgtgagccgttgctatcgtggtagtttgcaggagcttagtgacaccatttggagaagctgatgccatgcagatcgataccaaggatgggagcccgctgtcacattgcccaccgcatgactttcctctcttggatccagctcaacctaatatagtagaaaggatcttcctcagtagctacactgaggtgggtgttgaaacagtctacagcacggtagacctcgcggaactttttacggcaccgcacgcccctttggagggaagcgccaacttcagaacgatcggaatatcagtgtcactgcaacggcactaaaaacgagcccatctggtggcgccttgcgactcatcgcttcgtcaaaggagagtcctgttgcacccaagcgcatctcagaaagctgtcctcgaatcaagctactgacctttcagaagaaacctagatagttgtggtgttttatcttgtggaaaccaagttgtctctggttcctcctgacataacacagagttaggtttaaccaggccccctacgacggcgagtctcagccgtcgacgagaactgccgctcgatccagtgcaggatttcaaacagacatcgaataggcgaaacgtatcgctttgctttactgtctggatgctgtcgccaactaaacttgaaacacacaactggtattctaccaagcctgacttacgagtgcattggttctggggatgataacactgtcacacctttcccattttttctggagacggccagcgtccaagaacaactcaactcgtcctgaacctgtccattttttctcgtgtgtccgagcaaataacgttgaacctgcctttgacgcgttttcctgtgatcagacgccaaacaacctttacaccgatggggggcgtcattttcactagggcgattatcggcacacgaaagggcaatgccccacttagttgtctcacgaaacgagacatcgactcgtggtcaacaagcaccagttctaacagcgacttgcccatcgagacaaagtcggtaagaccgcttgtctgccacccagatgtcgctttgaggctgtctccataaaagtctgtagaagacttctggaaagtggggacttttagtgttgagagccgacgacgtccggtgccacgaatggcccgcgttcgctgttttttccacttctgctgcacttcggttgaggggccgcacacgccggccacacagtttcaggctgcagctggcagtgaatgtttcttaggagcggaaagcgtttcgagctgttgggagcgcatttggagtctcactcctcacccgaaaagcagtttcgcttttccagagaggatccaagttttgcggagatcatgttgcacagagagtgcgtgcgggcaagccgataccgtgactctgaagattaccagcgccttctgcacttctcgcaaagtcagaaggtagacttccgccgcggtttcctgtctttcccaagtaggcgcttcgtgtttaggaaagaaatgcgctaaagacacgagatggaaaaacgcaaacccgaacgcgcaagaacagcggaacagtgcggacgacttgtcgctagctgcgctgcctcagctgggtcttgcgatcagcgaatctttttttgccacgggctttcctattcaccaatacagacggtttttgctccgagagttgtggtactgcctctgaaaatgacacctagaaaaggggacggaacgcctgagtgattccatcgtcaaagtttccgttcacctgtgaaatgccgtccagcgagtaacttcgaggtaacccaagtttctcttcccagccgttcagaaccatcaacgcgtttttcgcgggaacactcgactcgctcttttccgtcgagaatgctggagggaagaggaagttcccgacgcagtccctttcgttccacacaaagaacggcgtccgtctgtattttttcgagcgctggtaacgagccttctgctttccgtgaattctggcaagcccgtttagccgggcgggcctgtcggccacgctccgcgacccttgactgaaaccctgcccttttaaagtcccatatccagtgtacggcgttgaaactaaccagcctctcttgcacgctttcttgtgtgtcaattttttgccttggagtcgtattctccatatgtgggcgtccaagctgacgcagttgtgcgctcccagattcttttcaaaacatatggtcagaacgctcgttctctgcttctggaaaaagtgaaacttgcagtttgaaggagcagatttagcgctccgtagttcaaccaccttcccgttagaatttttctattggcacttcgaaacccttattttggtgtcaaagggcgtgtctatgcctgtgcgactgaacggactctctcgtcattatacgcaggaaatcggatttgagaaagatgcccgatttctactttcgattttcctcctttttttctgactgtcgtctaaagatcgctctcaactcgccgtccgcagagtaggttttcaattttttcttcactgtcggcgattcttttcgtggtgtttcccagccgttaggttctttttttcagactcgttgactcagaagccccgttcaaaattccacggtcgatccggcccgtagctgtgccttctttccgtgagcccagatcccaaggcctttgcagtttcccaatctgaccctttttcttccagacgtccgtcttcgccctcgctgccgtcaata

SEQ ID NO: 2657 - DNA, 1628 bp, Toxoplasma gondii
  source 1..1628: mol_type = genomic DNA
tttttgacgggcttgcctgaggaaatacgggtgtgcagggaagcgagagcagaggagttcccagtctcgcaattgggcggtgcttattcacattgaacggacgaagtcgtcgtcatttccgcccaaaacattgcagaatagacgacaccgaccgccttcccagtgcaagtgaatggggtcgagtctggtactcacgactagccagatggaggtacattcgaacacacactggaggcagcgtttttttcgtttcaggcacctcgacacctcgttgatcctttctgctctaatgcatgaagaagggattcacaaagtgcttctcgctttgccacataaatggggtgcggtagcaccggaatgctgctatcttccgcgatgaagtgaagaagctggggctccgccctctctgttacagtgccaataacttatgcgattgctggagtttcttatataacatccacaagcattccagacccggggcgagtcgggctttcatctgatgtgaaagctcacgaagctcgacaaacacattataaaatagggtggcacaggcgacccccgcgagccgcccgcgattgccttaataccgcgattgctcttgaacctgtagccgcccacacaacccccgtgggaatcgcgaggctacagtgactgccgacagattatatgcacgtcacgtgacaacatccttttgagcagtggtcgcgatagcactacgacgagttcctcgaggcgccccgccaagtttgagatatatcttgaaccttgaagtgagacactgcagggattcatggtcagacatttttcctagcggaagcaacaagggattctgaatcttgtcgctccgcctacgcggaagaacggcggacaaaactatcggcgtagattccgacactgtgaacatcaaactgtgcttgccattggcgacctctaactgatattcgttctggtggtgagatggacaaagcgccacggaaatccttctgcacgtgacgtcccctaatcgctgttgatgctcacggagaaaaggctgaggatcaaaggcaaaaacagcagagctagcctgctgtggtctacaatgtcaggtcccgcccagcctcgacgaagattttctctcaatgaaacggagtgagccatctgaagagcctcactgcatttctctgaccgaacgctcgcttgttagcatctcaaagactgttcataaagagtgtgaatctcttatactcgcagagaggaaacgcatccatcctttgtggcttcctgggctgcaaagtgtcgcctcggcgcccagagggcttactactaacaacatgatctcggaattgcactcgggttgagtgagctgcgggcaacgttctgcagaaaaaaaagattcagttcccatccggggttggtgtactttggagttcagcatcgtctctatccattgttcagtactatggctattctcagatcaccacctaggaacgaactgaggataattacaagacagattaaaggcggcattctatcctcgagtgtttttgctctacacgttgaacctcatcgcatctaccacctcagtcttgctgtcgccaatacaaattcgcacgtggtacgcgtggtgcaccgcaatccttccccttgca

SEQ ID NO: 2658 - DNA, 2220 bp, Toxoplasma gondii
  source 1..2220: mol_type = genomic DNA
gcttctccacttgtaatactcacttcaggccctgcctcgattcaccggacaccgtcgctttctacggtggtgccgtttccttacggggagttgcgcttcgcgggtgtcgaaagatgcaacggccaacagtcaggatcagacgatcaacgcgactcagaaactcatgcgacagggttctcgagctctttgacccatgacttgatgcccctggatcccagcgtgaatcaagacctcccattcacttcaggacatgctgaactcattggattcgctgtgtttacgagagagatagagggattcacaagatgaaatgaggttctgagtttagtgcactccacacaggtgttggcgagaggcgtgaccgagactgtcctggcgctggagcgcttgtcactccgttcttgcacttgagaggctttcggaatgcaaagcagagtgaaggcgcccatcccaccgggcagtgtacaacaggggcattgtggaaacaagggagatggtggtgaaccactggggatgaacgaacctttggaatatgcggtcattcgtcttgagagacgaccgtttccagcgcagtgccagggtgaatcgtcaatcgacagcctgcaagtgtacgcagcgagagaggcgaagcgtcattgatgcaaagcgaagaactgccgctttctgcgtgtcgagaaaatgccgtggttgtgttccgcggcggcctgtggggcagcgttgctgtccggaaactggacagttgcccgtttttgcttttcagaaacgagtttggttagcattcgagttcactaagaaaaccacctcatttgctcgtctgagcttccatggtctctgtaaattacgttcaaaacgtggtgccgggtacacactcacacaaaaacaacgcctgtctgatgatggaaggcacagaggcagaagccgtcaaactccgccaatcgcacgaccacgataatacacttgagcgctctgaagtgagcaccttggatctttagatttccgcagaccttggacctgcaattaaatggctctaggaactctgcaggtagagatgatcccctgcaatcctcatgcgccagtgtcggaggctagctgtccacatagttaatagactcatctccttacgcgtatacttgcattctattctcatgtgctcatgaccgagggcagacgccgcatcccggtacggactagagaaacctgcgagacggttctacactcgaagaaaagctgtggaacaaagaaatcgttggatggttgcgagtcaggttgcaggagcaagcgggaggagcgccatgacactttttaaaactttccgtttgtttgcttctttcttggccgccattgttcgtgtttcagcagcgacttgagtggacagactcccggggcatgaaacaacccgaaacctccttttgtcctgctgaccacgaacttcgtttccaaaatcttgtctgcaagctacacgtaccctaattaaagaaccccgagaaaagacaagagcatacttcgaatcggtaccagtgaagtcgttgccccagtttatatcacgcgacctccaactgcgctgtctgacggcgtggttgcgcacatgctgctcgcgtgacagaagcggccgctgtagagagaagcccagttgtttctggactggcgaaaggaggtttgagtagtaaaaaatcgagcgattcgtgtcaaagactcgtggatgctttttaggtcgagtctggctttcagccaagaaagtttctttgtgcgctgttcaccacactcagctgggcggtgcctcgattcgtgcagacgcgaattctcgctctttctcaggttggttttgcccgcctccttttcaggagaaaattttccgcctttcgttgcagctccgagggacaactcggaaatttcaaacccttcgaatctggaggcttcccaagaacgaaaacgccgccagaccgaccgactcgcggttttctcgaccttgtcttgcggccccggactctagctggcgcatctggtcgttgtttattgtctctggggggtttgtgggggaaagtagcgtctcttgcgtctttctcggccttcctcccggacagaagacggtctctcgccctcgattccgagacaacgccctcctccctccaaacagcgcccaccgccgtcgaggcgcttgtctttttcttttcgtctccttttccccgacacacgcgagaaaaaactcttgtttcaacgcga

SEQ ID NO: 2659 - DNA, 3531 bp, Toxoplasma gondii
  source 1..3531: mol_type = genomic DNA
cgacatgtaaacgaggcgtggaaagaaggccgcagaaatcgttccgagaggcacgaggcggagaagaccaaggccgcagctgtcctgcagagacgcaaatttctgtggctctgatttttctccagaagaccacaagccaggctatagaagcgctgggacaggaactcagagacccgtgtctgatcttccgctgacgtggtggagagaaaactgtgtttccgtttcgtacagaggagtacaggaagttgccttcgcttgttctgccttgcagtctttttcttgtcctttacaagaactgcgtcaaccattcatccaagagcgcatgccctgcactcgccgtttgctcgcctgcctcgaaaagagggacactgtgcccgctttcgcgactgcgtgcgccggcgacgctctcgcggaactttctactactcccaggacttgcggagtgacagccgacacggaggctctgatgcagttgatcattaggccatgaaatatgagctgccttttgcgaaagagtgcctttctctacacattcgcagcctacgccgttggtacaacctagatttttttgcgtcactgtacgcaggacgatctgcagtttcagataccccccactcccaaacactcgcatcccacgcctcattcgcttcttttcttaaccgcagtcgaacggcgcgcggaagtaaagtaactgcgggcttagtgcgcgacgaactgtatcctcatttgatgaagcaagctggcttaaaaaacagaagtgtactcggaaattaactcctactttaacgcgtgcccgcacttgctagcggtcaatgtagagcaacaacaagataggaattattcaggcttacgcagttctgaattgcagagactttctgcacagggaaattccagttagattgtgagaacacctggtctacctgtaaccggtctgttgttcttgatactcgggcatgcgtcattctgttctcttccttctgtaacggctcacgatcaccagaaaggagacgagtgcgtcatcgtaggtcgcacgacagatcacgcgatttgttttgctgtttgttcgacaacaacgtctcccccacaaggtcaaaaacgaacgacatcctcgagttcgtcagcctcgatttcgccagagtcaacactggccttggagacgctcgcctgaactctataaagcccatggtttagccaagttctttattgcgtgttcctgtctgtctgtttagcgtttctaacgcgaccgtgcagaaagctggcaaagttccggggcctctatgctaacgtgaatagtcctttcccacttctctttgctttgttctttcgtgcactggtgtcgtctcgtcttcaacatgcacttgctggctcgttcggtgcttgtttcgggttcgccctcacgcgtcgtgactttgtatgaggttctggggggcatcacctgcttttctaaccccgatgttgaggtcttgtccagtctcgtgatgttcccgttttggcttgctttccttatcacttcatgtcaccttctcccatgcgggttcaccatcgtgtgctgtctagattttctctgacggtgtgtaaaacaaagctccggagtgccttccatttttagacgcccctggttcccgcaacacgtcgaggaaaggttctcctttttctttcctttgttcttcgatggtgtgtctcactttcgctgcacaggaactgcttgcacttcatgtgtggaagggaattctgtattgtcgtctttagctaccagtttaccccgtatcttcctttcgttttctcgttcgtcctcaaaatcggcggattcgcaccgaactggctcacgtttctttttgcacacccgaaaacctggattccacgtcgcgcgacgtgaacagagagaacaggctacaaatgaaagtagcacggactcctggtggtacatttgttcgagacaagcttgaatgatcgctgactgctgcaactttcgttcagtcggtgggcctccagttttcttcggagctgtcgcaacttcccagtgccagcgtcgatcgtaaatgcgtctcggtgtttctttttcttgcgttatcttcccctctgtgcggccttctgggaaaggagaggcataacacatgtagaccttattggaaaagtacgctccctaacatctgggttctgcactgagacgcggatactcgagacgggcagcatgtgggggagacaaatcgggagacaacagagagacgggagacaccatggagccggacgacggcaggcggggtgaagggccccgtcgtgcttgcatgtcagcacaaccagcagggggtatgtgtggcttgtgtagccatgagtgcttttggctttgcggcaagaaactcggacaaaaaggcgacaaacgccaagccaccatgatccacaaagaaggtggtattttgcttccgcaagccacaaaacacttccgcctgggggtcccagcagagatagggggcacttggcgtctggacgggttgccctttctctagtagtcggcttcaagcgggagcctcgtcagctgcgtagccgcgtttcggcactaagggtgtgctcccctatcagaggacgagccccgccgagtctcccgcttcgtttcgggccacggactttgaaattggaggaaaacagagcgaaaaccgtgtcagttccccggaacacgaatacggacagatcccgtcagccacagatccgctcggctgctgtaccgacagtggagctgccgcagcttgttctggcaacgacgtcttgcccactttttgcgagtggctgcgggtggcaaaggctctccgaggaggctgcagtgaccttgttcttggatcttctcccttctctggttcttccgtcttcacgtgtcgtttttgtgattgagaaggaggacgcggacctcctttgttctcaagaaagcgccaacacgagttggtgtagtccatccatctcctttgagtccacttgtgtaccttttccatcgaccagccggccctagctgtttctccgcttctgcccgacatcacgtgcacccggccacgaacccgtccgcccagtcgttttttcttccttccctatctttcgttgtttctgcttcttcaacaatgccagcagagacgccagggaaagtgtgcgtttcccagtggcgaaaactccgtccgagcgcgcttcgtttcgccctcctctcgagcgtgtggggtttcctaccctaagtcgcgtcaaatccgtttctttgagttcttccgtgcctcgccaagcgcagtcaaccgcaggaatgtggcaaaatgcgtctggatgcggtgtttcgtagctgacggaggccgagctccttcacaaaaccgcattcgacgcggagttcctcgccacgacgccctcggcctcgagtcctgccgccttctcgtgcctcatcatcgtcttcttccacccgcgctccgtccaccacccgcgcctgaccatccagcctcctgcactgtggtcgcttctcggcgtgctttgccggtttgctggctgtcagcccctgcctcgtaacca

SEQ ID NO: 2660 - DNA, 1857 bp, Toxoplasma gondii
  source 1..1857: mol_type = genomic DNA
gaaaggaagcatcgcatctgtcacacgaggatcttgaacggtcgtcgcctggttgtccaagtaaacgggtcgcgatcccaccactgcttccccgccgctctcaaaggctccagatcccgaagaaggagaagaagaagaagaaggaggagaaggagaagaaggagaaggagaagaaggagaagaagaggatgacacggaagagaagggagcagctgcagacgcgaggaaaggggagaagaggtgcaagtcagaagcctgtgggtgttgccgtgaggcagagggcaggagcgcgggtgaagtagcgttccaggacctgcagaagggggagttttcttcggtgttgaacgtcgcgagcgtcgctgttcgacgttccctgtctgcgaggtcaggccgggacctcaaaggacctcggtgaagattaagaaagctccttgacgacgcgcgcaccgctgtcgtctggagagggacacaggacgcagtcgagaagagagacgagagaggagagaacgaagagcgagacgaaagagaagaagagcgcgaagagaacacagtgagaggcggaacggtggaaagagcatagcagcgacctctgcagggcggtgcggccgcgcaggcgactttcgcgagtcgactcatcttgcacgagagatccgcgggagctggaaaaatccaagaactcgggggaaaacggagaagttccgggaagtgagagggagggtgtgaacacacaaaaggcgcgaaggagtgacaaaaaaaagaaatgcagcgccaaaggagacacacgtctctgccttgttccgtcacttgtaggacaagaaagctactgaggtctctatagacacccgaagctgcgagcttctgctctctgcacaaaacaaacgaatccgtcgggaacgaagcgtcaaaggcgcgagaaaacgcgtttttcgtttctccggcaaaaaaacggggaaaagcggcgaatcgcagtaaagtcgacactgcgaaaaagtctgctggggtaaaacgagaagaccgtctgcgcgcgaggaagaggaaactttttgggtgcgagaaccgcgtcgcgatgcatgcaaaaacgtccacgagcggtgaaccccaagccgagaaggaaaacgatgttcgcagggtggagaagcgagcgcaaaattgcctttcttcagcgacatgcgcgacccgtgtcgcgctctccagacgtcccctccctcagctgcgcggagttccgcgttcgacgcgttttttacctctggactgtgtagaagaacgaaatggagggagacagaggtgaaacagaaaggaaaagaagagaaacgcaaggggatgacaagagaggcgaaggacacccttcaggttccgtcgtcgaatcaggccgaacactggggtacaactgatgcgtcagactcctgcggcttctcttgtgtaagaactggaaatgtcctgtggctcactgagacaccgtggctcgggcagagaccgcgacgacgcaaacttgggaaggtcgcatttctcgaccgcgaaatcctggaaaatatggcaaacagctctgcatgcacgatttacgctcgctgtttctcggacacaccgtctgcaaacaacgctcaaaaacacttgggtaggctgcggtaagttgcaggaaatgcgtttttgaagaagggagaacggcggtgattgaagcgggagaagaagaggtcaacatctgtgtatacgtaagaaagcgcggacagaaggaagctgctcgcggcagccgaaggcagagagaccgagtcgcgcacaccaggtttctgggcgaactcggctttacagacaccgcgccgagttgagaggaagacagaaaaaaaacggagagaacaaaagaga

SEQ ID NO: 2661 - DNA, 2669 bp, Toxoplasma gondii
  source 1..2669: mol_type = genomic DNA
ttgcaagatcactagcagaaaggaatcgacgcattccctctcccgctccctcaggccaggggcagcaacggcagaggagctttgtctccagtgtaccttggttgatgtcgatcggcattttgtgaatggactccgggtagttgtgggcgatatcctcgatgctggtgcctcctcgagcgctgaagacaaaggtcgggacagtctcaaagtgcacacgagtctctcataccaccgacggatttcgaatccacttcctgcaacgtcaagagcgggtgctcctctccttcgtggattcgcccccctttcttttctgccgaccgctgtgggggaaacaatctcagtctgtggcaacgaacctcagatcccaggagtgtcttctctttacaccagcctctgcttctgtttctccagcctatgaaagcacacggtcatgttcggcagactttttacgggaaggagacaccttgaatcgtcgggaggtgcggtctgcagtgtcaaagtgcagcgctgcgacttcgcacgtcgaccgcctctcgttcgtgtgtcgagttccctccagagtcatcttttcttaagtggttccacactgacagctgtcaacggcgctcgatcacacaccttccaatgaggataggacctccggcgccgcggtccatgaggatggcgacgtatttttctttccggatgaagaatcgctctgtgacgaggactttgttgcacagcttgccttcctttcctgtttgcttggtgacgagcgttttcccgagcattttttccgcaacgatgccgacctcgcggggactctcacagacctggacgccgccctggtacccgttctctctgaagaagccgaggcccctgccgccagccaagacctgcgccttgacgacaaagtccacgggctccccgtcgccgctcggcgactcggacaggaaagtcgcggcttcctgctcggcctccttcgctgttgaagcgacggcgaacttgggcgtggtaatgtggaactccttcatgattctcatgctttggtactcgtgcaggttcaggaaccggcgctgctcgcgctggtgggaaggcgaggtcgcgccggtcgcgcggtgagtggcacacaaaagggagggaagcagagaggaagacgtggcggaagcagctgtgacagaagaaatcgtcgcgcgtagaggggcagaagaagtggaacaagacagacgcgcggcggcagagagaacctgccggccgacgccagcggctgagagcgccattgtgagagggtgcagcgaccgaaaaagacgaaatgggagaagagagacgacggggggaaagtggaggagactcgagaaacgagaacgaaaaaaaacgaccgcgagacacgaaaaaaagtgtcacccaacggcagcaggctctctgagaacagtcgacccctcgagacggacacacaggagcatgtatgttgtatgtgcgtacccgcgtgcggcacgctgagagcgacctgtatgtttgtgcgcgtggtagccgtggaggctacgaacgagcgaaatcggggcttcacagcaacactctcaccagcaaacacttcgttttcgcggctaataggtggaggcatgaaaaagactcactcactcaaagatgcgatgaaagtgcgcgtagaaaaggggccgagacaacagagtccaagcgccggtacaaccagatcagggacacttgggaagtctgtgtgctggctacagagctcttgcttccagacagacctctccacagaatagcgagcgactgagcaaaaatagttttcgcccctttgtctcgttggagaggagagccgcttaccttctgctgaggggggcctcgcgcaatcgagactcaacaggcggttgtggaacaaggtacacgaccacgaggggctgagggctattctcggtctgcggaaacgccgacccgcaggaaaaggacactttttgcttcaacagggccgagatctgaggtagatgcgaaaccaaaatgccaagaaagataggcgtaacttcagaaacacacgcataccggcgtcgtgtttgagagtcgcttggcggccgcgcagcgccgtcggtttttattggggatgaggagcgcatgcagagaaacccctacagacgacacagaacagaagaaacgaacaaggaaaagtggggtggcagcagttcgcgcgattacgcatgaggcaagctcgagaaaacgccgagaaaacgggaaaatcgccgcgtattttttgtcgcttccagttcggagcttttcatttctgcggtgaatgtgcttctgggctttggtcgccgcgcgcgtctgcaccctgtaactggtgtctgttttatccgcctccgactcaaagcgagcgtgtgtccagcgtcaaatcgtaaagtgaaacttagaaaccagtatcgggttcttgcgactctctgcgcctgtgactctgtccccgtttccgccccgtttgtctccgacagcacatcctttgcgtgggtggtgccggtcctctaccgcgcgcgcagaagcgcccagacgcttcttgtgttttgttttcctcgttttccgtttagtctttcagttttttctttgtgcttcgtctcagaacgtcttctcggcttcatcaagtctcatagatttcgcagactgccccattcagtaccccggacctgacaaca

SEQ ID NO: 2662 - DNA, 2343 bp, Toxoplasma gondii
  source 1..2343: mol_type = genomic DNA
agaggttcatgtgttcagtgtctcgctttctcaccgtgtaggtagccaggacgtcgggtcgatcgacgccgtaggtgattctgcggaatcccgagggttcgttgagagtgacgaaaatatcacccgccttgtagagaccgaagagtgccaggttcgccttggggttgatggacaccagagttctgatgtagaagcgtacttctgcttccctgggcagaaggaatttcgacaccatcaggttaccatcaacaatgcgaaactgaaactggctgtccgtgggcatttgcccgtccagttcggtgaaggtgacacgaccttgaccacgcagagagggtgacgaggtagtcgccaaagagatgctcttcaagatcacactctcatctccatcgaggacaaggttcattggttcggtgccggcgcgacggtaaagagtcaggagagcttcgacctgcggacacgtcgaaagagaaacgcgcagtgcagcgaaagaaagacacgaaaaattggtaacatgcaagcagagtaccggcgccacggaacaaggggtatgatggcagacggcgcaggggcattacggagcacgaaaagaaacaaaagaaaacaccctccagcacaaaagaatgaagagtcaacagaagagaggggacgaattacatgcaacatataaggaatcaaacggttcggtgagagaaatgaaggacccaaaagaggaggcacacagaatggaaagtggagagaggaaaaacagcacccgaaaccacagctacggttttgagtccgtgagctgcgacttgtaggcaagaccccacagaacgacaaagtgcgtgaaactctcggcatgggtacaaagagacacagcccacaaagaaaggtccgatcctagatgcatgacatacagacgatggcacatccgcacggagtggacggaaatcgtagacacactcacagttgtgtcttcgtcgtccaagttgaagtccaaaacgatgtcttcaaggtagaaattcggaggcttgtagtccaatctcacgacggccttgggttcttccttttcctcgcctgctctagaaacctgcaccgtaataacggatgcaagcagaaagctgagaacaccccaaccgcatagtctcgaggaaacacctccggagatccgacatggtgacaccgtcgcattcatggtcgtagccgacagggtcaccataaaataaaacgctttggaacgacaagaataaaatgtgacggggagatcccgcacgctgaggtgacaaagacaagcccgacgacaaatgtggaaatcaaaaaaactcagcggtacactgaatctttttgttacgctaaggcctcgcgacagcgggccgtccacctatagatccagaacggcaaattggcaggtagtcgctgtatgcacttgatacacctgcacacataaaaacaaggaagcgtacagctgagaaagcacgattcgggagcaacggaaagctgcggaatcgtggtaactgctggtacaaccggatcgtgaagccagatgcctacaggtcttagtgacagcacaactggcagactatctccgggcaaaacagcgccaatgatctcgtgtggtgcgtccgccagtcagtttgaagtcgcgggcaacaccttgaacgcgccaaccacgaaaacaagaacaaatcacaaagaatggcctcaggacaggcccttctaattcaatttgctaatacaaacaagtgttcttgtgtccactcctgaaaaacttacaaattcgtgagagttcctaagatccccggagtgcaaagggtgccgcaacacgactacaatggcgacgacctgacggagacgccgtttcagcctgtagtgccgcgatcgagagtgctggtttcggtcgcagtgctacgccccacggcttaagttcctcaaaccgagatctgggatgcttgcaggggtcgtgatgctcgtctcttgtgtcaggcgggaagagacacgcttagggtccgtctcgagtgactctccgtccaaattcgggtattctcgctgagatgagtgcttgtagtgtcgacttgtgttatgcgacgccactagcgcatgtctttgcaatcgcgaagacgctgctcgattggttgatacatcctttcaaaagttgcgatgtgggcacgaaactggaatctagaaacccttgcataaatgggcctagtgtgtagctcgaatggggaaccacgtggcgcccgcgaatgtgactgaggcgcgcgccttgcgagtaccacgcgatctagttttgccacgaaccattccagagatagccgtgcagaagctctgtagctttgctttgcagcgcctgctacgagcgcaaaa

SEQ ID NO: 2663 - DNA, 1680 bp, Toxoplasma gondii
  source 1..1680: mol_type = genomic DNA
cgttccgttgccctaccttgttgctccgcgacttcggagaaacctcgggccgcgacgtcggagagagttgggcgtcggaaggcgcggctcttgagcaccggtcttcctcaaacgcctcgccgaggacgccctctggcagtagggaggaagcttctgcaatcatctcaattgcagagtgaagccacgaagcgtcgcggaccatcacagtcgaaaacgccagttgatagtgctgcgccgcaagcgcggccgaagcctcctcgatacgacatggcgctgacgaaggagaagaagcagaagaaggagaagacgcagaagaagcggtgtttcccatcgcctcttggaggaggggaagccagccaggaacccagtggagagaggaggcgtcgttttccttggagtctggaatctccttttcgggtgagtgtgcgcctggctctttgtttgtctctttctctgcagagcaggtcgcctgcgtcgcggcggtcgcagcgaggagaggcggcaggggggcttggcttgctccttcgtctggaacggagacagaagacggcggaatttggtgaaggaactggagcagcagatcctgggaatccacgcgtttgcatcttctctgcgtgtcgagacactccttttcgaggctcttccagaagcgcgaaaggtcgtcgaggttcagggaaaccagctcctcgaccgcaggcgagagagcaggagaggcggcggaagacccgccgcggtccgccatgtttctagcagaaaatcgctgacgttggtcgaagcagcaagggaagagagaccggtttagtgtgctgtcaagacacctcaagaaggcgcatgcgccgtcgcatgtgcgtgggaagcggcctgccagtcgagagccaacggcgagaggagcagcagagacgcgagagaggcgaaaaaggaagcgagggaagggagaagaatgcgaagaaagctcagcgacaacgtgagccccgagaaaaactcgcgtctgccgagagaaaccgagggtcgactgctggctgccctggtgtcaaaacgcgtacatgcgcgaaacgtttcgcgggcgatcctcgtcgaatccgcacagccccccatgttcagtccccaggaaacgaacaggactcgaccacttggcagctcgatcctcacggaggcgccagatgcacagagcacggtgtacaccaaaatatgacgcagctgcgattcatccggtcggcttctcccattcttcagcgcctcgcccaagaaaaacaacgcgtccggaagagtgacacagttccttctcgctctcgacagaggggcagactagtccgtttccgggcggtcgagctccagcgctgccgacgacgagacacccgaaagaaaaaagtaacgctgtccacatggccatctgcagagagagatagagagagaggacaacgattgaagtccgagagagacgcttaggcagccacagcgagcggagacggcgcgggcgttggtggtctcggcgcgcgagtctccggcgttgcccggggggtgcctatcaaactggagtttgtatgcgaatcgcaagcaggcctccagcggagaaggctcacactgacaagggaaaaaacagcaaaggagctgtgagctgttgagagaaaatggaaaaatggaaacagggtgtacaggcaacttgtccggtgggcgctgtcg

SEQ ID NO: 2664 - DNA, 2075 bp, Toxoplasma gondii
  source 1..2075: mol_type = genomic DNA
cagtcgtgtctgctttctgataaaggcacctctaacatgcgctgaaacggcaagtgagtggtatgccgacacaagcatccctgcttttgtagacaaagattataagcgtctctctaagagcgatattcaggtcaatcatccgcgtgtagcagcccgtgctggcgaagaaactggttattgtattcttaacgatttgagtttcctgttactagactgcccgaactttttgagcgcagacccctttgtgtgagaaaaaattgattcataacatttttgtcgcagtgatggaaagagcagcgtacgactaccactgctttctgggctgttgacttttgagtttgagcggttgagcgcgggagggatcaggattgttgcataagctcttgataatccaggcactaccagagcgtccaggtggatggagtttcacacacaactccgggctgaggagaccacctgtcagacttctgagggtgaatgcttttccacgtgtatacactcgagaatgtgatggggtgcggaacaaaatgctcatgttaaagatgtcttctttttcagatttctgcagtcaatgcgtttgatatagagtttactcatgtaaacttgctgatgaagtttcaaccacaacgagctgacacgtttctccgtaggtcacagagccagtgtttatgccatgatgtatacacatgggtttgatgtgggttacggaacacgattcctaggacgcttatctttctgattaaaacacagtcaatctgtttcccatagggcgtgtacaattgaacggaatacacaatagtactccaggaggccttgtgagacgtcgacgcctagtcttctctgtagaatgcgtttaccggagacatcaactctgaacgcaacagttttcggtgagtgctgtggtgcaaaaagcattctacatttgtcactcagtcgttcctttaaaccttgaaatcatcgcccggaccgctacgatgctgtaatttggagtttccggtgaacctctggccacaaggaactggtttattcccacttcactaccattctaagaggatcagttccatctgcgccagaaagcgtccctacaacactgtcctcatcccattttcaaggaatcagaactgtggaaaaaacggacgattcacgatgagtcacggaacagacactctgaccattacagacagacagtcttcggtgtttattcccgcgcgcatgcatcatcgtgcccgagtggaaggtacagggtcaacaagcttcatcagcaactctgctctgcgtttcttgacagcatgcgccgaaatccagaacaatgtcctggaataaaatacaagtggttcgttggtcagccttgaacgccgagccttcctgcgttttttctacccggacgagttccggataccacactgctgtacggcaggactctgtgccaaccgtttcttcaagtcctcttcgcgcacctcatcccattcgcaaactggagtctcgcttctctctgtcttcatttcagacccacctccatcgtgacttgaattcctcccagtccgtttctgccgcctctgcctgtttgtgatgcaagtctacctgtaatcccggtgtgcccgttacgcagacctcacgactgtggtgtacagtttgccgttttgaaggcgtctgcattcgtcacgactcttttccctctctgcagcgcttcactgtgacgtttcctgttcaccttctcacatctaaccgcgcccctccctgtcctgcttcggcaagcctgtctgctttccctctacaggacagccgcgaccgtgcatgcgtagaccctagctgtcatcccgagtctaagaaaacaaccatttgtttgatttcctaaaccttaaaccctgttccaaaggggggagaagaggactggattgtctcctactgccttcttcgtgccgtttcgggagctttatcgttcgtctcaaaaagcacgcccacctgctgtctcggcaaacgtacacgccttacccacaaccgtcttccttttgtcaagtagcccctgcgtcggcttcgtctctgctcagaaacctgcagctttttctcctgtacaa

SEQ ID NO: 2665 - DNA, 2442 bp, Toxoplasma gondii
  source 1..2442: mol_type = genomic DNA
tagggaatgctgcaccgcttaattggcaatgcattgatataataatcgtacaaacgctcagctagttatttagagacactcacgagacccccccctcccaagaaacagatttgtccccatggtagtgcatctcctaggaatggagcggctatagtaagtagatataaaacttgtcagctataagcttccgtcacctgtgaagaccgtgatggcacgagtgagagacgatatagctttactacgatcttcagctgattcttcgagcttctcgctcttcttagttattctagtttaacgtcacatccccgtatggcgggaggtagacgtccactgccatgcgggtcggtgcgtatctgcgtgtgtcgaattttcagagcagctttgaaaaagaagcggtatgacagacaaatcgtgcttaggtgtcttgtctatgtcagcccccctgggttattccccgttaatgaggaatcaattttgccggatgcatctaccgaagctcgacgacttcagatattttggctgtttacccagctgtcttttagcaatcagcagatacgattcaatgaccttgcacgacagcacacctccgtgctggactacccgagttgcattgatgttggccaccagcttgtttgtgtgaatattttcatcgagcaccgctggtgatagttcttgtgtgtaagcaagatgtaaaaagtgctcgttctctgacttgtgagaagggatgaactcttttgtgaaggggaaccaagaaggcaagcctggcgagaagtgggaacacggcaaatttgtttgtcgtataagggagcaagaaaccgcgttgacaaggcaagacgagaacagctactgatccctcagtgtgatacaagtatctcggaaaaacacgtgtttccaccggcacttcacaatcgactcgtgggcggattccggctggggcgacctgcgagtctacgaattgccggcgcactcttataataactggggcaggagaaatatttcaacatcatactctgcgagatatgatcagccgtcggtcctgggtaggacgattgctctaaactgggctccggctctctatctaccgctgtagtgaaataaatgaaatgcaggagtatgatatacggagctgttgagcagtgctagttgttaaagtgacagacccaatggtcactggagaatcagcagagtggctacagccgttcgtgatatgacggcaggttatcactacgactgcagggaatgcgaaatgtagacaccccaatgcgagaggacagtttcgatcatatgcttaaaattcctgaaacgttctggatccttagtgatgcatgatgcgacgatattcgcttgggatgttttctttatacttagtagagaagccgagcttaacatctgaacctcatccataacagatgttccaatgtgggagtcgcagttaaacgttgaggtcccgatagaatatttctggcttgaaagagcatgctgacagtcaaatgacaacattgtgctggtctcgacgacgtcgttgaggcttgtagagtatcagcactagttgtaggcactaagtgcgaacgactgctcgtccgcgtggaaatgttcgacctgaaggttaaactgcaatatgagagtgctttcttctggccccgtttcttccaagtgttgtgacagagggctatacacagcgcctgcgagtcgacgagctaacggcaagctgagagagcgtctctatcttctgtaccactgtaccaggagtagtctttttgcaacgccatcaccatacgtaactcaatgtttgctcgaactgtcggggctcccccatgcaaatccggtcgtcgcaatagactgctgctccgggctgctccaggacgcgcaagcgcaagggtgttatctgccgtcgtctgcccttaagccataatccagacaaagccgcctaagcaatggggcggctaaagcggacatctcgatcacgtatcggtggggtgattcctggttagctgcttccctgcatttggctaagcaaatctgtacaacaatcatgcgtgtcccaaacgtcgtatacgcagcagtagcctctttggaagatatattttttttctttagacgcattagcaggctaacaagacagatgaaaggcatttttgaatattaacatctttctgtcggtccactgtagctttctttcaagccccccgcccgggcgacaggcctgccatgtttttactttcattgggctgccgatcctggattcggaaatgcatgaatgaggtcattttatgtcacgctagaacaacaattgaaaatagtcttaatgaaatagaaatcccaccgcttgacgtttttttgtggagtgacattgcctctctctatagagacgggtgtttgcttggtccccaacggcaagctctacgccgagcggccgtgagatttaacacttttctgtcgaca

SEQ ID NO: 2666 - DNA, 2352 bp, Toxoplasma gondii
  source 1..2352: mol_type = genomic DNA
tcgcctctacaggatttcgatcgtggatgcgacagaggcgtctctgttccgcggcttccccgtttcccttttgcccctgccgaccagcgaaagactctgttttagcggaatgttttggacagtgtgcatgagtaaatgcaagacgctgaggtcggcgtctctctgcgcgcgcgtccgctcctctcggcaacagcttctctgctcgctctgcgactgtgttgtgttcagagtttaaagaggcctttgtctgcggcttcctctcacctggtggagcaattgattcaagtcgaagagcaaatggtcggcaagaagaacgtctctcttcttattcacctggctgacagcagacggaaacgcttgccgcagccagttgtgcagcccagggatgcctgcctctgcacacaggcagcgtacgctgtcgggactccagcggaggccgaggcagaagcaaacgaaaagggagaaaaaggagaagaagaaagaaaaggaggactttctgagaggcagccgcgtcgtgggtaaggtgcaagaagaggagtgagcaggtcgcgctgtcgcgcttgtcgagacgcggcggagcagggcaacaacgtacaagacctttcgagtcttcatcctcggaacgcatccctctggaggagttcgagtcgcgagaagcagcagagagcagcgaggcaacgaggaaggaaggaacgaagctggagagaagcaacgggcgtttacgtttcaggttgacaggcagacttttgattgagacacggagaaagaacggaaaagacgaatcccctgccaattctcgagtggggaaagagagacgccccagaacagcaagagggagaagagactgctgcagttgccccgaaggaggagagaagacagcagaaaagcggaaaaagcaggaaagaggagggcggcatcttcgctccgagaagtccagagcttttccgaagctcgtgagacatccgaagagtcgaaagagaagaaaacgacgaggagagaaagaggcgttcaagacatttcttcgtgaggtgagcgaggggtatataggaagtaaaagttcatgcgttcgttctcttctcagcacaagtgcctgacgtccctctctgtcgtgaggaaccatctcctgtctcttttttcttcctcttcgccgagagattctgattctcagagttggtctctgtctctcgtctgtcctccctgttcttctacttgtccttcttctccggtgcgtcttttttctctccttccaccctccctcgccctctggcagtgtacatacgcaccggagccgacgagccgggagaggccgcgaaggtggagacttgagcgagcgcggggaacgaggataaagagaggaaagtggagaaggaatgttatctggtcactctttgctcccgaagaaatggagacagctgtgtctctgagtgtcttgtcggactcgacggtcctctgcgcccaggagactccttcttccgcatctactcccatctcttctgctgcttccttccttctgtctccttttcagtttatgcttcttcaatttatgctcctgccgcttccacaagcaagacggagactgcgcctctgctctcttcctctcggcaaaaggcggccttgcaccgcagactcgacgcacagaagagattcctcgcagactctggcttgtagccttcctttcgcagccccagaggaaacaaagaacctttccatgtgcgctttcccctctttaaacctcagctgggtggccggctttctttcttctcgccaacgagctgagcgagcggagagcgaagagggacggaagctgcgacttttcgcgttcatagaaacgctgaagctcggagagacgcctgtcgcactggagaccgcggccgcatggctgcatgcagagagtcaaagttttctggtttttttaaaaaataaaaaaattactcagagagactcgacagccggactgctgggagtggcgtcctccactgttctctggaaaagtctcgaatgtggaccaagcctgccgagtcgcataaaggagacagaaccgcgagaaaaagcgcgtttttcagaaataagtttcatctttccaagatctctgtctacgtactcttcaaacattttcaaaggtctctcagcttctgttgtttttctcctcgcctttcgagggcggcggagtcccagctgtttgtggggcaagaaagtcgtcggggaaacggcgacttctctgtcggggaattttcttttctggaagaacttttcgcagcttcctgtttcgtctttacttctgggggaagaaaagttgcggctcggtgaactggcgcggaaacacactttttcttcgacagagaactcgcaaaa

SEQ ID NO: 2667 - DNA, 1378 bp, Toxoplasma gondii
  source 1..1378: mol_type = genomic DNA
tttcaaatccgcttaaacgtgtacagtgtctctcggagaacctggaattccgcatttgtcgtttttccagcagcgccatgacatcgcctttgttgcggcaatagcggcattcaggaccggtgtctacggcattccactccggtgtttgtcctaacacggcagcctggttaggtctgattcgtctcgtcatagatacagtgaattcccggttggttacgagcaacagccttcccacatcggatggcgaacgaaaacgtattaccgaataacgaaagacgatacgcgattcgccttgacgcacatcccgtcgtctgtgtggctccggtgctcttcccgcacacgcagcattctacatagtaagatacacccacctcaaagtctgtgtcgcaataaaccaccggtttgggatggaatttcttttaacactgcataacatgcaagaatattttcaaagccagcagaagtttgcctatacatagatgagaatgcgggaggaaacaagacaatcgtttggtgtatcgcggctggtggtggcatgctttgaatcccgtttgcggggaaaaacaaccgcaagccaggattcttgcccacattttcaagggtcatcgttacaaaagatgccctcaaacgcgacgcagtcaaacgcctatcgtgtttcgcgtcaacagagacaagagacgatttataaccgtcgtgacagaagtacagaaaccccactgcagtgcagcgtgcaatttctacaggatacttccattctctggctttcgttttgtcacgcggaaccggtctacaacagttagctgtcttactcgtcttcagactgtccagctactgacataacgacgtctcttcagaaagggcggaaatcgctgtcgtcttccgaagaggttcaggcatcccagagaaatttcagttcactgccgaaccccagtttcagaccgtgttacacttaatgacgcaaagatgatgaaagctaccattcaagggcgatagaaatagatagctgtgaggatgagcatacgatgcaacacgaagatgattcattgtactacattgtatcttgcctttttagctcctcacaggagaagcaggacgggcttcgagagctcttgtgaacggctacgcactatcgcggtctcctctttccagctttcatgaccgatctgaagtcgtgatgccattttgctggtgtttttgaatctggcaatgcttgtcgagttcctgcgaggagatctctccttgtgcagagaccagtttcgtaccttgcacgagacaacttcgcacgcgcgggtgtgcatgcacacttgcttcgcctcaagcttccggtttcggcacgcccccgcttcacagtctgtatttcccgtcgttttagagtgaa

SEQ ID NO: 2668 - DNA, 1764 bp, Toxoplasma gondii
  source 1..1764: mol_type = genomic DNA
gtatctggttgaccgagaatacggatctctccgctgcactagaatctctgtcgtggtccattctggtttcgtcgattcggctttggcgcagactttgggggcagaagtgtttcaagactggctgcgtcacgaggctgcccgacagtcaagaaaaatcatgtcttgagtgaatagcagttagaaaatcccttagcaaggttccgcgagcaacgaattgcatctcagatacgcacgaagaaagaaaatgcttcaggtgtcgcctatggtgtgtctcagcttatgatttctccctcgtgatcatgcatatctttcaccaccaagtcctcttcacagttcgataaatctgcttcttcgagcgtatctttgtcagacacgatccttatcattagtacgacctgctcgaatccaccaaagcctaccattctgacttggctgctttacacgtgctcgtgcccttgaacaacgtagggcttcgccgaccagtgaggcggaaagtccccgtggccatctgaaaattcgtcagttgttgagtcggtgacggtgacagaagactggagctctaagcggcgctggtgccggccttcgataaccactttcataaccaacaaaagtgcatttctgatgctgtgagtttgtgcggctgacatctcccccatagtgtttgctatgtcgtccactgatgacagtttcggtttggaacgaggaatgaaatctgatccgcgcttttatcttggcgcagtcgaacatcactcagtgaaacgcgtgcagcagtcagggaatagctagtagactatttctctaaggctgcggtggtgaatatcggtcggcaaggagtcttcttctcgtttcttgcctgctgtaaagccacagttacgaatgaaggtaagcaaaatcgtagggtttagagcctgcgggttgctttccaacacagctcaagggattttctgtcaaacagaaacacggacacagtactacgctgtggttcgcgcgtgctttatcacttcttgttttggaggcgtccacgatctgaggctcaacaacttcccatttctgaacgggaacctgttcctcccgaaggtcgcgaaacgcacaagtctccgtcttaagcccccttgaatgccttgccggtgttgcctgggggctcatctttgcaacaagtctcaaggggggtgcttcgggagcgaattccgtgactagacttgtctctcaaacagaggaaagcaggctttcctccaactctaaaggaatgaaggaaaatttcgctcggttttctcttgctgcggcgcctgtcgttcgcctcgacgggagacgcgcgcatgcgctgagtcgcgtgcatgcaaaaacgcggaaaccccggtcaagctgttaaagagtatcgcgttttccggccgtcaatcggtgcgtcgtccgtcggagatcttttcctgttcacgttgactttgctggtgtgacggaattcagcaaggacctgatcagctcgttccctgcttcgttttctgggcagctgaattgagcgtgcccgtcgccgtgcagtttgtgctgtgtcccacgccaggactcgcccgcattcttcctgccactatcgatccgcgagaaagccttcaaactgccgttcgctttctctgcattccctgtttgagtctgggatccgccgcagcctcttcccgactgaaggcggcgctcccgttccactctgcctgcggtgccgcggatttgttctgaagacaaaaccctcgcgcttccagctgctctcgagagctacaa

SEQ ID NO: 2669 - DNA, 3059 bp, Toxoplasma gondii
  source 1..3059: mol_type = genomic DNA
ttcctttatttacagttgtgtcttgtttaggttgcctggaacattgccggcctctcgaagggtggggcagcgtcatttgaaacatatttgtacaatgaagcgcgcatgcttcctgtgactatgggcatgcgtctggatcaaggtatattcacgtatttagctgtgccgtgtgtgcatcggatgtgtacgtgcctgacgctctccagtaccacgagtcctcccagcggacccgctgagtttgcagtgttgttgtctaatttgttttcttgtcactgaagtaacttgaaataacccagctaatttgtgctgcttttatgtggccgaacggaactttacataggggtcgcacatcatttcacggtggtcacggcaaattgagtaaaacagccccgtctgattcacgaaataaaccctcaacaagtgccccggccccgaacttaaacgtgacggagtgagcggcgcacacgtgcagtgcggaaaaagtaagataacacagagcaccagagaggaagagcgacagagatgtcaccaattgagcaaggcgggaaactcgtgactctagcggactgtcagaagaacttgctcttcttcagtagcataacggtccaaacgtaccaatctagtaacgcttgttcctcgcatgtctcgagctcactgcgtacttacggtcagaccaaaagcgttcactaatggaactatgaaatcggaggtcgcggtagcaattggaaaaggactggcggacccccaatacgcggtagaacagaagattcttggaaagaaaacagaacgggagcgcacgcatgcgagcccacgtatctctcttcttcggcatagaaacatagtgtttgttgtgccagaggcgttcttacacggggattgaacgagagatagcaacactaagtgcgagagtcgcttgcgagaaacgaaccctacacagacacatcgatcgactgactcgacaccgagctcacagtgagaatgtctgtgatttttggaaggagttctctttcgtttgcgtttttcgtgcacgggtgacaatggtcttcgaatttgtctttctcgtctttgttctggtttgagcaaagcagattgtcaatcaactatgcaggcgtcgcatgtcttagactctgcgctcggctagaattcaagatcgaacatagtccagaggcgtcagtgtcactccatctttcggatggtgttgcttcttgtacaacaatcgtttaaatgtctgtatcccaacctgggcgttcctttccttctgcctgcttgttcctgttgtttacgaacgcactcgtgtgttgattcagtgctgtggaaaatgagatctctcctccccaagaaacctccaggaagagttgacagatgtgtcacatattagtaaggcatgcgtacagccatgtctgtgattccagagaatgcagcatgcacgaacgcctaggcaaggttccgtatttatctctttctcgccgtttgtcatcaagcctcagcctatgcgatgagggatgccggggagaaactgggtgccttggagttgcagcgattggaaaacagcgacggcgcacgtggtctgttttcaggtctacttaatgcgtgacagtggtcctttagcgcacaaagaagaacgatcgatccatgtctgcccttctgaagcgctgtggaaaagggttttcgtatcagatagctatatgcacggctctgaacagtgtaatgtccttgtggcgcattcactatcgtagtgcgtggtaggtgccagaacgggcacacttcgataaacctgtaagattatacgacatagagtctcgtttctttatcacgccgcgatctgcctagcgctgacagcgctgtgacaatgttccatcgccctcagcttttaacgcgttctcagtacaaccaccggattatctttgtcaacacataccttcgtctttttcggctgttgacagccgaggtggtgattatacggtcccacaatgtcatcgcggttggcgcacgagtgggtttcagtttttgacgagacaactttttctggtgcaactctttcaacatacacgaacagtgtttgctttgcggaagcatgcctttttcacatgtgcaaatttgtttttctcaaacgacgcgtgatgctacttgcgctcggtgcatgcagtaacaccggtttttcgcatcagaaataggtaattgtgactcgcttcctgataaatcaacactcgaagataggactcaaagggaaatcaaggcgttcgaggaaactaaaacacccctttccttgattccggttctacaacagtgtactagtcatttccaaaccttcctccaggagaatgatttccaaggaaacgagcaatcctatttgagcacgcaaacttatacatgtatatgcgcgtgcatgtgcgtagagggaaggacttgtacatatacgactgcctgcatttctttagcggtaaccactcggacgcgcgtggcattcttcctggctacagcaaagctttggccggactcccgctcttcactcttttgtctgcttgagtaaaacgacattgcttcgtagacagttgttggactggcacttagtcgcacgttactgtagtgaacaattcacgttcttcgtcgtctccccccgtacacgtatgagagatcaatggaaatgaagagtttgggagaactcagcaaccccagcgtctaatttgggaacaacaaaactacagaaagcagagacagcggaggtcgtagaaaatcgggcaacaataccgggagttgcgatgccttcattggggtacgacattctgaagttgaaggctacaccgtgttcactgtactggtgcagttcctgtaggaaaaacccaccgggtaaagtggctgtataacagtgaagctgcgttgctaaaagaaaggacacttttgtccggctttgttgattcaagcaccagtcttcgtttttttacgtagtttgtaagtgtgaaatgagtgggtatctccggctttggggagcgaggaaatgaacgcctttccttgcgtttgttagcatgacacggcctgccgaccaggtacggaacctctga

SEQ ID NO: 2670 - DNA, 2858 bp, Toxoplasma gondii
  source 1..2858: mol_type = genomic DNA
aaggcgaagaagtaaggagttttgcctggatgtcaacgacgaatgccgaggccaaatgtggctgaatcagaggctcgaacagcagtgatgagtgcggggcctcgtgtgtcatgcagaggttgccttgaaatggcggggagcgatctcgcagaggagatcaagcagcagatgtcagaaaccagtattctggattgaaacgcacgtcttgttcaacggcaccaggtcgcgtgtggcgtccggtctgctttgaatcaggtacttcttggttctatgggtaggcgggagtcacttgccaggccagcagcaacagctacaacaacttcaggcggcagccttgggagcagatgggccgagccaaatcgaatctactcggagagagtaagtctgagactgttttacagcgttgtcttggaagacaagttgtcacgggttcttcaagaacagatgtgaagaagatcacgttctgaagacaaagacactttcgctgtatccgggcgttccagcctgtcaacagtccttttcaggtaaacactgtgtggaagcgaatccatttcgagctgcgatgacactaaagacatgcaggcgaacatcgtattgcgttggatatttctgggggacgcgagcttggtgcccgcactactgattcttcttcaggtagacaagggtcgtttgacaccgtattcctgtattgttcacggaacgccatctgcctaatcgttttcgtcaacttgcgtttttcccgtgaacaggagacaaaagcaacctcggcgaggaaagagtagcaaagccacagtcagtcgccgtgaatggatcgagaagaagaaggagagacagcgtcttcaggtacgtctgcattggtgtacaggattggccattcccggtttcatctgttggttgtctctgtggttctgagagcctcgacgtttcgtgcctagggcagtaacgaactactcggtttttgcagaggagaaacgggagcgcgtggcgatcctggtgtggaatggcagagtctcccagggagttctttccgcgggttcatgctccgagaaggaacgcagaggtctactgagcatctccatttctttctacttttctactcagggaaagaaggtccgccaccagagcaagtacacaggaaggaagcggaaagacaagttctaaagagcacggatgccgctccgtttggcgcacttttgaaatttacatttgtttttgcttttcctgcaactctcgaatgatcctgtgtcatttatcgacgacgtggcatgagtctctcgagctcggtttcgtcagactgtgtgatgcttcctggtgtgtctgctcctctgctttcaagctgaattactaattcactgcattttcacggtgatgattgtcggctgacagacgtcagagaaacatcctgcaacggaatgttgctaagctcaggtgcacggatatcgtattgagaaaataatgcccacatccccaccggggcagtgaaattgctctgctgtcactgtttgcttccataatctttctccattcttctgccgaacgacggaggactgcagttagtaaatctagagaagtggagccccacccttcccgcggtctgttggaagggattggcagcgtagtgctctttgcaagtgaggaaaaagtggagtgcatgttttagaggaacagctggggaattcttccagcaatctatggatgtcagaaaaacacgctcaacctacaagaaaaatggtattgagccagtagaaaactcttgagtgcttaccgtgactagtgcaacactattggaggtcacagcgcacgccgccgtagtttggtctaaaatttccctccacccttgcacgcaaatacttgcgttggccaccaaaagtttcagcagcgtgtcgacagcttttttagctcgggctcccagcctagtgattttgacttccagtgccatttccaacatatcagcgtcaaggttataggtctctacagaaatcattcgatggataggcctacacttagatgaccggcacaagtgtcagagcagctctgaagacgatcataagcgctctcagtaaggcttgcaattttcgtttaccctggatgtccgagcgacacttgatgcagcccggaaaactgaagacctcaccggcggacgttgagacactcatagtgtagtcggatctgcgatgcgatgaaaactaacaaacggcagccttacattttgccttaaaaacattctgtttatctcttgaggctgcggtaacgaactctacgtgcgacatgtcctcggaagaactcgtaggcacataactagttgttcggagacggccatgggaactccctcatgaggctatgtaccgcgaatcggccaacctggtttttcgtgatcgttttggtgttgaatcgcttaccactgtgatccgtcatcacggggagtcggttttaatgacgtcagaagacagcctttcttacccaagtcgagctgtccgctgttttaggggctgtacagcaggcggttgataccacgttttttctgcggacgacggaagataactaaaggcaacagtggccaaccgggccgcacgctcccgtcaccacgacgtcgctccctctaaatttttgatagaggccaccacccctccggagctctagtctcgtctctttgcagactctgtctgggtttctggggccggacgttgcctgctgacgacgtaaacaatccctccgtccttaggtggaaggaacgtggggagagtgctggcagagcgtgccggcagcggcgctgccaggtgacacttccacgaaatctgtctttgttagcatagtttggaagaatgctgtgggattggtccacgtttctatccacagca

SEQ ID NO: 2671 - DNA, 4159 bp, Toxoplasma gondii
  source 1..4159: mol_type = genomic DNA
cctcgcgacttccacgtggagagaaaatggcattcacactgtgacactctaaggactcgcgcatcggtggaagaggtcgacagccaatttcctcatcctctcggatctgcgagagacactgtctccgtgtctcgctccaccttacgcgggccgtgccttcgttttttcctctctcaccctctctgggatagcgaaaggaagagcctgtgaagcattccgagcttctctgtgatttctttgacgtctgcatgtggttgaactgacgagactcgagatccaaacacgcagcgcagcttgcgtctggctctgcatctcgacgtcgagatgcaggtggagaggagcgactccatctacactggcggaaagctgtttgagcaggtgagaagcgcagcgagcgcgaggacgaaggaaagtcctgtgtggaaagctggagacgctttggaaggaacatcgttgacaaaagaacagaaattgctgaagaaagcgaaagagaggagtgcggacgcagagaaaaagcaggtgaaacatcgcgcccacggggtccgcgaattccaggaacctgtttaggatccgtcaagacactgcatggtcagtcggaggtttcatgtcccggaatccgaagcgtggaggatgacaatttctttaaaaccaacgtctttcgttgttccgctcaaaggacgaaagcagaaatgcgggcgagcggcaagctccagcacgaactcgacttccacacctgccaagaattctataaacaggagcctcggtgcggtgtatgtacaccgcaagttcatgagtaaaacaggaaccacgggaaaaggaccgctcgatttgtccatctcacctctgctggtcagcgctctaaattcctccgacgcttcttttctgcagaggactcaggaagtgctgtaccgtatttgaaacgagattcgcagcaatcgctctggaaatgcatgcggcggaagaaaccaattcttcgaaaggttctcctttcccttcatattttcggcattttcctgccgccagccgcctaccatggcgtgtctcctcgctggtgtctctccatcgatatcctggctcgaccaaagacgggcagagactgtgcttcatatttcgacgggcatgcaaggcgggagaacaaaacggcacggcaaaaaaacgagaaaacaacggggcttgcgaaggatcggatcgaagagcaaatttctcgacctgcctcgagtcgacagcattacgctgtagttgcatgcaggtgcatgcaagtcggcgcatcggggaaattcactgacttttgctcatgtgtgtcccgtaaaactgaggatttcgctcttctgttcttgaaatgtgttttttaaaaactaaactgaaaacgaagaggcgtcgccccactgctggagtgccttgacgaagttttgcaagggagttcaaaccctacagctttggtgttctgtaggactttgaaagtaccctaaacaacgcggtcgaatctctcctggacttcttctcgtttccagtggatctgctgtcagaacaatggctgcaccgatctactgcgttagatccttctatccaccactcgaaaaacttcatgacaggggtagacttttaagtcgaaccgcatgaggtttttgtatctcctctggtagatgtaataaagagacagaggcttcagtttcacacagcgcaaatacatgcagatgcgcctctttcactcgagccgtcaaaaggcccagatgactggaaaatcggaataacagtggaaacatgaactgtacacgacgaccttgaggaacaggagagaaccactttcacccgggcacagaagcttcccctttgcttgcgcgttctcactggaaatggtcagcgattttcagacagacgtgcatgcaatcggaaacatgttacaccgccgccgacgtgtggaaccatcgggtagtgggagaagatacaactttcggtggctaattatttccagcgactctagcaacgaaaatagtctatcttctgtcgtccatagagaggatataccagttctttcagcaggggggggggggggggaacgaccacgatagccactaggtcgtgaggatgatacgctcagcgcatgcacaactgctgcatttgtgaaaaacagacgaaaggtctagaggatccagagactcgcctgaagggagtacgcattttcctgttgactgcattgctacgcctctcttgtgtgcgcaagcgaggaatcgggacatctgcatgtgcctgagggaaagaatgtagcctcatactggctgagcagtcactgatgagcagtgtcgttcatttcgatgttctcgttctgaagaattggaagcctcgttaacagccgcttcgttcacaagtttattcctggagttcattcgtcggggagcttttccccaagtgaatgtgcggcgtgggtgagattcgtgtatcattcgagttacttacgcagcacgacttctgtatcgatgttgctctttcggttcggcaaggagggcactgtcaaacgtcctctgtgtctgcaaaaggtgaccgcttacaaggttgctcctgccatccattaaaaagggaaaacggtatctttgtgttgaagcagtgcatgcgacaaacaccctatgtccatccctgaatgatgtcagtgtcagcattaatagcagatatacatacacctggcaccaaaatgtatggacctgcaaatcttatgcctcgaatcttaagatcagcagagagagcaactggcggccagtgcttgaagtgcggaggatggacagatctagagcgcggcatactatgactcaagaggatttcagacatgagttaaagacaccgagctctttatgattggggtgcactacaccccaccccccttcccccccaccccactggaccatttgagacagctacgagaaataacggtactccgtggaatacgtaaagaacataacccactgagtttataccgagacttgaacacttttagccgttccaatttctagagtcacccatctactacacctggacgtacccgatgtgcaacaacggtggtatcgtcaaagacgccagttccagaggagcatgtgaatggactaccgcaaagcagtgcacattgtatctcgggaaatcaagccccagtgtatggaaggaaagagctttcgttgagatttgtataaacgccgaaacgaccaagggtacaggtgctcgcttgcatctagcgggtgaacacggagccgaactctttgcggtcttcgatggtcggagaaacgtggagagttccgccatcgagtgtgtagtctcgtttgccggtacgataatgatattgatgcaacactaacggacgtatcacacgtataaccagtgagtggaaattgcaacgcaccctagatttgtgtacgcgaaaaaaaaaggcaccttcacacgcatatttggccagagaggaccacaactgcagccacattcagtatccatcgactttaaattggcaagttgcttaacgtttttgccgtgtcctcaccagaggtttccgtctgtcatccaaaacactccaactcggtacatgcaagctcgtggcgtgcgaatgaatccgggcctagcacaccgtccagatacttccgctgtttggggatttcctcgacagtttcccgtcccaaccacttactgaatgtccctgtaatacctaagcactcatgaaatcccgtaacctgcatgtttggcggttgtttccagcgaacagcggaagtttttgtcgcacgtttgtagcaaagtcaactgcacacttcctgcaaattgctgcccgcttttctcgcagcgtttttttgtggcatgcgccggcgcatggtctggtgtttttgctcgttcagtagccctgccaacaacgaacttcgcttgactttttccagttgtttcaaagggcaccggacttcgcttccttcagcatgctgctgaatgtgtctttgtggctgcgttctgtctcgccccggtccctttctcactagttcttcctgtgtgtttcgtcgtccgtcggatatggaacccgcgacaacagaagaggaatcgaaatctggccagacgcattttctcatcagagcgccgcatttacctggcttcgggcgaaatgtaacctgtgaacgggattgagcgggttgctttgagtgta

SEQ ID NO: 2672 - DNA, 1803 bp, Toxoplasma gondii
  source 1..1803: mol_type = genomic DNA
ttcatgagtcgctcgagtttcgggtactcgaggaaccgtttgtcttcctcgcagtctcggatgaagttttgcggccgctctcccacgtccacaaagtgctgcgtgtagtcgttcatgagcctcgcgcggccgcgcacaccgatgttggtgcaggttgcgggatcctccggttcgaggaagccctcgtcgctgcgcccgccagcctggactcttcttccgcctgcatgcgcgcccaccagctccgaaaaggcgccctcgaagaaaggaccgccgtcgacggccggcggcggaggcggcggcggcacaacccggctcgctcccaccatgtccccaggtgtatgtgcacccgcggcgccgggtgcgccgcctgcggccgggcggcggagcgccgcaaacgcgttgcctccggacagcccatcctgatctcccacttggcttgccgccgaccccggcgcatgcagaacgacagggccaggaggcggcggcggggggatgaaggcctcgtcggccgtcgctccgcgaactcgctttctccctgtagggtacgcagttccgccttgagtcatctgaaaggaatggtcgacgccgcggccggagaatccgccacggttgcgacacagccgaggtcccagacccggggcctctcctggaaagccgcccgttgcgcgagagctttctggaggagccggcaggctgctctccatcgcaccagcaagctcagtagactccgacacaggaaacgatgtggacctggagatgcacggaaccgaacttcagtggaggtacaaaaggtctccgtctctgccgatacgcaggtcctttggatatattcgagacgagttgaagggaggtacaaaaggtctccgtctctgtcgatactggaggaccgcaggtgccggagataacttcagctggggaatttagacagccaagttctgtacgactgctgcacttcaccacggatgcgaaccagggtagacacacctgctgcaggatcgatgaacagagaaggagcgacgaaacagggagcagggaagagagaaacagacagttggaggcttattcatcgtttctttggggggacgcgcgacgagatggacgaagagtatggtctacgtttgccgagtagaagaaaaccgagggaaggcctcaaccgccacagaaaaaatcaatgcatgttgtctctccaatgtgagttagagaggcatcgggaagtcgagacaagacagaagagtggtctgaagaagagaaacgagagagggaaaagaaggaaaaggaaggacaaaataacaattaaccgaaaccctgacaggttgcagcatgcatttaccacaaaggccacagacgaagctgaacagccaacggtttgactgcttgattccctcgcagagaagacaggcaattccgagtcaacaagcagttaaaggacgcaaaaagtttccccatgttttcgaatgatgttttccctactctacacgaactgcgagggcgcggacactcctaggagaaaacgagtgcgtgttgagctgtccaatgaaaaagcgaggatctgctgtgcatttctgccagagagacgtcttccacaatcgcttgctctccggtcagaagtgcagaatctctctcgcaagtcctctcgtcaggaacctggtgaccggttgggttctcgcgtaaaccagacccagctggaaaaacgcttttgcatgcgctgaggaactcacacgacacaccgtgcggccgacacggaccagcggagaaggttcaaaagaaacggagaaagcgccgcaacgatcccttctaaaaaca

SEQ ID NO: 2673 - DNA, 1276 bp, Toxoplasma gondii
  source 1..1276: mol_type = genomic DNA
ccccgcaaccacaatagagatctggaaatcgttgttgctctaaggaggaaaaaggagtaggcaagccaagtttgacggcgaataatatcgagcatcaaatgcagcgtgcaccagttctccgcaagtgcagcctcaaacaaggagtcgactctgacagtgccatgcactcgaaagacgggcttagtgttgcgtgctttgcgtgagggcctcgcgactcgattcacttttacacgacattgactgcccaatgtggcgggcaaaccaggcaccctgcgaagtgtcaaatgctacctcagagaggcgtcttggaagcatgatgattgcaggcggtgtcgggttgatctggaacgctattaacaacaaacaagattaactcgttctccattagtagtttcgctgttttggcagagtctattgtaactggctggaggaagctacaacttgggacgggttggtggagacgaagatgagtggcaaatgtgtcatggtgagcgttgacttatcgcgccagtcatgggacgagaacgatagtccaagctacccagtgtgcacgaactcataatatctcgcaccattcgaatagccccttcccctctttgtcgtaacgaagtggcttgtttttctttgttgtcattactgtcactatgctattcccacaggtcaataccaagttttacatatttactaggtcgctcgagcaaacgtttccttttcattgcagttagcaagagtgatcttttgttgacgcctacgtactgtgcgtcttgccattttctctaatcatttttgaatgaatcatcacatgaggcgttgctggagcgttttctcgggccgaccgtgtccgccggacgatccttgtagcaaggtcattgttccagggagggtgagactccatatgtcatgttttgtcgagcgattatggaactgattcagtatccgttgctgtgcgaggaaaggcatactactgttgccgtaacagacaagaggggggaggttataacaaatggtgttattctcagcgtacgaaatgtccgtttgtcgggtttccacagaatgccgaaaatgtccgtgctggcggacctgttgccgtttcaaaattaaacatgcgatcgtgggaggcatcggcaccagtaccgagtacctcagggagtcacgactgttagcgacctgccggggtagtgtaggtacactggatatctggcaggtgggtttttcgtatccgttgaccatctagaatttcatgttgtaatagatgcgttttcggatgttgcgacaa

SEQ ID NO: 2674 - DNA, 1164 bp, Toxoplasma gondii
  source 1..1164: mol_type = genomic DNA
aagacaaaagacgttcatcctcctcctttcctccgtcaaactttgctgtcgctactggcgctcctctgaaactcacctccgaccgaaatatccccatgatggcaaacagaagacgaccaagaggacggacgagcgaagaggaaaaaaggcaagagaaagatgcggaggaagaggaagaccaaggggggtcaacaacgggagcaggtcggacgacaagagtgcgaggtcgaggtccacatgggagaacagaagacaaaaaaggaaaaggggagttcaacggaaaacggtggaaaaagggtggagacaaacgactgagatgagaggagagagaaagacaaaatcatccacgtgagagggccgaggatgtgagacagagacagactacatgggcggtgtcaaatgcctcccgttatacgtggatcaaacttcacagggacaaggaagaggatgcggcagcatgcagcatcctggaagagaaaaggagagtcctttgtggtgcgagggaagaagacgaacagggaagaagagacatacgcggcgaagaactgaagatggcatccccagacgccatctctctgagaggtacccgcgaccctggggtgtctgtacacctcccagaagagctacatatctaacgtctctcggtttttacactcgcccattcaactgtggagaggaagaagcgaagttctcggcgcggcgtgtcattcacatctcacattcgctgacatagacaccacagagtctccccgagaccagcggaagagacttgcatgcacaaattcacttaaagtccagattgcaaggcctggacgaggctatctcggtcggtgtgtcgacccagcgtcgccgttttttccgactactctgcagacggcaggaccgggagaagcagagagggcgtcctttccaacttgagaaagagtgcaagacctcggctcccgcgccgccagccggcttcgagacttctctctcgttgtttcgaaagaaaaaagggggattccttggagacaaaagataaaagacctcccggcgcgcagctgctgaggtcacaggcctgcgttttttcgagctctggaagcagtgctttctgtcggcctcgtcctcgccccctgtcttttcgatcgacctcgccggttttcggtgtcgacgaagtgcaaaaaa

SEQ ID NO: 2675 - DNA, 4290 bp, Toxoplasma gondii
  source 1..4290: mol_type = genomic DNA
gcatcggaatctggtttcggtagatcttcagcggcttagcaaatttatagaacatttcttcgtagtcgtcgtacgtgaagtcgcccttgatcagtttgtacatgaacggctgcagcgatggagtgtcatcggcgagcttcttgaggaacgggaagaactggggaggcacatagtagacgtgtttgatgtgctgagagacctccggggggatttgagcaggcacactgtagccaagcgacacagaagagaagaacaattcacgcagatgaaggacgacagacacgaacggcagacaaggctgctacagacagccgcgcacagaaaagacagaggcaacgggtatacgcttacactcctgaaacagaacgaaaggcaccaacgatctgcaacctcgactgttcttctctgcacccgcgtttaacaaagacagtcgccctgagtcgtctacagattcgcgtttcgtcttcttgtcttaaacttgaacctctacgtctaccagtacggaaggtgagcctgtgctcgcactcctggccacactgtctgtcgcccactctgaccttactcgttagaacagtcccctgggttccacacggcttcctttcgcagaccgaacccctaacatcgactggtacagagactttaccgcatggtccgctaaaagcaggcattaagaacacaacggtcacaccgagaccgtcgactgttgtgtcagcaccccattatctaactatggatcttgtctctgtacacgtgtggctcccatagttttggtgaacgcatctcaaacacagcacaagaaacaatatcctcgaaacacgttgaaacccgactctctctttggcgtacccgaagccgtctctcgggataacctggtgttcgtcttcccaaaccggctgccaggtaggtcggtcccactgcataacaaagagcatgggagaaccggcgccacttccacgcgcgtagagtccctctcctccaacggggatgttcaaagtgtctttcgcgccacgagtgagctctgggggatactcatcgtggccgccgctcatgccacgcgtctgctgagaaagggcactgacgcctggacccgcggtgatgcgccgggagtacaaaggagtggagagcggcgccaaaggcgacgaaaaagagaagaaccgacgagaagctgcagtcggcaagccggcgaaagacaacgtagaccggctgaagagaggtgctgtggctgcgccgactggccgcatgccggcgaaaggcaggaacaactgacgggctgtggtcgccattttcaacaacgggtgctcagtccagtatggaagtcgaggaaaaaatgaccatatctgctttcggcgtcctaaccgataataaaggccccggaagaccggatttccacgcgggtaatagggaacgcaggaacacgccgggttgtcggtccggagctgcggcaggcggtaacgcagtgtgtggccccgtccacagaaaagggagaaacgcccacgacaaagaagtaaaaattcgggggtttgcccgacaaatcgcgaaaaagcgagaattccacactcggaacacgggcgaggttgcagaagaaataccctggcgtgtagggcaagcctccttcgctgcctcaccgggaatcgcaaatccccatcaaatgcttgacagagagagtgagtaggcacacttgatcgtacgtgtgcgttttcaacggggagaacacagagggagcaaaaagcaagtccagcccgtgatccggaaggcgcgaaacgcccgggcgagagattgccagacaaagcaggacccaactcttcgaatatacagcgcaccagccaccaggtattcgaatgccccgataactggcgttttctgtgaattcactcgtgtccacgctcccccgtagcttttaatgtacacttctgaccttcttgtgcaaacgtccaacgtggaaacacgatcttagccgaaaagggggaactcaaatgccacgtttaatgcacggaggtcaacactcaagcagcttcttcaacgacactgctgacaatctcctgaatatatcagtgtggtctctaaaatgtaacgatgtactcgggtgttcgcttgtcgacttggatcttccaaacttttggaatcgactttcttgcaagaaacaacctggaccggcgtctgtgccaaatttgtagatatccagggtgagacactccgagttggttgttcacttcatacattcagtatcagctgaccaccccacccgggatgtatccatcttcgtcacagttatgagtttaggttaaccacagtcttgagtatgtatgcaacttctacgacagaaacaccacttggctcccccaaaggttacccagcgccaccaaagcgacctaactcacaaggagaggctcctccggtgtaaggctctctacctgaaacaacagggaccttcagcgtacagatgtcatatatatatatatatatatgtatatggtgtttacatgcaagtacataatagtccactttgacggatcggaaccagatgcacatgaggcagtgtccagattccgcaggcgtcatcaacgccacattgtcggatgaactttgctagctgaaatatcgggactttacgtcgtcccttgcttgccgcggcttgcatgcatcgtggtcctgacctcagcatagaaaaccattttcaaagctgctgccgatatacagtaatctgttatgtgcccgtatgcattgagacagcttttacatttttatcatgccccaccgtgtgcacggtggcaccgagagattacacagaagtgagaagcggcctggcagatttcaaagttcctcaacaaggtctgaaatgtacgtagagatagggacagcgtggcaacaaatggtaactctgcagaggcaatgaccacacttagcctctaacgatatgaggtgcatttctctcttaccacttcaatgacatagtgatccgaatccttctgatgccactcgcctctttctgtggctgagggagcccgggcaagagttctttgcgtcgtttctggtcgtacgtgctgactgaagtgcaaatcttcagtttcagaagggcgaatgtgcagtggcgtaccaccgtttattcctatagcaggataagtgtgcattcgccagaccgcagctaacatggataagcggtcaggtggatggtggtgaacactcagagagatttaagaagaaacaccgggcccacaacttggagagcgttttgatgctctgaatgccacgtattgaagttgcagtacgcagaggcccgcagtggtacgagttcttcagagagtcatcgtgagcgagcaatgatatgtatgagctttttcgtggttgcttagccacaaccctggtggagaatattagtacacagtacttcgagtcgctacgatcctgcagcgttcccccttgtttgtaacaatgagggtaacgctgcgaagctacgagtaactagctgcatgcattgcgagcgagctaaaaatcgacgcaagcgatccctctcaaaacggggtgtgccgcgcgtctcaaccgaagcagggaaacccggtttctctgttgccatttgtttagcgttgttccccgcgtcttagttgtcgactctccaggattgactacttctgaggcaggaagtttacaggcgttctctagtaaatgctacgaattgggcgaggggtgtagatcttgacgcaggtaagcgagtgcggcggtatggaaccggaggaggaaaacagctttcgttattttggcaacatagaactgtgtgttccttgagttctgatgatcggctcatctgcgaggctcctgacattttccgaaagtgaaggtgaatgcgcgctgccgatcctgtccgcgctgacggatggaccggtgtcgcagagaaactagcgaggcgtcattggcggggctcacaggcattttgccgttttgcccaagatgccagcagagtggattttgtagactgtgcagaggagagccaggggtgcgttttattcaaaagacacggaattattgctatagttctaaacatttgctagcagctacgttttctactgagagaagtgtcaggcgtggttgccgacgacgcggggttctggcacgcgcggcatcaatttcgaatggaactaccgttctcgtgagcgtacaccaattttcccgacagcatatcctccacccgaagatgcccagtgcagtctttcggaaaagttaagggaaggtcgggactgtcttcttgccaacgtgctcactaaggtggtacgtttcctgcgcttccctcagacaaaa

SEQ ID NO: 2676 - DNA, 4805 bp, Toxoplasma gondii
  source 1..4805: mol_type = genomic DNA
agattgggctgttccaagtctcagcttctttctttaccatccgagtcgcgctttcgaaaagtctttctccaagtctcttttccccggatttcccgttttctggacagacttcttctgtccgtttcctccaagacgaaaagagaggagtgatctccctctccgccctgctcgctcttcctttgtggaccaaaagccgcgttcgttcagcgagtgaggctagaggcatgagctgaaaagcgattcgtccggccttctcggctttcgagtgatctctcttccaagttagatcgccagcgaggcaaacgaactcttcctccatgacgttttgtcattcctgccacgagaaaggagagttttcatgtcgtccgggaatcctcgagcatcttcagtagtcttcagtagtcgcttttcttcgttctgaacagagatcaagacttgccttattcctgccctttctttttctttacctcactgaaactcttcattgtttttctgccgcatttcttcttctcccccaaccgcagctggtctgcctgtgcagccctgtctccgttttacgttcggttttcctcctcagtgcctttcttcttctcccttccttctgagacttttcactggagttcttgttctcctcggtgcgctctgggcgagagacaaaagcgaagaacactgttcatctcgaccagtgtccagacggagaaggttgaccaggcaggaaaagcagcaccgttgagaagggcagaaagaggggagagaagaactcggacggtcgactggaggacagagtgaggagaaagaagagaaataaggaagacgcgcagactggcgtaacgcctgcttctgcggtctgcgcctcctcgacttctcagtttaagtttcgcattcttcgctcgcagcttgtggcgtgagaggcaggagagtgtagcgtgatgtttttggtgacatgagacggggagctggagcggatatcgaggaggagaaaggaaagagagaagagaagctgagagtaatccaagaaaggagagaccggacgcgctgagtgaggagcagagacaagcgcgaccgccagggtcaaccggaagagaaggcgacagaacggcgcaagaagagaggggaaggtggaaaggaaatcgtggaagcgagcgaagagaggtacggagttcgagtgtaggaaagctccggaaactcaccggacgccaggaaggcaagagttaatctgtgtggaactcggggcgcggtgacaggatgagataggcgaacggtaaaatttcttttgtcttgttttcagaaacgacacagaatgcgcgagtgctgggagcccacgagggtcgggaacctcgagagttaacggagaatggagacttttcgcgcgttccttgacggagagaatccgcgttttttatggaaaaagaagaggggaaatcgaggcaaaaactgcaggcgtttgagtctctcccgcgccccgtgacgcgcccgacaagcgatccgtgaaaagccgccagataaccgcgccgcgccgcagcgcctgtactacaccttgacaagacaagacgacggctacagctcgaaaagcagttcctcgcagagcagaacggcaggagcagaacggagagaagaagagaagagcgacagagaaaaggaaagagagaagaagaaagcgagaagagagaagaagaaaacgagaagagagaggagggtctccaggtgtctctctgttgcatttgtttcctgaggaaacggcagaatggcattagaggctctctttctctttttgtagatgagaggcattctgctccatcttgcttccttccttgtcacagcaattcgtgaataaacagaagagcaagaagaacaagtcgcatggtgtttctttcggaaaggcttcagagcctggggaactgaagagagaacgagagactccgacgacggagactgttttcttccactttcatcgctgttcacaagaaaaaagcgcttgaaatcgtgcgaattcaagagtaattgggggttcaaagacaaagaggagaccgctcgcggcgtctccctgtttgccagttgtgcctcatctacgccagcctcaaggtttcttcggcaacatccgaaactgctgaatctcaaaattcacttacaacgacgcttctcactcgctctcattgtccgagggaaatctctggatctctttttcatcgcgaggagtagccgtcagagggacaaggacgacgtctacacccatacgatgagcaggagtccgtatgcgcatctacaacggccagaaaaaagtacgacgtctctactctgagtgtcattctcgcgtctccgtcccccattacgtccatccctcactacgttttctggaactcttctcacggaaacgctcgacagttaggaagcgttcgcgaggcgaaaagatctcctcaattacagtaaacgtgtggcttggaaacggagacaccttgcagaattccttcgattggtgagagccaactggatgcatgtacagctgtttgcttgagtacaatgttcacagttgcacttccgaaaaaagagtatattttccacaaaaccagcgagacgccagttttccctcaagccgaacggcaggaaggagtctaccggccagggaatttcggagggaaaaagttaggttgtgtaaaagctgttcgacttgaatcaattaaaccttgtgtggtcatgttagagcgttgctttttcacgaacgttttgactctcggggagtaaagacgagagaagcagcttcatcaagaatatgcaatttgacttgtgtaggaaagggtgttcagcgacttctgcagatccgaaattcggcttctcaaacctaaaggagggaacgtggaactgcagcggagaaacgcacgagcgatgagccaaactaaactggaaatatcaaggaagtaccgaggagaacgaacggaagaacagagaagaggaacgctttccgtgtctttcgtgaaggtgggggaaagcggacaatccagttgattctttccaatctctcccggagtttttatctacagagagttctcgcgcgcgtcgtcgcacccgcgagactccaaagagaggcgctcgactcgacttgcttcctcatgaggcaggccgacctcgatttctgtgttctcgacaaacctgaaccagacctctatacaccgcagaagggaagaagagcatctatccaaagtccccccctcccttccaacaatcccatcccaagcgaaagacatctgtgatctagagaatacacgcgaaaaaagagcccagaccggtttgactcgtctttctgccggtcggcttctgcggtatagatacacacctaagcgagactgggagaaacgcattcaccaaagagagctcagggggcctaccctagctgtcgcatcgcttttttgctacaaggcggctgacctccgtcttcctgcagttttcctgcgtcttctcagagtcctcctttgacctgtgaaagagtctcgtttcgcgcgacctcgatcttccggtgtttctgtccacctgagcatccgcccgcgacaagagtgcacagagctcgctcctctcgaagtcgcgtcctctctctcaccaggtttttctgcattttgagagggtgaatgccctcgcgtggtggacgcctcttctccgacacagtctctctctggtgactttgttgtttcctttcgcaaaaaaggactcgcaactttgccgccgcagcgatgcgtccaagaaaaagcttggcagatgtgcgtcagcggggcctgagtgtgagcacactgaggaggtccgtcccccaagcaggcagcggagtagagagggggatttatctacgaatattctttttagtggactgctacgactgcagatatccacgcggaaacgtcaggaaggccgggatcgttctttccgcgggtctttcgcctggatttttgtctcgagaaacaccgccgcgcggtgccgcagcttttcgcggcagcacacctcaaaacagagagaaaagtgaagagaacgagcgagaacaaagtgaaatgcatccgccctccacgcctctctcggctgaacaattctcacccgcagaaatgtcactttcttaggagaaaggcagaactaccgacgtcgtgcgagattgctccaggtgtcttggctagcacacaggagcaagagacagaaagatcgctctcgcgagcgtccccgggagaggcgcagttctctgtcaacgagttccagttctcccagcgtacctggaagaaagtataaaaaagaaaccggagttcgttcatccttcgtactttctgttgtcaatccaggaacaacggaaaggaacatggcaggacgcgccttcactgtagattgtacacggaaaagcagctgatatagaagagccagggagaaaggatggaagaggagaaaaagaagaactgagaagaagtccgacggagagaatgcgcgaatagacgagaaagataaaaaacgtatcagtggggtccaggaatctctgaggaggtatggatcatctacatgtccttcttcctctagcatgcgtttttgacgatgagaaagtttgcaacaaaagcattccagcactcttcttctttccctgcttcttcttccttctttttctccgtttcttctgctacctcttctccccttcctctgtccactgcatgatctcctttctcttccttcagtctccgtctgccttctcttcttcggctctgcttccatttgtgccttctttgccctgaggacgcggcagtctccacagtctcctgctgcccgtcgcttcgttaaagacagagcgccga

SEQ ID NO: 2677 - DNA, 1749 bp, Toxoplasma gondii
  source 1..1749: mol_type = genomic DNA
caccgccactcacagtaaatgttcatagacatacagttatctttccctgtggagtctgagcttccgagccccttttttggggagacctcgccgtaattgttttcggtagagtcgcgtttccctgtaggtcttccacgttctcttctccttgtgcatttcgacaaaaggtattttcttcagacgcattaacttcttcttgtactttttcttatggaatttacgcatcttgaaatatcgtcgccggcacgtgctgatactgcggacaaaggcctcagcgacaggctgattcggcagcacggaaaaaacaccagggcaacggctcaagagaacgatgtgcgtcagcgatgggagagtgccttgatcttgcaaatgcaagccccgctcttcgcctttggagcggcagcttgtacaacagcgtgcacgtgacaaatctgctgacgccgctcggcctcggcaccgtacattcacatgacgtagatgtgctaacggaagagttactgccctttcaccagccgacatgggatctgacaggccagcctgtacagagtgctgacgccaaccttgcatcagcctttcagctcctctgatcgcgcaagggccagttccagctgggcgctgtgacagggaagtcacaccaccgctcctaaaactttgtgtggcgtgccaccgcctacacgggagaatacgaaattttgcaaggagcacatcggttctctccagacagctcggaagtggagcattcgcacgtggtgcgatgcctctgggcaacgagcataaggacgccatttctgcccctgcccaggtgggaactttacaaaaaactgccattctagcgacgtcactccggtcggtccctgaactcttccgcgaacttcacctgtttggatgcagctgcatgcgcacaccaggtcagcgccttcttttcagtctgaagctccgaaaaattactcctgcattggcaacgtcatcgatgaaaccttgtcgtgcacatctttgtggagcgttcctggggtgaagacgcgttacggaccggaggctacaccagtaacaactgaagtcgcttcagatcgaagtccacgaaatacacgggagaggtgacggaaggttgccgtcgaagagtttctgtcagaagcggatatcccgcaagacactgtcacgaaaagcgtacgctcgccacgctgaaaaaaaaatgtcgtggcggagacatcaggcagcacgaccggaaaatgatgcacatagatggagtagcacagagcacattgtgaagcaagtatgatgccctgaaaaacgaagtccttttctccattttccactggagggtcgctgcggtgacgtatttctctcttgacccgcatctgcagtggagaaaaatggcttcgttcttactctgcatgccctggctgatgtgtgcctctgggactgcatgcagcaatcaagaccctgaggtaggctcactggctactaggcttatcgtacgacttctgttcttgacgttcttcgaatgcctcacaagacgagccgtacaaaggcattcaaacgcgaataaaaccatgcttgcgcgcacactgctgtgcaaaagtcacctccggcaaaaataaaagactacagaggttcggagcctggtgtacatacagacggagccacagttcttcaagctccttgacacattatgttctgcacgttgtagtggcatcttctttcacctctctcacctagctgttgtttcgctccaagtgtttttctagacaa

SEQ ID NO: 2678 - DNA, 2332 bp, Toxoplasma gondii
  source 1..2332: mol_type = genomic DNA
gttgcgagacagagcgacacacagaagacgaaaaacagagagaaggacagcgaagcaggaaggaccagagcagaaggcgagcaacgccgcagtaagaaagagagaaaagccaaggtgcaaggaaaagcagaaaaaacgggagaaactcacagcttcaactcgagcggcgcctgcggctgcatagtcttgcttttttgtcggaggggacgaggaagaagaaggccctgcgtcctccgcaggccttgcagaggagccactgcggggcggagcctctgaggcaggtccaggcatcttctgtctgcaaggctttcgaacacagaaaactggaaaaaacgtagaagaaggaggtcgacgagaacagcgagggcgggaggcactttgcctgacagaagaggttgcacggaaaagagatgcagaatcgagaggggcaagagacgaggtagtcgcatctaacagctgctgagtcaacgcgggaggaagtcgcgaaaaagggaggcgagaaaggagactgagaggaaacaactgcacactcgtagagagcctcacatgcttctgactacgcggagttttttctgcagagcaagaggccaagatccacgttgctcgatgttaacgaaccatggcatctactcgtagccgtcactgaagacgcagatgtacctcagtacgtatgtgagtagataggtagttttggatggagctacgatggacagacgcatggagaaggacagacagaggaagccagcgagtctgggaggagaaaaggcgtgagtgggcggtagaggtcggagttcctcagcaaaggccgagtcgcaggcagtttcttcttcaagagcggagcaagaacctcgagttgttctcctcctcgaccagcggcttcggagattccgccgctctctgcttcggcgctgttgaactcagtttgaagaagcgagaaggcgtgatcgaagaagagagcattgttcttattggcaagtctgggcaaagcgtcaagaccgtcgcggtcatacaggcaatgagtacgcgttgtcgctaccccactctcttttgtcgacgagacctcactcagctagttattgagagagacactcacgcgcgctcaaactattggatttcaatatcttaccggtattcatgtttgcttggaagctgtagtcattaacaatgttgttggtgtagtataggcacatgatagacatttagcatctgtcacgaacatatgaggataaaaaaaggcaactttaagcgccccgaaataaatagatcggattcttgttgacctggcacctgtttagtaactggatgaacgctttttacgcctggtatgtagggatactactcggcgagacaccaaaaacatcgtttcgtttctcacgccctccgcgcgcatgcaggagagaaaaagctttcgacgaagaagagcttctcccccacaaggatctccaggggaaaagggagagaagaaaaagctcaagacctcctcaggaaggacgacttcgcgcttttcgtccagaaattgtcgttttcatctccggggaaaaacaagaaacgcgtttccagctgcgaccctcggccacacgccctgcctgacggccgcccctgctttgactgctcgtcgacttgccgtttctcgcgagtgttttctccccggctctctctcgactttttttcgaacgtcttttctgctcgaagaacttccacaaacgagccgccggctgttctcttctccgctgcgtgcgtgggcggtcgaagctgagcaaggcagtcgccagatttcgcgaaggagttcaacgaaaccggggaagaacgagagcgagaggaagaagcaaggcaagcggcaagtgccgggggtgagccgccctcctcttgccacggttctgggagtctgcagagagcgcaggcgtccctactggggaaaaatcggatttcagcgccgcatgtcgaaacaggtatcttttcggtagaactcgcgagggtctgaaaggtgaagaggaatgtttctgacgacctctcctcattgtctcctcccagcgggatcttcttcatcttctcacagagcgtatgtctgccatgccgagacgcttctctccggttcttcaatggccgtgactcgctcgtccttccccgagacatcagccctgccctcaagtctcttcttcttgtcgaaactcgagtttctttctcggaatccggcgtcgagcagacactacgcgcggctcttctctccgcagagctcgctggccctctggagctctcgaccttcttcggggaaatcccggcaccggaccgttctcgaagtcgcctcttcagtctgaaccgaggtctctcagca

SEQ ID NO: 2679 - DNA, 3238 bp, Toxoplasma gondii
  source 1..3238: mol_type = genomic DNA
gttgcctttttagggcttgactggatcaaagagaagagatgtgtgcctgttgtacctaccgttttttctattcggagagtgccttctacggggcttagcgcgcctgcgttttctctttccgcgacctctgcgcttaacgtttccccggttctgggggcgacggcgacgaccacctacgaaattcaagcagcagtgcggggggtactttgaacaagaaattaatgcagttttccagaccccaagccgaccgcgtggagcaaaacttgggcggggtctcagtcgatggaaagagtttgaatatttggttggaaatgggtttacgttctcgccttgtcatacttggagacttgagcagacaaaccactttgaagacatggtgatacatgaatacagaactaagcaggcttctggttcatataatttcgttattctttgatctgcttctgtgcagtttctggaaggcaggcaagtgtagagtcgcttccaaaatgttgactaccacacgatgttgttggtcgtcaaaatgccacacgataaggaaggatcatgatgtagttgtgatttcatgagagggcgcagcaaacagaaaatcacgattccggatacgcggcagcggacgcttcctcacactacaaagttcattgtcatgttcaagattgatgcttgccgcaagcttttggtggctcccactgacacgacgaacctatctgaaaggagtatggaagttagaaatctcaccaagtgtcgtctggacgaaagagccaggaaatttggcgtccaagagagccaacccactccacgtatgaagcgttgttgactgttgttgtgtcgaaggggcccgtggtctttttgaagcggtctgagcattctcgggagtgaatgcgccgcgtatcccggctagaggttgctggttaatttcggccgactgtggtgcctgcattgcaaccgagatgtgaaggtgcgctttcacgacggcgaggaaaagcaggaaacaagctgtaccggtcagacgaaggtaggcagaccgcccctgtacggaggccgcctgccccggcggcttgttcctcctcattccgcgtgcatgtgtgacaggaaacaaaccccttttgagggaatcctggaagttttggtcatttacatacttcgagccgtggctgcatgcggcgtggcagacacggctgccggcatgtcacaacctgccttgcattcgcttccatgtgccagaaatatggacatagacaaacttcagtacgcatgagtggaatgggatgtcatcagtcaaaactgttaatacgcagtttgcccattttcaaacgggtccgccacccggcgcagatcttggctcgagccagcccgcggatgtcttcggatcccggtggcaagacaaccagtgaagaaacaccaccgaaaatcgagagaacgaaaaacactgctatgtggataaccgaaacgacgagtgcccaccctcatttagtttccaattatcatcataacgtggacttttgagcgcgaggtatcctaccagcggatcacaattgacttggcgcggacgagcgagaagtgcaacgtcccgtgccaatgcacccggccccctcaaaaaggcgcgagcgcgtcgtctccggtacgggccctaaaagtttgccataagagacgctgcaaagaaatacgatctcttgacgaactccccacgtgtccacttcaaattatgattgtaatgtgcttcgttaacgggcagatttcggcactgacagtagtagcatcgatgctggatcttcggtcgaaagtacaccactctttttaccaaaggagttctcgattcctccagtgtagataaaggaaagcgtggcgatgaccacgattgtccggtagcagccaagctggtggcgccctgtgttggttgtttctttggcgtttatgcgtcatttgttttcgcagccagatgattccttccatttcacacagagttagtcttagggcggtcttttccagaggaaggtgcgctccgtcaccgcgttaccgtgtagactgacaagccaacaaaagcaccgtgagcaaatgtgtgagccatctcatccttctgatcaagacacctcttcatgatctttccaagcgtgaggtgatgccccagcaatcagcatcatgagttacctcgcctatgtgccaccaggttcgtgctgccgcctggaaacagcaccagtaattcgatggtgaaggtcgctgctgcagacgtgtttaaacagcgtgaggtgaagctgctgtacactgcagtgaaaatgctccttgaacaacaaaagcgcatgtggaccgaatccaaagtgtgttgtcggcgagctggttcgtccgttacccaacaccagccgcctggcacattttactgtcaaaaaatggcaaacccaggcggcgaagagcttcgtatgacttcacggctgaagagttgttgttctctgctctccttcctcttgccgaagcaacgttatgcacaagcgagctcaacgatatcccgcttattaggaacatttcacaatcaagctagcgtacgaataagccctttttatcagcattgagactgcctgtgcgttgtgcagaggtatccatggtcacgcactttctgcttgattcttcgtggatgcgaaggaacgagaatgcgacgaaagcacgtccgtagaaataactatgttcactggtgactgcgcaacacaaaagcaatctgtagaactgttccatttgtctgttggtcggctggctgctacattggagttcctgtgtcgcttccagaacggcccgtagcctctacatcagccgtgactcccttcctagcggagacgcgggcgttctgggaaacccaaagttcctcgataactgtcgttaccaccatgccgacagcttcgttcacgcatctccgtccaccatgaaatggacgcttctggcgtggggcttgactgcatgcactcatcaaacgttcgggctgcgacgcatctctctgttcgcatgttttgttgtcaccgactcggctgtgatagcttgcccagtcttcgaaatacacacaggcaagccaatggagctcatttcccattgtttgggttgttcgtgaggaaaagacccttgacaccacgacatccacacacgcagtctcacccaaatacctgtcataagctgtgaaagcgagctatgctcagtcgtgtttttcggtaaggctacgacagggtcaaggacaccgctgtcaatgctgtggaacgaa

SEQ ID NO: 2680 - DNA, 3225 bp, Toxoplasma gondii
  source 1..3225: mol_type = genomic DNA
gtcatgtatgcgtcgcgactcggcaccggagagaagacaaaaaggaggcaaacggcttcacgcgagggtgtcgagcacgaaaatgcacaagagttggggagaacgcgtgacgaggagactgaccgcagttctgtcttcttgctgccaccgccgcagtcgacagacgagcctcttccggtctgggttcaggcgtctcggtacgcagcgtttctgcccatcacaacgagcacaaactttcctcgtttcgaggggacggaatgcagaggaaattcggacagagaggaagcagagagtgtggaaaacagtggagagtacagccagagacgctcgacagttggtggcgctctccatctgtgggtggggggcgctctcgtcaccaagggggatctcagagctcataacggcgtggttcacatgatcgacaagccactgattcctgtgcagctattagcgtccccgagatagaacggttacacacaacgcatcatggtatagccagatgtagtcgagaaagcagggttgaactgtttgagacgtgtctgcgcccaaggcgaacaagagcactggactggatagaacccaggcaactgttagacgtcagtgcgtgtcgtgccagtggcagagaggagacctctaaattctttgctcgcaggagtttcttgaaagttctgcacatttcgcgggagaaaaccacgcgttcgatgcatgcgatcaataatgctgttgcggctttcggtggcaaccggtaaaaggcacacactaagaaacgcaatatagaaggcgttacaaagtcatgtttgcgtcgggatcccctcatccaacgccagacgcggtactgtttctcgcacagttgggagagctccacttttccgcgagtctggtaaaaaggcgcaagactctaaacgcagttgaaaagaaagagagatgtgtaagcggcttttgttcttgggtggaggaaatatgccaagaaaagaaacaactttgtatgctgacgaaacagaaaacgacgtcatcagatcgtacagtctgatcgatatttgcagttttgaaaggcgaagcggtgggagatcccacttactaatcatatgcacgtgcagtgaaggcgccctaattttttatcggtgtgcccgaaacagaaattccttgaattccggttccgtagttgccactcgaacgtttcgacctacttcagaaacgtcttctgcatttgctaggagaccgcgttatttggtcggaaaacgattttggagcgacgcatatagactggtaccgagaaggtaccatatcctccgtaagaagccgtcattaagaacaggaacaccacagttagaccatgtgtggtaattcccacatttcacataggtagtgattctatagaattaatacgtttctcaaatattcgatggataccacaacaatttgcttgctctagacatgatggtcatctgccttgcgatcgttgctgagagctacggcctacccctcacggttttcacgttcagaagaaagcaaaagaagttagcgcaacagtctctttcggcctggttctattttttatgattgcaaggcccccgctaacgtcaaaggcaaaactgccccagtcgaggttcaggtgcggcttaagatgctacagctccaataagctgaaccgaatcgttccaattcactctggggttttgagacagccacgagttcagatcctaccttccgaagaaagcagcgaggtgagctcaacttcacgcaagagtctgaagggaatctgtgttttacatccgcatgtttctttgcattttcaccgtctcgcgtgtcactttcacacttgcgcgtcaaaacgcggtgctagcaacttgccacaccccactgtcagctcggctgttcccaggtgaaactgggcacgtcgcctgccgcgctcgggtgcccgcaactcgtccattcgcgaatgtctcttttctcgagaagaaaatcgggagaaggcaaccagagtctcggagcgctgcatttgaagtgggaaacaacgtggagtgcaatttgtgtctgttcttgctctggagttcagtttaaagtgcctatggctggcagcgccgccgctgcgaaatcctctggcttgtaccggcagatggccggtaacagcctgactttctagggtagaaaataccgaaaatcgcagaatttggaagtgtgacgattctaaagattctcagaagttgttagttcctggcaccgcgcccgagtgctgcacattttactcctcgttggctggcggcctctcctcccatgtaaccgctcgacacctttgtcttcttgtggcgcgtcacgttcctgaacaagacacgcaccaagcaaaagtatcgacaggcatatctatagagtcaggtgggcaaattttccggggaagttctgtcatggtcctgcttcaaaagggagcgcgcgttcttcaacaattcgcacacgccggtctgccgaccgtctgttgaccctggaatgaatctgttgcaagtggtccgtctggcggttggccctgatgcggacgggggtttccacagcaaatgcattacaactgtcgcattttttcaagtcaggaaccctttctggtggggtggtttgcacacgtattttccatgcggcagaaaaagccgtgttgcgcgccgtttgcccaacccgccgtaagaagaaaacggattctcagcacgtcagccctcatacgttggagaacggcaaggtcacaagattaataactttgcagaggttcagctgaggtccagctgagaggaaatgcgtctgtaagggttggcagaggatttgggtcgtctaacaggcggtgaaaatcgattcggagccacgcggtaaaaagagccacgcgtactcttacgacggcaaaaagtatcgaacccgtgatagcggtgcggtggggttcgagagccatgatcttcgcgaatcgtttttgtggcgaaagatgtcgggaaatcctggacgctttgtctcttaccatgaagcagttgcttcagcgcagttacttgtgcaagaataggcagttgccaagctttacctgtcagtagtcgtagaaggaagcgttccggaaggacgttgacgtgaagaaccttttcggcgccctgcacatgtgcagagtcgccgacgcacttctttgaagagagagtgtggcgtgacagggagaatccatcaagccattgctggtacccttctgtgtcgtttctctcgtttgtacaa

SEQ ID NO: 2681 - DNA, 2004 bp, Toxoplasma gondii
  source 1..2004: mol_type = genomic DNA
acatgcggattagtggaggtacgcatgtgtgttatgtcatgccacatttatgtttgtatgtatgtatctatgtatgtatgtatgtttatgtttgtatgtatgtatctatgtatgtatgtatgttgatgtacgtaggcatgcctgtttgtatgtatgtatgtatgtatgcatgttgatgtacgtaggcatgcctgttcctgtttgtatgtatgtatgtatgcatgcatgttgatgtacgtaggcatgcctgtttgtatgtatgtatgtatgttgatgtacgtaggcatgcctgtttgtatgtatgtatgttgatgtacgtaggcatgcctgtttgtatgtatgcacgtatgtatgtatgtatgcatgcatgttgatgtacgtaggcatgcctgtatgtatgtatgtatgtaagttgaagtacgtaggcatgcctgtttgtatgtatgtatgtaagttgaagtacgtaggcatgcctgtttgtatgtatgtatgtaagttgatgtacgtaggcatgcctgtttgtatgtatgcatgttgatgtacgtaggcatgcctgtttgtatgtatgtatgttgatgtacgtatgcatgcctgtttgtatgtatgtatgttgaagtacgtaggcatgcctgtttgtatgtatgtatgttgatgtacgtaggcatgcctgtttgtatgtatgtatgtatgttgaagtacgcaggcatgcgtgttttgtgtgggaaagaggaaaggtgaagaagcgtagtggacctacactgtaacagtcggaggagcagtaaagcgtgtggcacttcgggcatgtgtacttggaggcggctcggtggcacctgaaaaggcgagactcacaagcaaagaggtccacaaaaaacgcgccaaacgcgagagacctccgcgccgggaaagacaacggagaggtgtctgtggctgatcaacaaatcgccctttgctattgtttccatcgcacagaaagtgcaggcttggccgaacgagtgactctcagccatctctgctaataaggagctacaaaacgaaaccccagcgcctctctctgaaatgtctgaggtagaaaactcgagacaaaagaaaccaggagtttgctcacagggccacaagcgcgacttcacacgagaaacttacacttggcaggtggcaccgctgctccttgcggatgcggctgagatgccgatagaaagttcgtcgtccatggccttttattatccgaaccttagaatccactatttggtctccacggcagaagagaaacacggacggatgctgaagagatccacacgacgcagacgagcgccagtggacaatctttgaggcagacaccgctgagttgctggcgcaattcaagggaaactaacgagaagatggttactgcaaaaaacgcactttttggacaactgctcagaccgcggaaataaaaccttttgccaagaagttttggagcctccaaattttgagaagtatctttggaccagaaccggcaacatgcagtctcaaccaagcacaccaaacatttgttccctccagtcgtctctgggtgacagaactcccgcaagtggtggcaaatgggcagcgccgctgctcaagagaccgctgtctgtaggaaacagacattgttttcgcaactggaatttgttaatggcttgacgcttctctgtgctttgacagcgtgcatgtccagtcggcactggtcgatacacagctggtttctcgaccctgcaattccgagtttcgccgccttcttgacatgctagacacaatgttgatggagaagaaggcgactttttctcgaaacttgagctcgaaggatctccgcaatgttttatcttccatcgctgcactcgctttcaactggactccaccgctgttctccgagtcacacgaaagtccaccttttctcgagttgagccggcttttcgcattccggcagcgctcgtcgatgcagcggcgaaaaagccgttgagagttcgtggttttggtttgaggatgtca

SEQ ID NO: 2682 - DNA, 1888 bp, Toxoplasma gondii
  source 1..1888: mol_type = genomic DNA
aggatactgacgataagaaatgactacataagagatgcagtgcatgttttgctatgaggcgtcagctggttcgaggttgctggctaacccttcagcggtcgggagcgagacggcttcagtcacaaggggtttctgctgtggactcatagttcagataattacggtggcagttgcatgagttaatcgaaggcaagctggctcggacggcaatgactaacgcatcatgccttctgggtgaggcgaacatctgaaacagtgaccgaacatcacgcaagcaccccccttagtacctggtggtgggaattgcacacaaaataccggcagaatgtgcagcaacaagagcttgtcccggtcctaatgaagtttgcttttgtgtgtgaatgtcagcgtttgttagcatattttccaccaatgggttttgagagcatacgcgccacggaagacgtctatgtgtgagctagtttgcgaacaatagtgttgcaagcctcacaagaacgcattgagcaaccctgccacaaacgaaacgactccgtacgtccttggaggagcgaaaaccacgggatctctgctgaaggttgccgttattgaggtttcaaccccatgtttcctctcaggatggagcatgcagtttgcttatttgaggagccagtgactgataacctgactgaaaccaggcccccgacacttgtcactggagttttcgcgtgttcttccaacaaacgactgcccatattcgcaagtagaggaacaacgttcaggcccacaacgggaagaatttgccacatcccaaacggcacctgtatcgacacgaaacttctcaacgcaggactattcctttgtttccgtttttctggagggcgaagcccgctatgcctgtccttttagaatcttgcacgtaatcccatgttttttgagggaactggttctagatagttcttagcagcagagaattttggtcaccgaagaaacaatttaccatctaagagggtcccgaggctgcatcaacatcgggcttccgtagagaggctggcaacgtgatacaactgttctaaattggttgtctctacagaactataacccgcaatgaaagaaggaataaccactttagtgttttctgtattctcttcaaatctctgttcgtctgatccgacaaccgttggccccgcctctgccttgcgaggggccctcagtgtcctgcatgcaacccgcagcctcaatgctgattggtaatttttgagcgacactcacgcggatcgatgaaatgctgaacatcgatttctcatctctagcattcaacgacgcattcactcaccctgcacgcaatggcatacggccgctgcgccgcataccctgttcaagtatacgcactgttgcttttcgggaaattccgaaagtgggacggcctgggtgtgcaacggcgtaacctaaaagtcgatttttggcagtgaaaggacttaagaatgcattaagtcgcttgcaccaagatgatcatcgccaagctcatatataattctgctagcgcgcaacagacgctagtcctacgtccatcatctcatttcttcttgtgcttagtaaatgctgctgttctcttacacaactgaaacaactgacacacccgcaccgtttcagatgaagtcagcacttccggacgctgtccatagagtaatcaaagagcttgagtgccggcagtcctgatcgtcacgaagaacgttcggttttctgtcagggaccgcatgtataatcttcttcaggtgtgttcttatgcatgcaaccttcccgactgtacattatgcagggtcattctcttgtgatacacaagaaagatcctgaaccacaaattgtacaaagttcttcgttctcgtgatgcactgctcgggggttgggggca

SEQ ID NO: 2683 - DNA, 1991 bp, Toxoplasma gondii
  source 1..1991: mol_type = genomic DNA
gtgggcacagagttttatttcggattggtacgcgaatcgcagatagtggaccataagcatatgggggaagaaaatcatggagtcaaaatgaatatatcaagggaagtttgccacttgaatggtatgtgatgactctgtcacataaatctggttcataaagacactgctagtttccttgtcaatgcataaggatggcacttcgtaaaatggttcagagactaacgtgaagcttttcatatcaggcaaaaggctttcgtgcagcttggcggaaggtcactcagctatgaatcgtttctaacgcagtaaagaacaaatccccttttgggcgccgattttccatggcgcgctactggccacaaggttgccggctgtgtgtcacatatagactcctgggtagaccacacacgtggcaacatagttgtttgccagatttcagttgcctttcctcttttatggtagtacggagggatgatgccttgctatttgtttccaggggcaggtccgcctcttcaccttgaatcatcgggtgatctatttggggaccctatatgtaaacacgcgtttggactatttcattcttctcggaaaacgccgctggcgccctaaggctgcgccatagaacagagaaggtcactttgaggaactctcgggagctgatgctcccggactgtccactgtacgtagcagcaaagctaccccttcagaggcgcagatggcatgtgtgccaacagcatcttcgatgtcagaacctgcccgaaaatggcatcgaacgtagcactgttgttaggagagctctctcccccagggcacctgcagctagcggcgaacgggcgaaaagactactaagtgacttcctctgcagcgacagctgcaacgaattactgcagtatgcctctctcctaccctttcgaagtaagatgtttgcaatcccatggcaaaaacggtcacttgaggctggatgctatcgtcctggtatcggaacgaaatgtgcattacctcggagggcacggcggtgcttgttggagggactgctgcacctttgatggaatgctccacctgccttgggttcctctgttagctctaatggtaattttctaggcacgactaacaatgaatttgatgaatgcattcattagtcaagcaggaaaatggagggcaagactgaaagcactgaacatctgtcgatcgtgctgccgcaggcgtctgcatgggcttctctggtagagcggaaacaagtggcgtgtacctacctaccgcaggaggaagcttagtgtgccgacgataagtgtgtcaatggatctcttgcacaaaaacgattcgctcatccaacgtggccgcgatgcaagtggctcgaagcgccaaatgaggcacggtgggtcgaggcggacggcatttctggtgcacaccgtcgtcgtacatgcagcgggactctcgtaagggcacgcaactacaggtgcctttaaaaacgtagcatcagcatgagaattatcgccaattataattgtcatcaagtgaagttcctgtttgaacggcttccatctttttaatcatgtttttgaaagaccgtagttccgacaacctttgaggtgtgctgggtcggatcagcacatgcggtctaaccgtgcgaacagtcgtgatgccctttgtagtctcgtcttgttcccctcaccttttctctcgtgttgctggctgtctctgcttgcgcgccccggccacgtgtcaaatgaaacagaaatgtttttcgttgggtgaacgcaaacagttcttctgcattaacagtgcgtagtcgtccgagtgcttcagtggtgtcttttcctgaaaaggtgccgcagtaccgggaccacatgaaactttctacaggcggttcctgcaggagctacgcttcgtactggctttccgtgtcgctggcatcccttcgacagtggtagcggaacttgcaagttacggagtaaatccacaaaggaatcaagttgaatgcgcaggcaagtgaa

SEQ ID NO: 2684 - DNA, 2077 bp, Toxoplasma gondii
  source 1..2077: mol_type = genomic DNA
gagttcctgtcccaggtgcccgaggcaggaactcgatactctgtgaagaaagagggtggcgaaacttctcgactgcgaaaatctcccgttgtcgaggtggaaagtgaagacggctctgcgcgcaggccgtcgatctgtggagcctttggccatgtgtggtttgactgcgagatggcgaaacgctttctgtgaaagttgagggaagacactcgaaacagtgtggaaactccccgcgttgcctggtgtgggcagctcggttgccaacgcgcgacagcctacctgagctccactctacgaaggcgcctcctgactggacgcacggtaaaacagcgtacctttcgtggctggagttggcgactgaaagaaaccgcaaaacaagagacctgcaacggtctcggaaacaaagctcactttgtaaatctgggaagagacccatcgcgaagagcgacggtgggtctgcgcgatgcaaaacgtgcaaacgcctttagccgtggaaagagtgtggaagagcacttgctttcgtccttcggctagacgagaaaatactcgcagaagaactgtacaaataagatatgctgtctcgacctcctctactcggtcaaagctggtatggaacgcacggcttagcagcgagagaaaaagagtccgcagaggcggggagggcaagcgccgccgtccggagagtcaattctcggagacgcgctcctgttttcttcctgttcgacgctgcggttggcggttgacctcgctcgagagggatgccttccgagttagttggctgcatcgatgaggcgtgcctaggccaccgacgcagaaacgacccagtttaaagggcacaactccgtacagtcgactcaagaaatgtcacgcaacatgctggaaaagcggggacttgttacactgacttcttataaggaattgcctcccagaagcccacactgagattccacagacttcgacctgcgcagtcatcgaacgaggaactcacgtcttttccacggaacaaagactccagcagtcgtctttgtctccctgaccgacaccgccgctctcctctgctttcgcgtccttctacgtcttcgttctctctcacacacacggaggaaaggtcaaaaaaaaaaagtgaaagagagctgacgggcacccttcttcctccgttactcttctctctgttcttccctcacacacatacacacatatatatatatatatatatatatatttgtttcaccagttgagacgtcagctgcttttttaaattggaaaagcctgttgggtggcgagtgtcgcgctcagctaactttttcgcagtgagaagacaacgatcgtcaggaaaacagcatttgcatgcgacgtcggaggaccgttcgcggtgtctctccaccggagaaacgtcgagaaactcaaccgaaattctttccccccactctgcaaaataaagagaaatgtcgatttccttcaattccctttcttctccttctgtctctaaaaaggcgaaaaactcttcctgtaacgagaacaagcactgacgacaccgagcttcttattggtatctcttgggccttgtttctccgctcttcccaagttctcctttgctctaactttttcgtctttctcctttctgcgcgccgcgaatgtcaagtctcaccttcttgctgtctttttctcatccttcttcctctctcttccgtatcctcttctgtcctctgtaacttttttgtgaagtaaacgtcggtgtccttccttctgtgtctttacgcgacgagaagaagagactcctcagcacaggttgacgctcgcctcccctctcttctcccttttcttcgtgagaggagagacatttcttagacttttcttagacatttctgccggtcttttcacactctctctcgaagtctccgcctttctcaaacggcaaagtctcgactggcgggagagaagaacgggggaagagagtcttagggcctccccccgtttcctttctacgagacgaagatatccttttcgtctcattcttgtcttcatcccctcctcttcctcctcttgttctcttctttgtctcttctcctctgcgcca

SEQ ID NO: 2685 - DNA, 1938 bp, Toxoplasma gondii
  source 1..1938: mol_type = genomic DNA
tatttggtatcttggctacttgcaggatgttatctctcttttgccacactgagacaaatcgttgcattatatatttacttgcctttcagaggttgtattacagttgttttacataccatctacttccatccacacggtgtggattcctgagtccaatgcaacccctcagaccctgccctgtgtcacaaagggcttcagcagcaaaaccttgtacactctgttcagcgtcaccagatcacaccacgcaccggcatggcaattgacaggcaagcaagtgaggttgtagttctttgagatgctcacgacgaaatccgttgactccctcaacacagtttcttcaatcagcacaccgtaaccgccggagacaaacgacggctgtgaccttcattcattcaatgctagaagcagcctgcacgaccacatttactggagcccctctagcgacgaagaatcactgatgcgagctggcacactttcggcccataatggtattttcatctccacggaggacgaaggacggttcgaaaacggagccattctcctggcgtcggataccggtagccactcgttaacagcaataggaataggaggcagaatcacacaaaacggacgtatatctcctgcagtggaactcagccgcgatgcctattcaagtggcttaagccccccggaaagtcgttcattgaaaccgcacttgaaacgatttaagttaggcctcgttactacccctcatgaagagatatatcaaccggatctcggtagaagtcgtaccgaacatccgcgcttacttcagtactagggaaacgtgcttgctgacgcactcccccgttgacctgcccgggtcatccgaacttcacacaatcatgtactgctttaggctaccaggaccggtactgccagactagcgccgaagatagaagtcgcgaaacactgtcagctcgttaacactgccgacctcggccagccggtaaaagtccagacagactttctttcgaatcttgccgtgcgatcagtgattcccatactgtgagtagcttgtaggagcttcggaagcaacaacggttagctcgtgtgcagcggcatcgtgacagtgctaacagatacttgttcgtgatccaagcaagaaatagcgtctgatacacccgctgaagacttgaaggatgacaagcggtcctttcaaacgtgaaacttcccatgtgtgcggttcccaacagccccattccctctgaacttacgaacagtcgaggttctgaccgtccgaaatggaactcatgagcaattcgctgagcagatggttcaccagatcatcttggcaaaagtatagaacccagatgcgactgcatagacatcaaccgactccattattctctcttcacaggtacagagaagccctacgaaacacacacagaatcttggctacggcgcgcacaggcagtatcactcctgcaccctatagagcctccgcggatggcagaatactgtattcagacatgaagtttgacagacaaggacaaaaggggggaactacaaggccgcgaagcgacggacgcaaaattcttgatcgaacctagacggcactttttccttttgggttttagctagctacgccgcctcatcccactgaatgccgccatactgcatgcgcatgccgtggttcgctgccggtatgttgtttgcacaaaataaccagttcccttgctactacttcctcgtaaaatccctgtcttgccacaggatcacgtttttcgcgttaagtgacagcattctgacttctttccggttctttgtggcacgtagcggccgcattcaccgtctggcgggcggtgtttgtcctcggggtcgccctcgagctttcgggttttctttttgcgagagttttcgtggcatgctctttagggcaaaccggcagtcctgaaattctttcgcccaaggcaacaa

SEQ ID NO: 2686 - DNA, 1481 bp, Toxoplasma gondii
  source 1..1481: mol_type = genomic DNA
ctcccatacatgcaaatcatgcgagcagacttgattatgcagctgtacagccgtcagatgtgactcaaaatgggtggtaaacatctcctctgacaacacccttgtggcgtacgaatcctcataccttcactacctatacttatacacatatatatatagatagatagatatagatagatagatatagatagatagatatagatagatagatatagatacatatatgtacatttatatgtgtatgtatgcatgtatgtacaggcatataggtaactagaactagatgtatatatatatatatgtatatatatatatatatatatatatcatgcgtatcccgtttccgtgctcgtacgtatatctgtttaacgtttacggtgttcctacgggcaacgagaggaagcgtgagtgcggagtctcgagagggtgtatttagagacggaaagcaatgttgacacggaggaaagcagatgaacgtttgtgtgaaagtttccacttcggcaagagcggtgagtttcgaaggcatggacgacgtcgacagtttcttccaattcagcctgtttttgttttcagcgagtctcccctcagcaaacagccgaggcaactgcgcgttccttttagcggcgacacccgagatgcattcttcctttctttgttggagggagactgttccgccatgctgtcggtaacgcgctctgtctccgtcgcaaacataccacccccctgaccaccctggatgcatgcccgattctgtctgggagggtcagatgcacgcgcgtatcttgtcttttctcagaggacctcgtcgctgtcgcgtccgagttttcttttcgtcgacagacacgattcagtctctctgtttcggagtcccggctgtcaagcaggcgctcggcagagtgtgtgtgcaggacagggacgcgaaaaaaaaagacagaagaagggaggagaaacacagaagaaccgcgcagaaccgctcgcgaaaaagcgaaggaaaaagagaagcggtggagaggcggaggagtcttctggctgaggcgcatatgtcttgtcttttatctgattctttaaaacgtctctgtgcaccgacaccggacacagtgcgggtcgccggtggcgaggaacgcccagagacgagcacggtgatactttttgtggctcgacagtccggaaaagagaaaaaatttgccagaagcgaggagactgacagtgtctttcttgctctttctttctgagaagctttttctccgacttcgtcgcgagtatgtcgccgccttcgcagctcgacagctggtccggtctgctgtgaggtctgcgaatccgctgcaagcaggcgtcttctctagccctttccttttcatgaagcaggtggatgtacacagacgctcggtctctctgtcgtcggagtccaaatcgttcaaaatctctcccctgaagtctccgtgcagggcgtctttttcttcgctctctcccagcgtacacca

SEQ ID NO: 2687 - DNA, 5057 bp, Toxoplasma gondii
  source 1..5057: mol_type = genomic DNA
atgccatcttgcagtatgcctatatgtatatacacacatgtaagtatgtgcgtatgtccacatctatatttttcgtttccgtacggtgagtgaactacacataagtatgcaaaggcatatagcagtaaaaagagagacagcacaacttcacaaaacaggcatcgcaggtgtctccatctcactcttcagaggttaacacattcgcacaggacgtagaagcacgcgtgccgccttcatacacaaacactgaggagatctccggcattccaaactcgctgatttggcagatgtgtgtgcacaccccttgcttacctaatttaccggctctgattttatctatatatctttttgtgtgcgcgcggttgtatcgtttatgtgcgctagagaccaatcgctctcatgagccaaaagaagcatattgataaatatgtacgaacgcgtacgcatgatgcatatgtgcatatctctcaaaggcatgcacctgcctttcttcgtacggtggctgaaaaacgaatccgtacgacgtaacatggccacgcgtccgtaacaacagaacgactcgctggatgtcttctgaagaagtttctcctctagcggaatgtgtgccagtcttccacaacacgtatagcagcgcatttggaaatatatatttggcagttccttacggttgcgacaaggactccaatagcatgcgtttgaaaatacgctgcggctttctgctgacgtttcttgtccgcctgtcccgccattgttccgtcgctcttgagtatctctccacctgaagatgttcctccctttgcgtgaacacagaaataagatccaggtgaaacgggtcttttgaggtaggaagcaacatgcaactgaggtagggacgatggatggtagctctcgaacggaggaaagaggtggacgccggacagtttggacaagtttcggctcttcaaacggaaaagagtcgtcaaaatgcggtccgatctccttctgcttcaagacggaaagaaaatgaatgttccgttggttttgtacaacagaaatggagatgcagcggggggcatgcatgggacagagccaagagcaagacgcgacggaggtagctgtccgaatgttgcactgaaagcagacgtaaacccacctgtcgacttcttcttgcggtaaggaactccaaatccaacacccactttggtggtcgattttgttaaaataaacgaaacagaaagttccagagaaaaccggacgattttacgcgaatgcccaagcgcagcattcgggtgtctacaatcctgggagaagcgttccgacccccagcaaatcgattcttcacatggaaaggattttcagcccgaaccgtggagctggcgttgagacccaagttagaatcaaagggacaacggaaatcagctctcaccacaacggaaaagggaagcaagggtcgctcgacttgatttgattcagaacacgagatacgaatgagaagagagttggatgtcgacatgtcctgtttagcaaggtgtgttaccgttgtgcgtctagctcgcaattcggtatttgtcgcttgtcccaaaaaactgggtcatctgttttttgctctccagaatagccttcatttaggaagggacgtcacataaggccttgcctcttcgcatcccacctgagctctttctgtgccctttggctattagatctcgcactggtttcatgctccagggcgacgcgactccgagttcagggatggtggatctcgttttgctttccgtctgaggcctctcgcggtaaaagattccagaatatctcagtcgaggaacttaagcgacgcaagtaaacgagaaggaaaacaagtgggggatgggcgctgagaccttgtgtacgcttgtttttgctgttcccatactggacgacgaacggtgcagtggagtcaaaacagcgacagagagaatgacacgccgtcggcgttgttgtgggaaaatacagaccgacggtttagtcgagcgctatgtggagcactgctctttctctgctcagcgacttccacttgcacgagatcctcagcacggcttcacttgaccagaagaccctttcctcctgtccactatttcagctgtcgcgtcttagtcattcaagcaacccactttctttcctgtgcaacttgtggaggtacgcataaaccttttttctttcagtcctccttttgctctttgcttgttgaaagtagcagtttcctccttctgtcgttgtgttcggttcacaatccaggaagaccttgatgcacggcaaagtgtcctgtgccagtcaaagttggttgtcaggtttcgtcctcaaagtgtcaggaatatctgctttgctctactgattctcagtggaaacggcggctctctcgtttcagcagaacggtgttgccgactgtttcacctgcggtgatatctaggctggctacacgacaagaatattaaacccaacttcaggtgctggtcttctcttattgtgtgcatgatgcgggatgaggcagaatgcttggcagctgcaacggtgtccacatctgtagatgctcagaagaaaagtccctgagtttagcgatacgagtggaaaattgcttgcatgtgcatgtagtagtatgctgtcaaggcgctctcctgcttgcatttactcggcacatgtggacttggcacactccgtcactgcatgcgtcgttatatatatatatatatatatatatatatacatttatatgtagacgtatgcgtaagctttctttcgtatagtgaaacgtttaaaaaatcttttgtaggtcgtggaagtaattgcacgtgtttttacgtcgacatgaaagtgcacatacattcttatgttaactagagtcaccgtcagtatgccattaaagcgaacagcgtttccgcctacgggtgtctgtttcgcagctttcactggcttccaatcgtgtgcttgttgggtttccgtcagtgctttcgtcattcttacgtagcattctgtatttcttcctgcatttcgcttttctgtcgcgaacaatgtgtatctaaacctgttctgatgtatcgccatcactagaggtctccttcaggtgccacatatagaaaggtatagataacggggggaaaaggcaccaggtaacgtacgacagaaaatgtgggactgttgaagacaagtagttaggcaacaactcaagatacacaacagaagacacagaaaaacgcaagagcaattcccgtgcggatgtcgggaacttggagcgtttgattcgctctaatatagcgaggaattaaatgcaggccctgataacacgtgtcggcactgtttaacggtggggcaaacgcattttgggttgaagtgctcgtcattcgggacttgtatgccttttcaaagactgtctctgtctcttgtggagacatacgatggaactgtctactcttgaagaacagcgactgccgccctctgtcgtgagtggtttcgcagactgggaggaatgaacaaatgcatggcttgcacttattcttccttaactttcttgtagggaagaaagtgtttctctcgccatttccgtcgtcgggagtttacccgaaatgggaaagctttgctcggacggagaggccgtactgtcaaaaagtctgcagctggatatttcttcagcagagctgctattgctgttcacagtataacatacatttgttcttgttgctgagctcttccttgtgcccatcacacctgtaccagaggctgcaaacgatattgacaagccgaaactttgatgcttctcgctgttcctcgagatgctctcagacacggaccggaatgtactatctatgcctgaggattcaatcgagggggccaccgcgcttgcgaacggatctggagaggatgaggctgttgtagacagagaatgtgaggagttcaagattttctcgttaatctttcgtttggtcgaagacatccggcttttgggtggggaagattgcgggtctcccagcgtttctggtgacgtgctgacgaatgttggtgttgcactagctgtgccacagaattcgttgcttcttttttctgataacgttttgctcgcgttcgtgtttcccgccgttgagctgaaaagggatgatttggcagatcctcgcaacgaaacgctcttgagggaatcctcttttccggttgattctgccttgtccatcattctgcacggaggtatttccgagtcatgagcgtcagataaagatgatatacacaaagaatttttcccgaagacaaaactgagtgtgccgctcgaacgctcacggggtatggacccggtcacactccagccaaaatcagacacacttcctggcattttgttggtcagttaaacaagaaatacggttccgtttaaccagcgggaaagtgccacagctggcctcacatcacacattcagcgtgtctgtattctggttctttaacacatgccgcacacgcgagcgtaagactgctgtcatcagctgagaataatacacgtcaaaacaagcgaaactatcaaaaggggactccacctcgtcatatatgatgtcagttgagtcgctgtatcgatgtaacaattaaagcagaaactgtgtcgccggtgacacagtgcctcgtacgtccaagccagccacgaagactcgtcacacagtcttgacggaaagaaactatcgcagaagttactgacaaagaactacgtacgctggtctagcgaagccctaaggcgttttcatacacacacagtagaacctccttctcgttacaatagggtgtacccgaagcgttactgctcgtcccgatggtgtccccgagcactgacaagagtccataccttcgctccgatcgcgttcccctctcaaaagcttgcaacgtggcactgacaagagtcccacatcagccatctattatcaatttcaaaaggctcctacatttggagagaacgtgtgcacgttgatgctgtaacgccccaaacagcaagcgaaacaagtttacagcaccgtcagacaggtacagctaaggggaaaatcagttttgccagccctaggggatgcacgggcatcgccaag

SEQ ID NO: 2688 - DNA, 4285 bp, Toxoplasma gondii
  source 1..4285: mol_type = genomic DNA
ctcggccgaaaatcattcgcatcatctttccttcgcttgaaaacactgcgaagtgagataccgtgggctctggacagaacgcccgtagcacctagagagaggggcaagtagaaaaggcgaaagggcggtagaactgcccttcgcagggcctcgtaactgtgtgagaggctggcaccccaaaaccccaaatgctcaacctttttactctttactgctactgtgtgatgtgaggttgggcgaagacgctgaaggaaatctgcaaaacactcagccgctcccgcggtcaaatccagagaggaaggacagacggtgactagacagaagcgcgttttcgcggagaccaaagagtcgaaacagtgaaggggaaaaatgcggtaagggaagaagggagacagaagccagacattagaatgactggagtgggcgaaaataccgccacgaacgcgaagagaaaggagcgcgttgggaaaggatgtaggtgcatccggactagtctaagggacagaagggcaacgatttaaatgcgggccgggttggagaaaaaccttccaggaaaacttcttgctcgtctacattttgggccgcagggaagcggcacacaaaacaacaccttctctcgtgtttgttgctcaaaagaacaaaggaagcggaacagatcaccacatacgggaactccagacacttgggtaatttgaattccgcgagccgtttgtgaaagtcaacggaatagaaaaacggagaagcgcggctgaccaaaacttcaagtggagtggtagcggtcgaccagacaagcaaagcgtgttgttctgcttttccgcgtttctggagaaagactcggagagcagcttgacgaataagagagcagcggaccggggacggaataggaacttgaaatcgcacaagagagaagcacggacagcacggatcgtcaaaaacaacaacgctgtggttgacaaagttctcctttttgagggaaaactggcgttctgtgggggtccgtttgaggcaggagaaaaggttctaactttgcacaaaactacgagaaaaagattggagggagcagagctgccagtaatctacggaataaaaaacctccgttggacgcccgccaaaatacacaggcatataaaaacttaagaaatagaggcactctcgcctaacggcttcagacactcagacaaatcgagtgcagaagtacacttctttctccagtctttcaggtagctgactctgtcgtgcaagccctaccctccagggaaattcccctctaacgtctgaagtcaatgtctgcacgtgtctgtcacttatgtgtacgtaaagctacggaaacttgtatccatctctgtagtagaagcagggaagcaggaaatgcatatgtgcgcgtgaaactcatggattttccagttgcgtctatagaatgcatttcgtagagcaaacggccgcgtagaaatgcgttgtgcaacgcgaggaacagtcgcaagtcaggaccaccggggggggggggggggagcaaggaagaaagcgagtccgatcactgactgaacggagctactcttgaatcgtcaagagatgagaatgcagccggccttaccaagccgctttttcattagcctcttctctgacacaccccgatttcgcgttctgtgatgctttcttttggctcatgttttcgaaggcgactaacggaacttactcgcgcgcttgccgatgagcaccccggtccgccggccacgaacattcaaagtacgcttgctttctcgtgattcttgaaaggcttgtctctgtcatttgtttcttctgcgtgccgtattgaagccgtccacttgttcctggaaatgctctgatgacgataactggaaaaactgggctgaagagtgctcttgaaagtgccgtcccgccgacgtatgtgccggcaacacattgaagacacgcgagtgccactgcaacacacttcaactggagcggccgtacggagggacggacattcccaagatggaatgcttgtgccgcagaacagacgctcccgaattaaagcttccgttttatggtccggagccgatacgtggaaagtgaaacgtgcgggtcggtatgcaagggacagcgagaaccccaacagagacgaaatggcgggagcccgtgttaacgccaaagcgcccttcgtcttcttttcgcttcagagtttaacagcttccgaagatttagatatttctgcgacctgggaatccgtaacagatactcgaataccacaaagtagcggaaaaaacaacggatacgctcgtcaatgtaacggtacaagccaaaagcaaaggatatacttcatatcacagaccataagggatggagtttatgagcctaaccggtacagttgtcccatgacgacggcgctttcgaagtcgagagcgtacccgcatgaccgggcagaggcgttcgcctgatggagttgtttagaggtttctacaagacaaacaatggaactcatacattcactggggaaacatcgcgtttcacagaaagcctactgcaccagggacatcctggtaatagcggatggaattagtatcaaagagggaacaccgtaccacattggcgaacagcatggtgacacgataacaaaagaaatgcactgaatgaagtcgctttgaggatatgccaccgttgcacttcgcgtcttgcccctgtgaaagagagtcagcatatgctctggttttttaagcggaagcagtccgtactaccgggcgaacacaaatgagtactccattatttgtctcagagattctccttgctaaggtaatgcatacagattgccttttagtttgatttccctgtaggaacattttggcaatcgagatcagccaggacaagtataaaggtcgacatgctcacagacaccaaataggagacaggaccaccgtccctgtattgagtttgtggaccgctacatattatggcaacgaactagcgacgtcagtgtgaccgatatgtgctctatattcacttatattggacacgatatcaggataagtacgctgacgtcttcatcgtctccagggcttcactgttcacgtggccctcaggcagaaagaggcagatttctgaacccgacacatcaagaggcaaagtattttctctccaagatcagggtcaatctccagaactctatgtacacaaagtagcccatttgtgattgtgggtgccagacgttttacaaaacgaagccgaacgttttgccaaaaacataacccccccttgccgctgttccgttactggccaaggcaactcctcacgctctatcatgtgaatccgggatcaaattggaagcgctggattcttagagcaaaacagggaagtgtatgataagtggatagccgcctctcagccagctctgtagacaatggatggtttcaggaacttgtccctggttcgctgtgaatcgtctcgacaaaaactagaagatggtggagcaacgccgcacacaagtaacgccaagacgcaaggggactatcggactgccgccaaaagttccgcatagcagaaagtccacacagtttctcgtgcaacgcagaaagcctgctgtagacgactctagctgccaggtagcaaacgatttcccagatcgaccagaagtgtgcagggcagatgcagtcgggcgggacttgcatgcgcgcctgctctgccggaatgagactcgagaaaaaaccagccctagcgtaataacgttagcggttgaaaactttagagaaactgaccggtgcaaagagtctaaactgggatgataacgccggtaggcgacgcggcagatttcctctcagtctcgccacgctgacgcaaactttgcccagcagtttttgccggacgtgtgagataggatgatctgttttaaccacaagaaaattgtcccagaattgagtcaaaagagcaactgctccgccttttcttcattgcattttttcctgcatatatctacgcaaaaaactcgtgtacgactcctgcgtattgctgtatccaatgtctcccgcttgcggttttcagaccctgcgtaaagggggaattcttcgtgagaatcccatcctgttatttctttcccactgtaaaccccgaaaccatccgcttttatttcccgttctcgtccatgtcttcgcgtttttcttgcacgtcgacggcgacttgtgaccttgtagttccgtcgttcttcctcttcttcgcgctccgccgctctcgcctccctccatttcatgtctgttctgtcttgtatcactcgccttttctgttacccccagtcggtaca

SEQ ID NO: 2689 - DNA, 2667 bp, Toxoplasma gondii
  source 1..2667: mol_type = genomic DNA
gcgtttcttcaaaaatgcagacaaaaatgtccatagggactcagcgtaactgagtggcaacacctgtggccaggctcattgggtctccgcactgagggtgaaccgttcacaaatacagttgtggtcacttcttcaacatgtctcgggttgtacagtatacagatatgtactgcgtttgatgtttgaaaccgctgattatgtaggtgtgcagtgtatgtatagctcaacagctagcagcttggccacttcagcttctaatgaataagaatagtaactatgacgccgccgcccccccagtctgccacatccatagcgtaaatctagacgttcgtgtgagtatagcgagtctaaaatccggctcgaaggctgtccccggtgtctctcacaaaccactgatgtattatgtcactgatgtcttcggcacgtgcagaaactgtagtggggaacgttcagcatgagtggctgcagaaagacccacataggaggctgccattccagtgtgtgcgtttcggtgcagataaaccatgcactccctttaatcaaaatagccagccataggttgtgacgagcctgtcccggcgaactggaaacggcgactgttttgcctcgtaagccgaaattatccttgtggttttctcagttactgcggtcgctgcgtcgtgcggatattctgggagccgtgttgtgtgcctcagggttgtcggatttcagaacagacgacgttaagatgcatttcgtttcgttgatgtgtctgtatctaaatggaaaaactgtagggaacgaaacagcgatatgtcgcaaccacaagtcgctgtgttgtgccagttcatttacgtctacaaggcggttcggcgtatatacaggcagtgatgcatttggggtggggggctctttatttcaggtccttcattctaacaagctttgggccaatcaatgtgctcctccctcttgttttccctaaatgccagctggtcgggcttttagcagccattctcctggagagagattccgcgttatctgtagggcgacttgtggttgaacgcctcttgctgcgttatgatttgagaaataaccgtgcacagaggttcaggctccaggagtgctgccgtaaaatgctgccgacaaagtcgccctcgtcaggagtgcactcctggattttctgtgaaagtctgtactcctttctgtttgtggctgcgtgccaccagtgcagtttaccatcatgtctgttaaggtcctctggtaccgggggaaagtggggagcaaaaggggtggagtcgatttatgcgcttcggtggttgtgcgattttttttcagggaaacgaagagaactgcgacaccaatatcagctgatgtgtatggtagcgtaaagaaatacgtgtacagtggtctcgttcacaagcacacaaaaaagtcggcgcggcttggacagagggtggctgtgtggtggcgccatcttttcgtggcgccgacttccgtgacgggtcgtgggcttccagctcgagcgtttggatcctgcaagcttaaatttggagagtggctcggttttggggagcacacgcgcagtcgcgacgttttcgcccgtggcgtggtctgtgcagggacggcgagaggctgcgtcagcatcccgaattttggtcactcggcgggtgacgagtcgcggtctttgccccactctccgcgtttcgtgtgacaaaacagaccgaatttctaacgcagagaacgcctgtgtttttcggcacgcgcgggcggcgttgagaacgagacagagatatatgaagtatatttctggtcttttggtgggggaggaaatgttttgaggcgtctgccgttttctcctccgtcttcggtctgtttcttccgcctccactttctcgctgtgtggcccgccgcctctccggttctgtcccttcgttcgatgttttctcggtcttttccggttttcgtcgagtgttcagccgtttcccacgccggatttccatccactggagaagtccacgcgcccaaaaagttcttcaaaaacgcgggagtgagcgccgcttttgttgccccatcagtggatctcccccccccccctccccgcgccggcttttttggcccagcctatgcgatatttgcatatcgtacgggtatttctgcatttgatcagcggtatacgcgacgttctgcgtctcaacagttcgcgtggtccgattctccacggttcgcattttttctgcatttctgccccgttcccacggcgtcgtacccggtccgtggttcccgcagaaatcacgcacttgtctacgcaggcgcgtccctccgtcctgataaggtgtcactcccgtgtcctgcagatatcctgttcttcgtgacatttcgggaaggaaaaacgcaggggtcgtttcctccaagccgaaatctgtgcactgcgaccgttagctctcgactcgtcttcgcagtggtccacgcgtgcatctacccagccagggagtagaccctctgcacaaagttgtggaatcgacggagaatctgaggtgttcccttttcgcttcgttgtctgttccgttccccacctaacttttttattcgcgtcgcaccgttcaggagcatccaccctcccgtggctggcagcgcatccacaggcacacccttgcccacgaagccgtgttcatttaccatctagaacca

SEQ ID NO: 2690 - DNA, 1587 bp, Toxoplasma gondii
  source 1..1587: mol_type = genomic DNA
gcatcgttgtcgctcaacggacttccggtgttagtttctgttctggggtaatgtgtgttgtttcaaagtgcgtttctccccagacgttttcgattgtgtcgcgcggctacgaccttgctcgcggcaaaagtcacaaaactacggcctcagtccccgttataagggtggtgtcctccggccctgtgtctacagtgtagactcgtgcgtccggtctacggtttagacgaatatcaggcgtccacgatgagagctgcttcgagctagagaggtcccctctctgacagtgttgtgctgcggaatgctccagcggattctgctcgctcggggacctgtctagcaactgcaaaggcacttctaccgcctggcgtgtttggctagagaactggagttttctagcggttgacggccactgccagagaacgcaggtctctgcaatgaagggagcgaaattggacaaggcgtttaggtcacgagaccctttactttcttttgcttccgttcaaacaggcacctcgcggcagcgcctcttcgaggaactgcagaccacagagaaatgtgtgatcaccgcggagagacagtcccgccgaggcgcctctccttggttcgttttcttctgtgaaagacctttctacgtggttccgtccgtcctgatgcaactctcgccgagcgtctgcgcttcctttacttccgttcttgtttctcgcttctgcccatttctgtttgtgtctttccccccgctctgtctgtgtgacaagcgcgtgcggctctcgaggaggacagaaaacctgtcgagcgccgtcagaaagcaacaagtcgtcgccaggtgcttttggcaacgggcaatccttgtctgcttcttgccatccaagtgcatttccactctaacttctgccggattctttgcggaggacgcgggagcatcttcgcaccactctagtttggaggtggtgctccaaaggaaccgaaaatggcagtcctttcctcgttcctgtatgaggacgatttccacgcgttttctggaaagaggtgctgcgagtggactccaggtttgtcagacgttgaaagtcttcgtcgaccggttccggttctctcgtgcttttcgcggccatcacgaaaagactcgtttgcaccaccttcctccggaagtcgatcacacacagttctcgatttacatagccgaagaacaaacgccctgattttagtggttttactttttctggaactgtcgagcgggaggcctgccgttctggcggttgctgacggccgatactttgcgggacttttttcggcgcatgcaactgcgtgttccttcgctgcgttcccgctttttgccctttctctccgcgcaagttccctcccatcttcttctgtaacccacgggacatttttctcctcgagaggatacctcctttcgcgtccgctgtctcgcgtttcgttttctccacagcgaagcgccgctgtgggtccagctcaggcctttcctctgcccgagtttttgcctccgcttctctcctctgtcgtttcttgcttcgtgccttcttctgctttctttctcctgtttttcgccgtctcgtcttttcttcaaga

SEQ ID NO: 2691 - DNA, 3863 bp, Toxoplasma gondii
  source 1..3863: mol_type = genomic DNA
ctcctcaaatctcaggtggagacgctgtatcgaatgggagcgaatacagaggcgaagaaacttgcagacctcataaacccggacaagtgaacttcagaaagaattccagtatcaagatttcttgcgagcagaaaaaacaatccttggtagtctcgcacagagtcagccggtggtgcttcaaagccggtcggagatgcgggtgcttgaaacaacgatcacggaaacagatttccacctaggcatttgggtggtgacatcacttcccaaagaaaagagtgtctgagagatcgcgaaactaaagaacttgaaaaacaccactagagcggaaaaacacactaccaccgccacaagaagaaatctcgattttagagcggctgttacagactgtccaacctaccactactaaaccgagttaaatcatacagggtggagctaagtaaatatcaatgcatagataaaaggaaagtgactttgtagttcccttttttcagggttcttgctccgcggagtgcgcgagcagggcagaagaaggaatcgaacggagctgcagagacaaaaaaacaaatgcgtttctgtgtcaaaatctcgacgcccatgtttgtgtggtggcgatgtctcatttctttgtttctttctgatggaagactttttgctttcggtgcagttagtgtgtctgctatgtttggtctaatgcgttgttatcctttgacctcaagcagaattccctataagcaacagagacatccagtgaccgaagatttggtcttgccgcttgcggaagtcagaggttgcctgtgtcttataaatggagtcatattcagtgtccaggtttcatagtgtctctgttcattcgatttgttatacatttctggatgtcgcggggtgagaccggaaagactgagtagagtccgtgaatttacagtcgacttagttttgtcttttccaggtcaggtgtttttgccctctaatcctcagattgtatcagcacgccagtgtcggctgatgattctttcaactgcatcataaactacatatttaagcgggtgccaatagaccagtcttgaacgcacagtagatgttgtgcccagtcgagtgtcacacacggaagttcgcttaatgattctaggtgcagatccagaacgaaagagaagcgtgtaccgtcagaggcaacgcgatgcgagctcagagtgggacgcttgattagtttgtgtgtcaaaactgtgttgccaccacatttgacgatctccaagctctctgcaaaacattggaagacagtctggaagaagcgcgtgttgttcgtcttgtttgcttgtgaaagaactcgaactttcacggagtatatttttggaacgtgataacttcacctagccatcacgatgcggttgttttggaacaactcccttacatgtaggggccgcggaattttctcaacactggaagcgcgctgccaccaccgcagacttagatcacggacacgaaagagggcatcattaccgtgtacttttctgcaggtttttacctgccttttctatcctcatggatacgcgtgcatctgtgtctgtgcgcttttaattcgctaactggcaggcatgcactctttcaccattaagaaaacggtgtctttccgtggctttgaaagggtgtcttccgcagtatctttgtttctgtttccctagagacccatgatgcctgctcgttctttaaaaagcagttgcgtaagcaagaggttgtgttaacattttcctgaggccatcgaagagtggtgcgaatccgtaccatttcaccggagcgccgattctgtttcaggcgtcacccacgttcctctgaagttggacccggtaaacaaagatatttaagatctaaaccggtagtccacctccttaatgcccccaccagaaaaaggtagattacataaaagtaggagtcctattatatactcgtctaatgcagtctgagaaggagaagggaagcgtgccgctgactcagacggttgtttcacatccgaaattctccaggctattttctgtctttctctgaaatggccttacagtacacacgaaatcgtgaccagccagaacgtctggcagtgaccacttgttcctgcgttttccagagaagagagaaaatgcgaactcgggattgtgttccgcgctctaccgtcgtgcctgcctctgccgccacctgtcaaaagcaccatgatgatgacaattaacgttgtgtagggcagcagagtcccggaccacggaagcccccaaagttcgtcttcacacttcgggtgtacatacacgccagcgccagtgcccccacactggttgagccaacacaacactttgccaaagaaaagcttttccctcgtttaccgagaacgttccccgcaaactcggtaccgctcctgtccaagaatcagtagtacggttcgtcgcgcgtttgggttgcgggcaccgtgagtaccgatctttactaggtctccttgtggtggcattcttgcctgtgtcgccttttgacgttcgctggtgtcgcccacgcctcggcttccacgtcgtcgttatttggcgagttttcattcaccatacatggtgaaaatgcacccagacgcctttcgtcttttttctgctcgatccgttccgcttctcttccttgttggactccatttgtgtttttctgtgtgacagtcccgaccagttccgttcggcacacctcattggagcacccgggcaagacctcactcaaagcccgcggttgcgggtgctagcggctaacgacatgcagatgcacgcttgcgtctagggtacgcaaggttcaaggaacgtagagaattccctcatgactattcagcgtagctcgcttttctccaaaaggctttaagcttctccgactttgtctcgttccctgctagcaatgcatggcgccagacgacaagggccctggattgccatggcgtctctcacaactcccgggggagcgcccgagccttgaccacggatctctggttttccagtctcgatgtaacaacgaacctcaaaagacggctcgagaacgaaaccttccagtctttcatcgaaaacaagaatcttcacggcactgacccttccagttggaagagcaggcccgtcctgttttcgcgagaccctgcgcccttcggcgagcttttggctgcagcctgccctcctcgattcgagtggcgccataggcccgtggttttgcctcctgaaaagttgcatttgtgtgtcactctggtctccttcatccatcttgcttcgaacagggggtactacccctgtaactctccgctataagcgcttccttgtctctcgccgttcaacagttgaccggttcgaaaccccatttcacaacgtctcttaatagtagttcaaagaaacatgtgcgatttctctgtccgcctcaccacaagcgctgacagtgtcaggacagtctcaattcgaaatgtcccccttaccccttcctccccactagtgtcgatctaaccacttctgccgggcaatgtccaatcgtgcatgacaataacttcatctgttctacatcctcatgttgttgaagtacatagaggagcaggctcatacgacccacctttcctgcgtgtaaactggtaggtggagttctggtttacatcttgaatggctttaccgggtccaagctccactgcgtccaaactacaactcactcatctatcccttgttggtgctcgagagttggactatcccagacttcgaggtccgagaaagaatccccaagagaacccttccttccctcagatacggaagtcctggaaacatgtgtcgtgaaaacagtgtttgttgcctttccatttgaggcaggacccgaattgaagaacggaaacacga

SEQ ID NO: 2692 - DNA, 2145 bp, Toxoplasma gondii
  source 1..2145: mol_type = genomic DNA
tgacactggaaagtgttctggacaggagggtacaaataaatgtggaaatctgtggcatgtgtttgctgtttcagcgagatcataccgtcgcgtccttgatgtgcgtgcacccccagtagtcagactcataatgcttttcgtaccaaaggttccccaccgcatgttcagcttggaacctaacgttaaacgtgcaacgtttaattcgatttggtccccctgttattctgcgcgttcactcacttcgatgtaattcgccaaaccagcaaaaggacaaaaacaccaccagagtttattcgtccgagaatgatatcggtggtattacatagaggtgttcacttccggtttcgctgtgtagcgtgcccagtctacgtcattctcctggcggtttgtacaagtttacaggtggtcgttggcttcgttgcgaacttcattcacttctcgcacattgtatgcagccgcagacattttcctgtgtgtctatgagtctctacgggaaagatatcaagattaccagttgcagtcttaacaaattaccgggtgattcgtccggtctaaaggtgactgcatttgctcgaagcagtctcttctcttcgactggtgtgctccaattgcacaagaggcaaacaacaatgtgtgcgcgtatgcacccttttttgcgtgcgttgactaggaggcaaactattgacatcgaaagttcctcgtatgttcagacaagttgatgaatactgtttccttctccagtcgctgacacccaagtcccatcgctgaacccgaagaaatcaaggaaggcgcatctacctgtgtttatggggcggcgggtgcgcgggaggagcacgacacacacgcacggccgtttcaagatgaagaattaccacagtgttgaagatatacagaaagaaaacagagtgatggtatgtaaaacaactgactattgcgaattggtatcgactcacgcgcaggaaaaatgagtgtcgcgttttgcagcagttgttgcaggccttagtctaaagtaagatacataagcgttttcagcaagcaaaagctggagcagaaaatcacgcagagattcctagtgaatgatgaactgattaggtcgctagataagtccgcattctctcgttttccgcgctacgactggtgcgcgcgctgttggtagtttgccttgcactggcgtcttgcagacacaagacttccccattttcacccttgaagttgtttctggcaagctcaccgccattttgctcaagtattttcgttgaggcgtctcgtgcaaggtgaaaacactcaagagttgcacgagttctctgcagtatcaactgcggcctccccactctggcgaactccatcgttgcatgctttcttgctctgcgagtagagggaagctcacgaaaagtctgttccgcctgtgcgtgttgaacgcgttttcggtagctgattttggggttgacacagtttcttcttttgcgttaagtgttccgtttctacgtacaacgggagacgtctttagaggccgaaaggtcggatcctgtccaactgcgccatctgttccaccggtgcactgcagtgtcaacgtccgcggccgttctctttttccacatttccgcgagcaaaaaggtgactggtaaacctgtcaagggtttctcttccgagggtgcttttctctcgctcttcgatccggatcgaaaagtgtgtcagcagtccgtccccgaatgttccgataatcttccttctacacctttcccagtcactgaaaaagttcttctctctcctttccaaatccggtggcagtcgccgcagctaccgccaccacgacaattcgagtccctcaacggcgttcgtagtgcttctcgtgagtgagtgtgtcaccaaacgcatcaatgactttatttttgtccgcatgtgcacggaacggcgcgtacgcatgcgtatcggcgcaagtgtttgctcctctgcgaagaatttcgtcgagagctttccaagaaacctacgcctcacggattctaagttgagtgtgcattcgtagaaggcaaagtgcaccttatttgcgcgccttgttttcggttgcttcggtcgagctggcagtcgatgaaacgcgtcttcgaggcgtgaccttcttcttgttttaccctgtccacagccctgcaa

SEQ ID NO: 2693 - DNA, 2161 bp, Toxoplasma gondii
  source 1..2161: mol_type = genomic DNA
tgtttgaaatacgtcgtattacgtctcaaccggaagtgaagaaagctttttgcacgtgtgcctttggtgatcgtaaaagtttatcagcgggtgaacatcagcttgatgggtgtatccaggatgatgttggcgagtcgaacgccaagtatccgcggaacacatttgcagtcaggagtgacggctaacgtaccacgagagtgtgtaacagcacaaatgagaggtgtcggggggtccagggtcctccctggttgcacaccagtatttatctcaagtgtacaagacgatgacgattgcctgggagtgtacatatgtaatacgtagccgcgttcctgtgcaccttcgattttgaacgagtttaccagtgttttcactccactagtggggtagagatctgccgaaagaaccttcaagcggtggtttctatgaacttctcgtatgtttcttccgcacacagtggaaacggtcgtgcaatgtgtgtgcggtcgagccgcttaggtggccagtcatacttgcacagaaatacaccatgatccacatgagcagtacatctcagttcccatgagcgagctccttcgtgattgaggtagtatgttaattttgcggcttcacttcggcaacatccgcgagtcgtcaattgcatggaccacaagttgttgttcagagtttcatttgggaacaaagttagggtttgtatacctactccccagaatgcaggaggcctccgaccttcatgactggcgagggcatgcatgttctacaagaagcaaatgaaataatgcaaccccgtggtgacgctcgtaatcctcatctcggggggcacgttctccttgagtcgactgcctcgaactaactactcacgagaattacttacaggcgtaacgcggacaggataccgttttgtcttttcgtaaggatagtaacggttgcccggtagatagcgttaggttcttcagcaatttcgagttgtcgttctcccttctgaaggaacttcgtttttgccgtggcccctttgttcagagctccaaaaacagaaaacagtactctagtgaatacctctagccgtttccaggcacgtatttattatctctcgttagtggtagcgttcagattcccgtatggatgtgtctcttcacatgaaccgctgcacctgctgtagtcgtcgaagaaaaagtttcatcagaagaaaatggtaagggaagcttggcaagggctcaagccctctgcaaaaaatgacggctcttttcgtgacccgtcaagaaaaatggcttgtttatgcggactggcatcgaggctcaacaagtaaaaagcagacggtcttttccgtcttttccgttccgcctctaaggggaactacgttttttttttcaactatggacaatattgataatggatgacggaacaggtctccccatcacagcgtgcagacaccgcaaagatagtagaagtgcggtacacggttcggatgtgtacggccagtcacttttgtttgtacaaccaaacgcatctgtaatcaaaatgttgcttatctttcccatagcaacaatgggtctcctctttggttgctccagctgttgttttcgggatccggtagcgcactcacaacgcagtgaatgttcctttgtaaaaaaaaccactgttccgggaaatagaatcaaaccattttgtggggtggttgcagccacagtcccttcttcacgatacgatgactgccaagcgcctgaggcagccgcctcgccacgtggacgaaaggtcggtttaggtgacttgatctccagtgacagttgtacgtcaaggtcttcgcttccgacctcgtggcatattgcagcgcgcccggccaccaacataatctaatatgaagacaccggcaatctgcacgccgtaccccacacgttaacaatgcgtccgcatcgtgtataagccgcactcaacaacgtacttttccgcaactatggtgggcactagggcgctgtgtttgatcccattgacaactcgcgggccgatcttgccggattcttcaccgaagcgaacaggaaccacccgtcagcttgaaattacaaacggccgtttctctcagtggtgaattacggcgcttttttcttgttcgtagaccggggaacctcgttcggcgaaacgtctggactatcgttttcccgggacacaa

SEQ ID NO: 2694 - DNA, 3039 bp, Toxoplasma gondii
  source 1..3039: mol_type = genomic DNA
agtcgcctatcattcccttgaatatgtgctttgcgtacctatttgccatcgccggtcaatgatttagctttttatgtacatgcatgcgtggcatgtaaacatcgtcaatagaaatctaaagagcttttgttgactgtatgtgtgagacgtagagatcatacctatgtcgtgcattctaattatcacattaacccgatggcctcgactattacaggtactgcaagcaggcagcttagaccttttgcggtagaatgactgctatttgggatgcaggtaagcaagctcttcatgactgctgtgtattggtactacgaaataggatatcgctatagttcctggtaacatgctgcctgacacgtgtacccctcccgaatcctgccgttgtagtcaatgaccttatgcgccgatatggtgactcttttgtatcagtatatgatggaggttcgggagttggagtgaaaaaagaaatgtgttctttcatcatctttcctcctggtgcgacgggagctacttgaaacatagagtatgcaagggttaggtgaagaaaggcactgtgctagctgattgtgttctctaccgtgggacgacgattacatctgcgcaaacgtctgacactaacggctcccaagtctcaacaagtaagtcgtactgcattgcatcgagaggggtcgatccaaaatgatatcgacgaatgacgaagtggcttcatgcttctcacggaaaggccccgcaatggacagctagaccatccttgaatcggatacgtttgtgtcggctacacttctgaatcgtcaaacacacacaggtcataatgcaccggtactctgctgatgggatagcggtgcagcagcgcatagaagacatacaagtaactgcctgctggagacatcgcagcaattttgagaagatttcgaagtgatgttcttctcggaccttgtcccgctagtggagctgcgattatggacaattccacatatgccaaatcacagaaaagggtcccctgggtccaacgctttcacaccgtataccgctactgttaaactgcggactgcctacgctcccataacctttggaatctcccttactgggtaaacgatgtccggtgccgtttccttggtttttccctccggtgctttgaagaaattgctagtaagaggtttctcgttgacataattgaacctcggcttatttatgcgggtaaaccggcccacgccctcccgaaaataatgcgaccggttttggcagcagaaacgtcaagagagtttctttgcttcaaataagccataaaaaacgaaaatatgtggcaatttcctgtacccagttataccaagctctcaaaaaacatgaacttgtgtctctattttgactctttccgacagtttaggcgttattcgctgtaccttaacttacaccgcatgcaaagttgcaaagtcgtttgtaggtacaacgtgcaccactatctacctggtggatgggatatctgtaacgaccaaatccatactaaataaccaaacagaacgtaaagcaagttaccccaagtgctacgaaaagattgctcgaacaaaaaaaaggtcggtgcacttcgacaagggatcatcgactagaagccgacggagatgagccaagaaaaataacattgttgaggccaccacctgttaccaaaacctcgtttagagaaagtattgaaataactcgccggaaatcgtagcaaggcaaaaggcacctgaagatgcacaatggtatcgctctaggaactgctggatacaggtgtttactatggtgtgactccagcaggtacatttgttacgcccctttcctgtaaacgcgaacatggttttcgccacagcatgccgggaaagtaaataattttggcgcgatgcgaattcaggctactcgattgaaaagatcccccactccaggaatgatttgaagtagtttttggttctggcacgtagtcttgttgtgagcattgctgttccaccatacaaaagtgggaggccaaccgaggtgatggttccacacgagccgggttttctttccattccatccactcttcttaatccgaggtacctccgcggggagccccattccgttggctctgatcttcgactcctagatcgagttcgacgcagagttcacagcgtttcttctcgtcatccttacgggatttagtacacagagtttcagatagctgaatggaaaagagtgaaatgaaagggaatcaaatgaaatgttcgtttcagcataacgcgtcgacgttcttcgatgcgctgctatagatgactcagcagttagacgcgcgggttccaaccgcgtcccttaacgagaaaagtgcgagtaccgttgacttccgcatgacaacatgaacgacaggagataacttggggcagttttcagtcgcttcaaaaggcttcctgccacagaaaggagacgcagtagcgtcaacaaagcagcacgcgaacacgccgcaacacgatggaggaagtgctttttgcatgcagtgcaagacaatactgcggcttgactcagacggacggccggacgcttgcgtcgtcacatagtgacagaattaaatttgacaggttttctgagtttctgagttcttgtaggcagaccgtgtcgtcagccgagtaaatatcgcgattttatttctcaattctcctgatgagtctgcccgtatggaaagagaagaagtattagaaggaccgccgacggggacgtattgactccggttcgaatatcacttgaatgcataaaggctgcttcatacgcctggcagaacggtttggctcccgtgaaaatatcactcagatgcataccggatccttcataggagagattgccagtcatatactcttgtgggacgtattctgtcgtttcataaccgccgaaattcttgaaattcttgggcggcgctgcctatgcccgaccgcaaggtcgtatgcagccgtgtaatcatgttccatttcctcaggtagccttcctttatctcgatgtaccttgattgaactctgtcgctctcctgctcatcagaagaca

SEQ ID NO: 2695 - DNA, 1351 bp, Toxoplasma gondii
  source 1..1351: mol_type = genomic DNA
gtcttccatcgtctgcggaatgcttcagaatctgcggcagaaatgcgccttggtcgatccaaaggaggatacgggaaaccagtgtttccggtgctcctgagactatcgtcggagacgaattccgcctctgatacacccacgttgtcttcggcttctctagattttcccacctcctgatttttgcttggcgtgcaaccgcgactggagggttgattttggtctgtctgtaggagaggttcgttgggaggatgctggtcgctgaacgatgtgagctctcttgtcgcgtgtccagaagatacctgagtcgtggaggccgccgaagacaaatttgcaactgtgtgtgtagtggcagtcttccagaaggagtatccccttttggatggaaacgaaagagcggcaagcggtcttcctggaagcatccccaccgtccacgtaattcgcgccattgcacgaggcctggtttgttgtgtcgcttgcacctggaaggagatgaaattttggtgtagtctttgcattatataaagaaagagccaccagttcgcatgtactgtgcttccagggaagttttcctcgtccggtaacgcaattgtcccatggtgacttcatcagaagggcgcccagagccgggttgctgtgtttgtggactttcaggtagtgatgccgacagtttagaatgatgcacaaagagagacattaccaaaacgccaagacgtggcaacagtctcgcgagactcgcggacttgcctggcattcagggtcttcgtggccccgggtggatcaacaaaatattcggcagttcgtcggttttgagcgccctcggcctctgttcacgtttgcgaaatacggagtcgcgtgcgagagatctgtttggattcaccatatcgttctgtacgagaaaacgaaactgtattcagctcttggcaaatagctggactctgctgttgctgtgaccacgagcctgctgccgcagggtagcctacagcgtgtccggagctcacctccttggaagcggaaatgcctctgagaataaatgcaacaaaacagagctttcattctttggtttctgtactttcctctccgttgtggacgatgtgccatgctaatcggaagcatgcagtttcgaagatgagagccatcgcgcatgcagggcaaataacatgcacgctgcacacttcactcctgtttgatgctcatcttgactctgatttccctcgtggtgcacatttctgcgaaagtaggccaagagattatttttcacgtatgaaaagtgctgagaaccggtcgtgtgggtcgctctgcggtccatcatggctggtatagctgtgttttacatacagtctttctgtattga

SEQ ID NO: 2696 - DNA, 1641 bp, Toxoplasma gondii
  source 1..1641: mol_type = genomic DNA
acctttttggagatttcgccaaggtcttcctagtcagtttagtcaatcccgtctctgtcgactcggttcctgcacacaatttcgtgaagacagatctatcagggaagttggtcgaactaaggatcatccaatccacccgtcgggagcttcaggatttagaactgccaggcgagtactgaatggaggattctctctcgatgtctagttacgcgttttcgtccccgtcgtctcaaccgtttgcatcatagcgcctttttccccgctttctgacgctccgttgattcatcccttcttagttgatttaaaagacacgccgcctgcgggtgcccagaagtctgctttttccctgcggggggagaaagcgcaaagaagccatgcggaatgtgtgcatgcacttttacacccaacatctcacgacacgagctgacgagcgtgctctgccgttgagctactagccttttttttatttactagcgcctggctggcttgaatgaactggaggaaacgtcgggagtcagcaaactccagaaaggacatgcaaactagaaccataattgaacgaggcatgcagtcagagagagaaacatgtgtgtacacatactaccctgcccaagttcaatcgattctccgtggcaacaagacaacaagacatttccaacgcctcaactgaaactcgtgagccttctcgtagcattcatacacaccgccgaaagagaaaacgtcagatcaccgctcgacggcgtattgttcgtctccagttagactgcctccgcaccggagtcggactgtagaactcccgtaagactaaaaagatgtaactttcaccagctctcgagtctgcagcgaagctccgctccctcaacgccgtcaggcggcgaaacgggaagagctgcttttcctggagaagagacagaaggaggctgacaaaccgtccgcgccagtcgaatttcttccacttctcgcgaggaagctgttgagtctggctcttctgtgcaaagtcccagggagaagtccaaagtaccaaggcgcatccagcgtggagtttcaaatgggtacgactcaaccttcgacgttggtaggttaatcaaatacgatttccagttatcgttattcgaaaagacgtggagtgaggttcgtagaagacgctgtcagacagtgcccctgcaaaagacaggccttctctcagcgctcgctgtccacgcgttcgacgcaaagtttcgctaggcaggagtctcttttccagaaaacagaaccttcggaaaaagctgctttcctcgcttcagtgtgtgaacgcgtcgatgcagcgaaagagacgcgttttcgaggcggcctttttcgtcctgttttccacgtctcgcctctccgcattttctcttgtccgcgtctcgcgtcgtctaagtgcgcctctctgtctctgtctcttttcgccgactttgttgtcttcggactcgcagactctgtcccctccccaggcctcgctctactttatctccgtttttctgtgcgttttctttcggttccatcgcctctgatcgtgcgtcgtctcgaccgcggaactctgctgctcgctgtcttctggacttctctcccgactcttctccgctcgacctcgtgtctcgcctgcgtacaagtgctcatcaa

SEQ ID NO: 2697 - DNA, 2028 bp, Toxoplasma gondii
  source 1..2028: mol_type = genomic DNA
atcaacgggctttgccaaacgcttgacctcctccatcatcactttcgcagctctttgaatgccgcgttgcaagggaattggattgtgacctttgttgacgtgatccacaccctgaaagcataccaaccagctcgaccacgatcacaaattcgtgttgacgatcgtagcactgcttccggcttcttccggcccctcctccttcgtggactgtttacccgggagttgacgttgacgccccagacaatcgtcccacgagacggtgctcacctggcgtgctatttcagctgtgagaatagttgtggaggatgtgccgtctcctgcccactcatccgaagtcgatgcaacctcctgcactaactttgcaccggcgttgtgagcgcgactcttcagctcaatatttcttgcgatggtgacaccatcgttgactatcattggcggtccatattctttctccagtaagacgttacgcccccggggtcccaatgtaacctgtgaagtccacacgcgtcctggaacaagagaaaaatcacctagtcttcatgggcatgatgaatacacgtgctgtgcctgtttcacgacagtctccgagccggctgatgctgtgtgctggtcattctgaacaataataacacttatagctctacgcaggaggttcacagtactgcacatctaccattctagtaaccaaggccgttcttgtcccccagaactccgggcttcgcgtgagttgatcatccggagaacagagcatcagccggagttcctccacacatattagtccatcttcggaataatgcttaccctaactgctccagccacagcttcgataccttcaaggagctgatttcggcattcatcggccaaaatgagcctcttcgctttgcgtgcctgctcacacatacaaatttcacacaaccaccaatgcagttgcctcagcatgacgctgaggcagcagttatgcaacagagacaagttgcttcttcgtcacagaaaagaagtcccacagaccaaggaacgtcttgttttctaatttaaagcttgattctttgccactgccgctaaaggacgttagtatttgtgggttgtttgctcaccatcaaggttgacggggaaccttgccgcgtcgaaggggctctatagttgtcattgataactagtggaacatgtttgccgcggacagtggcaggcgagacagagtgggacccttcagaggatggggaacgcaacagggagtggccaagaaaagcatttggggctggaagttgaaaacatgatgcaaaactgctgataccgaatcctacgagaatgagaggatacggcacaaaagatgcaagtgccaccatcatgccaacctctggttctaaaagcatccaatccgttgaaaacagcgtctcgcctatgtcaaatatgcagtgccttcattgctgcggagacaccttttgctttgagtttcttcccacgggcgacgaggagacgtgtctggagacaggacggccgttgtcgcatagcttctgcatgcaaagtcgcgtgcgccagccgaagacctgtaacgacaattcagcgttcaccgtcggttccgcgaacagtcgttgaacgtcgaagggcgaacgccgcaaacttaacgggctcaaatttagtttcttctactggtttttgcggtaatttatcgaagtgccattttgcgtgtcgctttttcggtgcaaactatccaccgtggcgatattgattcctgcgtggcgcgtgggtacaccacagatcgatacccgagtagaacgttcagtcttgctggtcattctaatgaatgccagaatgttttgaattcaacagagttgtcgataccacttctaagaaccaatctgtctggtacggaggagcaactctgccgtgcggaggctgaggattcagtgggcatggtttaacttgtggggaggctggatgatgaggcggtactaacagcagtagggtgtcctgtgacgaacaggaaattggactgacccttcgacacttgactgcctttgagaaagaaga

SEQ ID NO: 2698 - DNA, 2162 bp, Toxoplasma gondii
  source 1..2162: mol_type = genomic DNA
cattccctccgtggcgtcgcttcctgagagtgtcgctacttgataatccccagagctgtccgaaatctgagagccgcgacaccgtgcaatatctgcccaagggcgacgatggtgtcgctgtgttgaacatatgtccgggtgatcgttcccagagatccactgcgaagaggctattaccacggatttttcactaagaacacatcagaggagcgactccacagtaggactcctctcacagtggcaggtaacttggctgcagtgtacctctgagagactgaaaatgcatacagtttggacctgattcagagatagcgtttacactttaaaatgccttgcatgtcgagatgcattggccacagaacacaggagccagacctctctagccagcgcagctgtctgggtgcgtgggggagatgcacttgtgccatgctagtaccagaccgtcaccgcgtcagactgtcgcctctcctgggcccctagtgtggaaccacttcttttttcagttggtccagtcactgacatcaaacgcaggcatcttcatgaaacacttttgtacgtggaggtggcgatcctttttaccttcaccatgatatgaccttgagctttccactctgagactacgaatggagatattagctagtgagtgtctctatttgagaacgcagtagaatcttcctgacatctaacgatccgtgatgtagtgtgctggcactgggtatagagaatcaacgggagattttagttccatgtattgtcagcgatgcacctatacagaaattcactatcatctccttgatgtagatctgaaatcgcctggcatcggttctgaaacaacaccctgaaactggcatttcccgcgacgcccactgctgtaggtggtgggtgtcgctccgaatcgtgacaccagcccgacgcagctttcagaaccactttcagctgaatcgctgttaccttgtgtgcagctccactctatgtgacgccctacgcattgtccgagtgaaatccgtgggcatccaagagtcttccgcccgcaatattccgtttacagcaactgtatgcgtcgcgctagcacgggtggattgctgtaacctggcgatgcacgcgcttgcgagtactgaaaagaccaccatctgatggaatcctcgatgtccaacgctgcgtcttgaactccggcggcactcccgatgaacgaaaaacctcgcccgcagcgttccggcgtcgagtgcttcctgagctgtcgactggacgatgtgtctagatacaaatagattcgatcattcgggaggggaagcgtgcgaggtgatgcttctctcgattattatactacggttggacaggtgatgggctaactagagaaataaatgctcttgagagttaaacttgtctatcttcctgtccggaaagtatgcgtggccttggaccaactgcatgtgcatgctcacacccatgcccgtgcctaacttaatcgggcaaaaactgcgtctcgttggtgcactgggagtgaactgaccctgtaaaaattaaaaaaaggacaattcagagggtttgaaacttcgctgatgaggcaattcttccatggatacaccgacgacttcctaacatggctgtctgttgctcccgatgcagctggctgttgcaactgcaacagtgctagcgtctgcagaccttcgcacgtctgttatcgccgatttcctctctgtgaattcggctctatcgggattggatctctctgacgcctggaatcgcagtagttacctcctagtgtaggtcttggtctaccttcacccacatttttctgttcttttcctccacttctactccgatgtggctggctggtaaaggcgaagtgggtcgtatccaaactagtttccctcaaaatggggcaatttaccgaggtgaaagctacagatatctactagttgatcggaccagctgtctagcacaggaaatagcgaaagacacgacatgcccgagagagttgtacaccgtctaatcgtcaatcaatgggggcagggtcaagcagcctttctactttgttggaatcgctcaaagtgactgaagaattttcatcggttcactaattttggttcctagatccgaaaccagttgaccgaggagcactctccacacgtggtcgaacggagaagcccacgggaaccaga

SEQ ID NO: 2699 - DNA, 4851 bp, Toxoplasma gondii
  source 1..4851: mol_type = genomic DNA
ctttcttctgcgctcacctgcccactgtgtagatcgtaaacgcgtccttcgcaaacactcgcagctccagtcgcgcctcctacgcttccgcactttcttcggcgcctgccgcccacgcgagtctccccagccgtctccatcacggccgcggttccgatcgtacacgccatgcgccctgtctcggtgtggatgcggcaggagagcagagtggcgcttcccctggcgaatcgcgaaagctcgtggacaggtggcctggaacacgcgctcaggggtcgcatgcatgcaggggtcgagggcatcgagcagcccctatctcctctgtgtttctggctgccttccgcgtgggcagatctgctcgggaggccaccctggggcaaggaaaactccttccaagtccgttcgcttcccttctcgcggccctggtctccaggcgtgtctccgaagcctccgtcggcggcgaggagtctggccttgcgcctgctctcggatctgtcgcctggaccttcttcgctgtccggcacaggatttagggccggctctagagcgaagggagggggtgagctgcagcttcggggtcgctcccgttcgttcatggcctcaactggagacagcgagggcgactcagggaacccaggacacggtttccggccgctgccactcggcttcttgctccttgtctttccgcgtcgcacgttcgccccttgactccccgcggcacaggcgctgagacctatcgcctggcctgagaaggcttcggaggagctgctcaagccgcgcgcgctgccgaagtccgccgcttctctgcttccgagagaccccgccccagaggtccggttctttacgttgtttggcgcacagcctgtttggttccagaggtagatttcgtacgagtcgaggtcggagatcgttcgttcacgggatttcgaggccggggccaataccggcgtaagcgccggtgagttcagcaacgtggagtggacatccggttgagcgcggggccctagcgacggagacagagcctgagaccgactctgtctttccttcagtctggttggctccttctcctgacgggctgagagcggggcgctgcagctcttggcgtgctcgtagaccgctaccctgtccgccgaggcggtgaagaagcacgaccgttgctcgagaaccgcgtcgagaccttcgtggacagagaagaatcggggctcgaaggtgaagcccacggaagcggggaactcttgctcgtcgttcaggtccattcgtccttctccccaggcttctccaaactcttctttcgcggaaacgccgcgacgcgcgctgccgccagatcgtctgcgggtcgacacgggtgcctcaccgaaactggctctgaaattgtcatctctctgtacctcagcgccgcaaaatccagggccttggctgcgggtccccgacaagtcgcgtgcggagtcttccacgagatcaaaacatggtggcggatggtgccttagagcctcttgagggtccgacagttcgccttgcgtgatggcgaacgggggtaaacgcgaacggcttgtagaacgctcgcgggggacatccgggctgactggaccgacctcaccattgcatggcccacacgcaagttccgagacttccctggctgtcgaccccgctcgcgacgcccggcgctccgaaacaaacgacgagcgccgcgaacgccgccgctgcagttccgcggaaaaaactgactgaaccgcgcggcacgaacagagcggcgactggtaagacggatgcagagccacggaaagcagcgagtggtcgctgcttgggacttggaacctctggcacctcccggttgcccagttgtggagtgtccggacactccagaggaactgcctccgccacaggccgctgtgcggtccgagacccagtatcagcggcggcgtacttggcggccagccttcgatctcgaggtttcccgttatgaatggcgatttcggcgttcgtcccaggaggtgcacaggtaggccattttcaagaaacgaactccgaaagaaatcgccttctgcacgcagctcggcactcgatccaggacagcctgaacctcgtggcggcaccgagtcagcgccagacgcggcgttggacggctttgaatctcgagcagatctcgcagctaaatccgcatctcggcagcgaggagtgactgtctcaccggccgctccactcggtttccgcgaagccccgccgtctggggactcgcagccggcgtcctccactttgaggggttgcgagcaaggcaggacatctggcggcacttgtgtgtgaggccaaaagtggaattgccgatctagccaccaggtgtaccagagcggatcgagagaggcgacagtcatggcgcctctgcatacgggtgagacagcagctagagcagccgcctcgcgcgggccgcaataggccagaacgtaccggagcacatcttcgctgagaagtacatccagcgcagaccagcgaggtctcgccttctccgttttctctttttctcccaaaccgaaccaagcgcagtccggcggatttggtagctgtgcgcgcaccaagtgagagtctccagcgcgacgcaggttccgcgggggagtcgagatcgcccggtgcagggtgctcgaacttcgcgtgcggctcgccaggccgtgtctgcatgcgtcgagttgtgcatctgacaagagggaagtgacacggggagacaccaaggcggcgcggcagagcgttccccctgccgcctcgtcttcactcttcgcccctcgaggcgaaagattttcatcggagacagacgcgggaggcgggcaccggaaagccaatgcatgcagtggagcagacaggaactctctgccgaaacgatctggagactctgacgcagcgaggctggaggaaatgaaacttcgctgccacggcattgggaggcagcgccggtctcagtgaggcggcgacgagggggaaggccagaggcgatgcgacactcaaaaaaaaaacagctgctcctttagctctacagaagcacgcgtggtgaagaaaagacactgagaaaggaagaggagaagctaaccggcatttacacacaagagttggagtagctgtagatgaatggtcggcgacacttgcaggacggggaacaaagggttgcctggctgcgtgggatccagtgagtgactctctggggtctttcccagaaaaccgtgttctacatactcttgctacgtctagcatacagcaaggccgcggaagcattccccgtctcaagaaggaaagactttcgcacactcgggcaaggtggagcgaaactgacgggcgagtggcttcgtttttcaacgaccattattctcggtgtgaacgacggatggtcggtgtgctcgctggtgcagggcatgctggtgacaggatcagcggggttttggacaattcgaggtcgcgcagagaagcgaggagacaaacggtggtgaagatgttgacgagagaaggaacggaagaggaactgacggctagacaaagcgagaatgacggtttgcacgagcactgacgacccggaaagagacggctggggatcgtcagtgcaccgaagacttcggtttcgtcgcaaacgcgaaaactgggaatgtggcgaatgttctaaacgacgctcatttaccagacggaatatactttcacgaaaaacgacctctgttgctggaggcacctaggcgagaaagcgtgaagacaaagcgcggacggcgagagggcgtctgtggcatactttcggtggcgtcggaccagtgaaaagcctacacacgggacttgtgtaaggaaacgggaggtacacacagaaaaggatcgcaagcaagcaactcattgtgcaagaacctttagaacaggctcttctatcctcgtctccctgcccctgtccctccgcttctgagaaaaggtgtcttgcggcggtttctccgtacgacaactgagagctgcctctccacagtcttgtttgggataattcgcccacgatgtgacacatgcaggcgtttggacggttcctgtgcgaaattcaggactcgatctgtcggatgtgctctctcagatgcagcgccgagtcttccgctgacacagacgccacacgcaaaatggcgagacaccggcacccaggctccactcgagtgcttgctgctcatcccgccgtgctcgagaaggcgtcttctctccatgtcgacaacttttgtcggaacatgtatcctctaccatccgttgaatcaaggactgaacgctgtcgtacatctttgtaaatgcgtgttttcgattcgtcacggtcaccccgacttttgtcccgaccaaacccacttgctgcacagttgcacaccgaacagtcggcgccgtttcagtcccagcacttttgttctcgtctccagagacacactggagagaatctactgcatatttcttgtcacgttgcgtgtccgtcgtggcgccatttcttgaaacaggcatcttgaggcaaatctggacttcacgcggatctcagcgatagtgtgcggtgcacgtacggttcctcacaggggtggggattttcgcggccccgtgcacacctttccagcgcactttatcgtcttgatcgtgtaaagatgctttctccactgagcgaagagtaggttgttgagcctctggagctcgattcaggtgcctcgtagaccctctattctctccggttcagaacggctgttcgttttcctctttcgtccctacacgggaggtctttgtgaaaccagtgacacttggcggcgctggactctgaaagacgtcagcctgacgaactcagctgcctggcaactcctctttctccgacactgctgtgtagtgagtcca

SEQ ID NO: 2700 - DNA, 1650 bp, Toxoplasma gondii
  source 1..1650: mol_type = genomic DNA
gacaccctggttgcagtggacgaggacgtttccactctcgcggattcggacgcgctccatgagctcccagaaacgctcaaagtgccgcgcgaggcgttccgtcccgttgtccaccatgtccaggcggtggtactccagaggcctgaaggcccccggagccacgcagtcccccaggggcgaggcccgcccggggccgcgggccgagagggcctgccgagggtggtggtagttcgggacgccgccgctcgcaacctcaggggtgcagttgatcacgtacgcgatttgccgctgccgcagcagcggcaagttctttgccaagtctttgtccccgacaaaaatccacgagaaggaacggaaatccagaggagggtacagcgaaatgcgcgcacgcggaggcgacactgccatcgcgcccctgcggaaagcggttcggcgggtggggcagaggcaccttcgacaaggtctgaagggggaaggagctgggtcgagtgaacgactgttttgcgacatacaagaggaaagagactgggtggcgaggagagggtgagaaaaggcaggcgtggatggtgtcggaatggattttgggaggtgatagacaaaaaatgcaacggggaacaactgtaagacgggggaaaagggggtttgaaagagacagacggaagagaggggccgaagaaacagaagagacacgcgccagagaagaagggggcgggagacaggagattaaacggttgaactcgacgcgttcaacccagcgcgtctggcataattgaaggcgaacagaaacacctgctgcagactcaatctctgtcgttaagtatgtggcttttccgcgacgacgcggagagcagcgatacggacaaaaaggcctcggcttcctcgcacgatggaaaagaatctggcgaagggaaacgcacgaacggcgcagcgcgacaggtcccagtaagtttgccttttttgaaacgcgacgggcctaagaactccgaagctggccgtgggtaagggacgagactggcaagaaaaaaggtacagacaaggcgaatcggtggatgggtcagaagcaactcgtgaaagagacgtttcgccacgggtcagtccagtctctcaagcaaaaacggggaacgcggaggaaggggcgccgggttcagggagagacacgcgtcaagagaagccgacgcgacagagaggtccgttttccagaaaaagaaaagttaaactggagtaagccgcgtttttgtgcgtcatgtggcaggcgttgactctgtcgtcgacgtccaccagctcacgcatgcactcggttttttcacgaaaagaagtcttgcccctggccaagccttccacgcaggcttcctcgttcggccgcccttaagttcgcctatcctctacgattctttccccggcagattttgcgtttttccactcgtaaaaaccgttcaacaaccctcaacttgtttcccgagaggaccgcaagtcagtcgtgcggtgtctgtacacccgaacatctcctgggcgtatcttgccggagccgactggggcacccccgcggcatcgcacaagtctgagtttgattttccgcgtttttcgtgcctgcgccttcgcgtctcttcgatttcctctttcttgtttttttcccactaatcgccacgacca

SEQ ID NO: 2701 - DNA, 2427 bp, Toxoplasma gondii
  source 1..2427: mol_type = genomic DNA
atgcatgcagctgtcggttgacaaatgctcaaagactgtaagggaggtcgatgtatacgtgacgaatgggggaggaacggggacggggcaacgcggaggcgagaggaggaagagacaagctggaaggctgaaggggcaatgcaactgctattgaagagccacgaagagccagggactgtacagactgcagcagagcgagaggcaacgagacacgcatgtgcgctgcgccagcggagtgtacgtacacaacgccgcagacaacaaaggggcccaactgtgggagggcgtcagcgctgtcgcgccagtcacaagcatcttcgcctgcgtgctcagaagcgagggagagaacagagagcctagaacgttggctgggaagacgagagttcagtgtccgtttttctgtgtcctaccgtgaggagcaaagaggacattcactcattcaccaaacaggagaacaagcagaaaagccttacttcttccgctccttgttgccgaggagactgagggtccccagtgcagctttctttctgaacatgatgcaagtctaggatgctattctgaagacgacgaagacttccgccagctaactcgcgcagcgtcgagtgtcgccgcagacacagaagcaagttgccgcgaaaggcacagagggagcgacgcctggaagccaacaggggcgtggacagaaaggacgagcccaggacggagaccaatcaaggtcctccgggaaggacaagtggaggcgctcaaagaaaccgaaggacgaggcttcactccgaggcgaggagaaagacacgaggaagctgccagaaaaggaagaggacaaggaggacgaggagggagatgcgcgcgctggtcagggaaaagtcgagagaatgtcgagatgctttccagcgaaggagcgggcggcgcgagcggagacgaaagtgacgcagaactggcagagtgagcaaggggactcacttccttcaactcccccgcttctcgcctgcaaagaaacgaagcctgaggccgctctcagaacgggagctcggcgcaggaccccgacaggagacaagctgaggagacacttgctttctcgagtgacttcgcgtgagagttccttctgcctctctcgtgttgtctcgtaaacgcatcgtcgggaccgacaaacgcgaaaccgccttctcagatggcttctcggcgtttggtcagcagccaacttcgggtgtacatacacccgaggaagctaccctgtcgagctctgcagtgtgcatacaccgccaggcgtcaaggtcagcttcgcggagcaggcggggaaccgcagaagatctgcgcttctggcaacgagaggcagcgagaggcagcgagaggcagcgagaggcgcgttgtctctggaagctcatgaggcggagaggcacgaggcggacgaaatctcagttcagtgtcaagacagcttgttttgcgaatcctgtttccgcggaagcgtcgacgcttccccgcgacctcgaccaggccggcggcccatctgtcgcgaattcgggagagtttcggcgcagtcgcagcacggagacagcttcccttcctgagcgtgaaaagtcggagtttcttggccgccaaatgcacacgcgagcgccgctgcatgcgtttcgggacgaaagcctccccggcggcgaaaggagaaacaggtggggcacgcctcgagagcgacgaggagggccgcagtcttccctcggcaggtctctctctcttcgattttctctttttctcttttttctttgcttcgcatccgtcgacctacgtctctctcccacacgtccggagaacaggcgaaagccgcgcaggcgtctctctcagtccttctgcggtaaaaagcgcaagcggtagtctcacggtgctcgcgtgtctctttcaccagttcacgagatctcttgcacaatttccgagtttccaacgaacaatagaggtttttcgtctctgggtagtctccaagagacgccagactttctctctctccacccgtttccgcggtgcagtctccctgcccctactgcttcgcttggtttgtgccgcttccggaacggacgtgagcactttgcttcctcgctttcgatttttcttcttttgctgctctcgatgttttcgctcaacctctgtctctttcagtggacgcacccttccggttctcggccgcttccgtagatcgtgccctctgcgcttgtccggcgtctgctttggctggcgtttttccctgcgctctctctctttttcgtcgctgtgtggtcgtcccctccagtggtacgctctccccgtctttcaacgcaagtccggcgcaggtgtgtttaccgcgaaattcgctgttttccccaaaccccagccttccgtttcctccgtcagtccgactcctgtttcttctctctcgcctctcttcacttcttcgtttcgacaaca

SEQ ID NO: 2702 - DNA, 3287 bp, Toxoplasma gondii
  source 1..3287: mol_type = genomic DNA
ggcctcacagacctcctctgcgatagtacagaacgaaagggagcatccgtcgcctcttggctctgaggagtgttactgcgaacttctagggactgtcagtcgcgcagtcgggtcactgccgaagggggcattgctgagtcctggatcctttgatatagtaatatgcttttcagttacgaagtggattcatcttcatcatggagactgtggcattctgctgcttttctcgcggcttcacgctctgttgaagcccgacggaatccttcttctcgagcctcaggactgggcttcgtatcgtcgcgcaagacggctatcttccgacttcaagcagcagctgcaccatattcgtttgcctccgaagacgtttacttccattcttaccgcaaacagtggcagcagaaaatcgcagtgctcgtcttgtgtgatctgtgacgcgtggtccaacgatgccaagacagcggcttcaacggagttgtctgcggtgacagacaagcaatgtgaacaatatgagccgaagtctgagacagcagagaacggttgccagtgtgcctgtcgcatcgtatcttctctgattccaccgtgtgatggatcatcgcaaggtttgtcggctaaaaaacctgtccagccgtttgctctcatgtgttcattaaacccgtggaccaatgacgtccgaatcagcaaacaccagcaaagtggtgcttacggggggacgatgtgggatgagtcgcgagctgccgcggacggaagagcggcgccccgtccccatcagttgtcagtggatgaagtatgcaaacatggtaatgttactgccagaaagagcgacgaggggtatttggatggtgtcttcgatgatgatcaacggtgttcacaggcgcctgctaatcacgttttccagaaaggttcagaggtcgtgaaatctgctgaacccaaaatatcagacgcgaaagctgtacgcgaacccaagggtagactttcagataggcgtatccttgtgttacggaagagcagcagttgtttctccgtgtgctgctgcaccttgaaaatgttgaccagccgtgctgtgggacgttgcggacccaaaccaatcaattcacaaagccaatcttgactgtgccgtcgttcccgaggacgaaaacagtttaagggttatggtaataccggtttggacgcggtgattgtttcttgaaaaatcgtagctatacatttttcaatatgagcgcatcaaagcctgtttgtttcccagcattcgtgataaacgtgagctgatacggaaacagtcctaatgttgccatgtagcgggtcgagtttgcttttcctcgagacgtcgcctctgctcggctgcctgctaacccaatctttgctgctacttcgccctcccagcgaccttgtcaaatctttgcgcgtagttagctcactgagtactgagagaggggcgctacgattggagaacgttcagtgtatatgtgagtctattccgggcgcgcctggtactttatcggtgtgctcacatctagtagtctcataatttttgtatctgtgttgcagaaagcgctggagttcgtgggtgttttttcgtggcttcttctctgcaaacagcaggcaacgcctttgtggcgtttgcctgacaaggcagtcatgagcctacatggctgccgaccaggaagctcgccgcacgcaaggatgcggtgacacggacataggtttcgaccaccacagtttacagcgtgccagcgaacgggttcactaaacaacacttcacttgctggaagctgcggagtcattaggataaagataggctgacgggcccacaagcaggctgcaatacagacaagcctgtggcgcgtctgtctgggaacctcagtcagagccaaacccgagaaaaaaagcgacagcgcagtgccggactctgttcacagagttacactcaatgaatttctgcgaaaacgcgaatgcccaggtggctccactgttgctcagatcaaaggagtccaggaaagacgcaacaaaatcagaagtcgcgctagttcttcatcaaatgaattccgccccccctccctacaaaaactgtactggtacaaataagctaccatatgctccgcgactcactgtcgttaacagtcttaaagccatagccagacagcttactatgccaacatagaacatgtagattttcacgtgaaacgagttcatgacatgggtgtctaaatttaagtctctattttgcgctggcctctcttcctctcgccctaggacaggaggtgttcaggctgttcctctctttttagatcccgcactactaccgtagccccaaaacaaccacgcgcagttccgcgtgactccaggccactgaaactaagatgttcgtcggattacaaggtatagcttcactctcgggggctcacatttcggcaaatgtcacttttctgacctcaggtacccaaccttttatatttctcctcttataatagtagttccggttctctgtttgatgaccagatgcagattggaccatgaaacccacatgatgtatcgagccatgtacatgttcgatgtggtcgcgtgaacagtgcgccctttgaccaggcaccacgtacatttttctcatgaatgacgacagtgtgagggaaataccatgagaagacaggacagcttggggttctagcagacacactgactgataaacgtcgtcacaaaacaatgaggggattcataggggaacacatgaacatacgaaaactgcagaatcttggcacctaactacggtgcagacggagggttgaatgtgaactaggagtcattccttgcagccgtcggcgcccctctcgtgcagatctatttttatatgggctaccattctgtgtgttcgttttcaccgggggtcctagtcaagagacgacaatgcccatgatttcggtgttttttacttaggttgttttgctcaaatgttcgattccatcccaaacacaacaaataatagaagattccagaatcgaacgacggttttattatgttccgtactggcctagaatttgcaagtataccaaatgcaggcggaggtcttggtgctcgttccctacttgcgtgctgccgttcgttgcatgcatgcgtagcccaaccgcgtgcgtcggcacctgaaagacgactgtcagactgcccaacaaaactcccgaaagaccataattccagaggttttaacttttaaggaactgaggctactacgtcagtgtacacgcatctcgtcaatggggattttcatgcgacagcctctgcgcactgactgggatgca

SEQ ID NO: 2703 - DNA, 3697 bp, Toxoplasma gondii
  source 1..3697: mol_type = genomic DNA
ccaagcatcacgcttactgcgaattcccttcccacttaccctgagacgcgggattccaccgaagggcagcggctggaggttctcccagaattcgtcgctttccacttcgagaagcgccaggtcggcttcgtgagccgtggccacaactctcgccagaaatttcttggcatttcttaagcagcacaaaacacgaaaggtgaactgtttataaatcggtgctgcagcgatgctgtcgcctgtttgccgaaaggtgcccaagacgttctcttttggttgtatgcatctcaaaactaatttttgtgcgagttgaatggatacagccgacacaccagcacgacaaagactccctttagctccagccgacaaatacgaaactgtcgagaaagatctgaacagctaaataattgtggttagacacatacgccgcagaatcacaaagcacacgcagacatgaatacaacgatataccgtcaattagatatacgcacctgcaatatatatatatatatatatacgtagttgtgtgactcggagaatggcaaaacgaaactgatggtttggcgcgtatctttcgttgcttccctatctctcaggaggtcgcaaaatatcagagcgtcctggcggaaagcacttcatgcgacagagtggccatgagaacggcaaggaagggccggtactattttgtttaaagtgcctcgaacttacccatgtttcctaaccagaactcgggttgtttcaccaacgacgtggccattcgtcaagattcgcttgccttcaacgacgaagcctgacctgagaataccggcaagaaaaagagcagatcccttggtttatctctcgtgcctgcagtggtccttctcctgtccaattcgacgatcacgtcaagcaagaagggccatttccagcagtttcttgagtttctgactatgacggtgaacctgaactcaacctgaatgtcaattcgttgacagcttatgactcgaaaggtgttcagtggatgggcgatcatttgggtgtataatatgatcttcttaagtactatcagtggggctattgcacaagcagcatacctcttatacggtagattcgctactctcttacacgttactaccggactggttctatgcatatagtaaacaaacaccgtttgtgactgaagttccgtcacctaactaaaagacatcacaattttagatcggttggtgcagaataacaaacttaacactaattaattgagttaaaatcacttttagatgtcttaagcagtccagtggaatggtggtgtacggtgggaatagagaaattggttgtctgtatgtcctaactggagtcatattcagcaccctacgtatgacaatggcccttcgctccacacagctgaggcagtccgccaacttttacccacgcatacattcgcgtccagtgagctgtttgaaatctctcaaggcagggccgccgcgcggaaatgcttgtgcagcaccaatgtgcaaggacgtcgataaaacgttaggttgtgcaaatctgtctgcggctgctacagctgaaaaatgcatgtctctactttactaacttcacagtgtccttttgcccacactttttcctgagatttcctcccttgtgttccgtcttgcctacccggaggcatctttcggagcctgcatctgccaaggtgaaaagtagtcaggcattgtgatatcgacgaaaattttcacaacgctgctcagggaagaagtcaacagggcatgccggtccttcgcagttgtttgcttctgggaagcggcagcggctgcaagggtctttgcgagggtatttcctccctgcgaattcacaccctctgcagcagccgccgccagttccgttggttggcctgccgcgctgacttggagcagagaagaacctactagcatctccccggtgacttcttctgtaatttctctctcaggtggcaatggctctgcaccatgtgctgatgtagcaacagcggcggggaaagtggatacgaagccatcctcgtgcagcacagtagcatcctcgcgaaggtctcgagaaggttcaggagttaacagagacgaagcctccgcaccatgagcttttagagaaactacgctgtcactggaaatccagctggacacttccaaagccacaaacagtgacagaaggagcaacatcaccccagtccgcgcacgcggccgtcgactccggtggaacgccgccatcgggataggtgacggacgcaacagaagccccaggaacagtgcagatgccgcgcactacagggctttgtgaagctgtgtctcgcagcctccgcaaaatacagaaggaaaatgataatgacactctcccatgggaaactggaggactgcaaagaccaggcagcactattcggctgctgccagtgccgcgaacctaacggggtagaagacactggaagcgaagcagatagtgagacaagaagagaaggctagatgccttgggtgtccctttgcagcgagagcggcaacagactgtggtcacttccacagagaaatagtttctacctgtgatgtagcctcttgtctcaaatggccgcgaaaaagtaacctcgtgttcacccagccagtatagacagtgaatcgctcttaaccggctagccaccctactgatcttcgtttacggtgaacattggcctcttccgcggctaaacttctcggatatcaagtggtagcaatcttctcggtcatgtgggaaggaacgaaaactccagcacatctcagatcctagaaaaaaggggctttctcggtgccatgttgttctataaagcggtgccggaaacgactgccccgcatggcaggctaccaattgagacatctactcacacatgcactttgtctgcttgggtgctggcgaacacaccgccacgctttctagcgtaccgttcccacctcgtttgaaaccttttctcatctactggcgtttcgcgaacattgagcttcgtgtagcatgaagtctttgggaaaatacacggggggatgttaggcatccgcgtcgtcttcacagtcattacccccgccatctttccggcaataacgagggaattgcggtcttccttcttgggaagcaaagtagcgaagtatttaatatagtccttatctacattttttcagaggcctctggggctgtggtcttcgggagtgtcctaccagtcgctggtctctctgccgcttctcgtgggacttctgccgccgaatgcacacagagatccaacggcacttgccgttttttttgttcgaagaattccccattacggagcttgagttttttggagacgcgtcttcgtcatttccgtttaacagaacgcaagaatctcccttacgtatctgtcgcgcatgcaggaaacacaccacggacgactaatcactacccagtgcgtgtgcttcccttcctgtggtgatttttgtctttttccgatgcgttactcgacatattcggtgacactaaaactcctttgttgtatcgcgtgccactgaaggcttttctattgtcaagttgccttttgatcgctcgcaattctcgccgtgtcgtggattgattgcttcgggagagaaacccacaaaaggccaaactcacgagcaaggacagttgacattccgctgtaagagaagcgagaccgctcctctgacttttccatgttgagtggctgttgcgaagacctaggaaa

SEQ ID NO: 2704 - DNA, 2093 bp, Toxoplasma gondii
  source 1..2093: mol_type = genomic DNA
gtagcaggcgatgttcagcgacggaccgtggagttgcgtgacgaagcgattgcgtcgaacgatccacgcagaagcgggagtcggagcagaggcggaaggcggcgaagaagcgaaggcagacgacgagttcatgcgtctctgttccgcggtcctcaccttgcttagcggcgaccctgacgcgaggagatcagaaaccttcgcgttgtagagacgagagagaaagaagaacgcagctgcgtcgcgagaaatactcggaacgccgtgaagcaacactcggggcggagcgagcgcggggcggtcgcggtcaagtgtacgtacacccgacacagacaccgcctcttccggcgcgggcgcctctcggctgatttcgggagttcttcggtgtctcgttgcaagctgtctcaactggaagcgggagcgtctttggctggggaaggcggaaaggtgaggcgcatgcagacggacagcgaggccggcgaagagcgactttgtctcctctccgtcttccgaagggccagactgagggcaggcttccccctctgcttcttcgtcttcttcctcagctcccccgcgaagaagcaaactctcgccgtcctcgccagaggcgcagcagggagaggaagaagctggcatttccccagcctccagccgcccgcgttcctctgcctctgccgaggacgacgaagaaaaccgcggagccggactggagcagagaggagaaagagaagccgaggaagagcagagagaagtcgaggaagagcagagagaaggcgaagaagaggaaaaggaagatgtcaagggcggagaagatgaagagggagaagctgaggacggaggagaagcgataggaacgggagaagaagatcggccatttctgtagagccgtttgcgtttgcgtggaggagacggcgaggaagaagagggagacacctcgccgggaccgcggcgtctctccgtcattgcggacagctcaacgagtctttcttgccgcgcgcaagacaagaaagacgacgaggaaagagaaggtgaacaaggagaaggcgaacaaggagaaggctggaggactctcagtgcggttctttcaactggattcgcttgagaacctggagttcaacaggcgcgcagagaccgactaggctggcgaggagctcccggcgcgcatcgacggagctctgcgaaacgaggaggtcatgcacaagcggggaacgacgacgcgaggcagtgggcggagagaaagcgaagacagttgcctgcaactagagatcacaagatacgcgcatccatgccaattctctgtaaatcgaagcgggggaacgtatcgccctcctcagggagaagacacgcaaaggggggagggacctctccggacgcaagtgcgagagcagccgcaggagcggaacgaaaaggcgagagactgaggcctccttcagatcgccagaacctccatcacctctccggcaaaggcgcgacagttctcttcattcttatactctctcggcttttcctctttttctggaaaccttcgttcgccgcggcgccttagcagatgcacacccggaaaaagcgaaggcgccgctgtgcgagcaccgcggtccagacctgagaaaagagacttctttttcgcggcgcagctgtacgtacactggaacccccgggcgcaggggggagacgagcggacgcgagaaggcggagtttcgcggctcttcggcgttttctgaaatttcaagagagtcgacaccttgctcaaccttcgatctttgtcgctagaggagtccaactcgagccaggaaatccaggttttctgcttatctctcacccgcgaaaaatcgccgttttgcgctctgtgggatggtgcccagctgggcatgcaaagtcttgaacatgtcgatttgagtctcgacttcccaaagtttttagagaatctttcctcaaagaaaggccaaaaccgacgctctgcaggaaaggcgacttgccgatctctccggccgactgcgagagctgcagggcgctgtctctcgtccttcttctgaatccgtccgccgacgcttctccgcgctctctccggatctctgaaatttacctctttgccagca

SEQ ID NO: 2705 - DNA, 1842 bp, Toxoplasma gondii
  source 1..1842: mol_type = genomic DNA
ttggcttccctgctgaatcatgaagtctcttctcgcacaaacagtcccgcctttcggctgtttctctccggggaaggacacgaattccaccgttagcctgactatagaaaaggccctttcaagctgtgtacttttccagagcacgagctcctactgctttcgcttagttccacgaaaaaatcagtgatcgtcgaggcaacaaagcttccctttatggacgacggtttccgattgggtccattttgcggacgcttccacagactcaacttactcgcaacacgcgacaaaacacaatcaaagcatgcatgggcagtcccagcggtagcagttaaactatggtagagtcgagtactatgaaagcaggccaggcgaaaaggcgttttcgttcgacgcaaaaatatcgacatctatcggccagtttctgcagatgtctggcacgcgcctttggggctacgtgagcatgtgggtcttccgagaatcacctgcttgccgacggctgcgtctgacgggcgacttctcctccagcctttttgtgttccagcaaaacatccggcgaacacagtgaggtgcttggccactttgaatgggttcgatgtctgcaacattttccgcgttgaagctatgctcatgtcacgaaaaatctcagataattctgattctctctgtctctatcacgcagtcacgtttgctctccgccgctgactccttcagccgatcacatccacacattctcttcctctttcgagggcttagagacgcacatttcttcgtaaacacttctgtttgtgctcttccaaaagaggaaacgcctgtcgtctcatccctgctgcatatgctttcacagctgtccagactgaaagacagaagcgaaactcgaacgtctctccttctcccaccagcgacaacactgccttctctctgctaaaatgccatcaggcagatcgacaaagtgaagaccctacaacctagtcattcatctacatatacatagaaagtttcacaagtccggctatgtatatatgcatatatatatatatatatatatatacttttatatcgctcggtaggtagagatgggaggagagatatcaacactaataagagcagcagaacatctcttctttttttcctcgatgaacatgtacggatttttcctttacctgctaccactttcggttctcggggttacgcgaaagattgtgtccgtagaggcctgtttttcttgcccatcgccagtcaacgaacgctttgtgcatgcacccgttgagttcgcccatgcaagtttgtgaaattgttgcatgcagcgaatcctgttttgagcactcgatgcgagagtggggagttccgctccggttttcttatcactcccgcctaaaaaagttgagaaggagagacaaaaaggcgctcttttggttctcttctcctcccgttttgccgtcctaattccttctcctttttccgtttgcggttcttctttccgtatcgtccagcgcgcgaagccgagtctccgcaagaaaaaggtcgctggcacttctttcttcctctcttgccttgcttctcttccgccttttcgttttctggatatcgaagcatcgtcttttcccctttctttcctccgcgtcttcaccgacagtggccgcatgcaagaaggagaactttgaggtcttttggagcgttgcccgtcactgtgaaacgcgttttttcgctgagcatccagacaagagaatcccccgacgcggcagtgcccagatgacacctctccgccgttctaaacgctctgctttttccccgacgtttcttcctttccttgggccttccaggccgcaacagcggcagagagaa

SEQ ID NO: 2706 - DNA, 3064 bp, Toxoplasma gondii
  source 1..3064: mol_type = genomic DNA
tctgaagagacgcgtgtagttgaagagcagcgagtgacaaacgagctggacgacgtcgcggacgacagtcggaccgagcgcctcgactgccagatgcgcctcccgcagcgcgtcgcgctgctccgagtccagcaacgcctcgtccgcgtcctcgacgaacggcgagaagctgctctgctctccggcgcaggttgccccagtggcgaagggattcgagctgcgctcaccgcggaagcgggagaacgcgggggcagcggcgtcctcctcaaagactgcttggtagtcctcgatgagttgctgctgaagggagcgacagagcaggtctttctcgcccagcagaaggccgatccgaggcacgcggtctcggtacggctcgaacgcaccctccaagttcttgatcgcgagaagcagctgcgcgcacgcagcgtactgccgcgtcttccccgcaactcgcagtttgcccagagccgaaaccaccatcaccagcttcttcaacgtcgaaatcgaagtcgtcaggttcttcttcgcgagcgcgagacgctgaagctccgcacagatcttccccacctgccggtcgctcgcctccgcgcgccttgccatcgcctcaaaggtcgacatcaacgccttcacactgcctctcaacgcctccagagacaaagaagaggacgaggaggaagacgaggaggaggacgaggaggaggacgagcgccgagcttgctctcgcacggcgatgagaatgtcttggtcgagcgccctgaggtaggactggagcgaagcgattttcgagtccagcgaggagagcgactctagagtcgaaaactcttcattcagctgctgaatgcaagcctccaaaacctcggaagagggcgcagacgccaaagaaggcagagaagaggagagaggaagagaaggagatgatgagagaggaagaggagagccagaggagacaggcggaggaggagaagaggagacaggcggaggaggagaagaagaagagcgaggcgtcggggaagagtcaggctgagcagagagaggagagacagaggaagggggtgccggcgcagccatcgtggaggaccggacagtgaagagagaggagaggaggaaaaaacctgagaacgcgaaaacgcaagaaggaagagggcgctaccaaaaaggagggacttctcgagttctcgcctcttcagcgaagagaagaaaaaagcgatgtggcgggaagagaccgagatccgaattcggaagatgtgcgagaagggagcgaagccgggtggacagacaccggaaggcgcgcggctggctaagaaagccgcgagcgctttcttatccactttcgcgatttctcctggaaaccgtttttgacatctaggagtcacctgggcaaggctctggaagaaaggcctcgccagtcacaacgcgcgccaacgcggacgcctccgacatgactcctagttgtccacgcaggctagattgagcttcttctagcactcgcgtttgcatgcacacaaataataaattgaataatatatagacatatatacatacaatatatatatatatatttataagtatgtatatatatatatatatatatgtgatgatgtgtatataagaatgttgtatccgtatgtccccgcgcccacggaaagcgtctcgaagaatggtggagaaagccgttgagttggagggcagagagcagaagaaaagagaagaggacgaggtgcaggacggtgagaagaagatttaacttggaaagcggaggctggcgactcacccaacgccccgagagagaagaagacaccgagctgggagacgcgcctttgtcgccgtcactcctgttctccagagtccccctctcccccccaagtctcctcacgcattcgagcggtaacgaactggtttaaaacggcgcgaagctacgaagcgaagaattctgcgctcttgtccccgagaaaagccacaaggctcgggtgcatgcagcgaaaaaggactcgtccaaccgtatcgccatcgtcctctctctcccactggcaggttgttgcgcctgagtctctcttctctcgcaagacaccaggcagagtcgccgcgagaacagaagaaaggagggcgacggggcaaagaggaaaggggataaaaaacggagcagcaggcgagaacagagagagaagaaggagaaagctttttggagaatccgtccagaggcttgtcggcgtgtgtgtcctgttgaacttcgattcgagacctatcagtacgcgcgcgttttttactggtccctggagagcttcgctgccgggctccccttcgatggtttcgcagtcgccgctgaagaaaacgaatttgctggaacagcgaaaggaaggaaaggcggtgggagtcaaaaactttcaaaatctccccgccccctttgcatctgaaaagccaaacgctcgccgcagcctgccttcccgccattcaagaccatccggctgctgggccatggtggtggcgcctcggggcaacgaagattgcgtttttgacatatttttcagttgctcaggcatcgacgagtctcctgctgtttgtacaatgttcgcgttctttaaaaacttggggtctttgctcggaaagctcctcagctcccccagaactagctcgcgcaagctctcctgacatcgcagccagctcagagcccagcgggcacccgagccaggcgagaagaatagagtcgccagttccactactcttctcttctttttatgacttggtcccgctgcagtcgagtccctcccgctctgctcggtctccggctgctcttctttttcttctcgcgttcgttccgcgactccgtcccgctctcccctctcggctttctcctcctttctgcttctttcttcttcttccgcttcatttttgcctctctctgcggtccttcttctacactcctgtgttgctttctctttccttctctgccctcctctccacgctccctcttctcgttttcggccttcttcgtctctcgttgcctcgatccggctcttcccctccgccgcctttcctcgtcgcgcggttgccgtctgctttctcgaga

SEQ ID NO: 2707 - DNA, 5023 bp, Toxoplasma gondii
  source 1..5023: mol_type = genomic DNA
ggttttcttcacacccgttggagtgaatgtgtactcagtgacgtcgtccaacacctgaacagacacgacagcgacacacactctctcgacatcatagccagcacgattgggcggccgttatcaggtttgctgcggccgcagacggcatgctgacaacggcgactgcacttcgattcgcgtaaaggcttctccgatccgaagagcagtgaaaaaagcaactcttcaggcagccggtctaaaaagaaaccgccgcaacagtgacatctgaaatgcggaacagttattgaaaggcgttcgtactccggctgtttctacaccgcggcttcacagaatgggtgtcgagaattgtgccacaagttaggcggtggaaaacaccgcgtgaaagttggaaaagaagcaatacagacgtaccatgttgacgaagtcatcgaaacctcggagggtcccggctaactccttgtcacctttcatgataatccacatccgacttccgatacacttgtccaccagggcgagaggcaagtagctcggacctccgctgacaacgccactcgttgccggggccgacgtcgctttgggggcagctgcgctcatcgtgaaatagatcagttcctcagaaagcgaatggtatggtgtgacgggatggaaagcagatggtggttccaccaaaaagactgtccttcatatgcgctctcgcgttgttttgaagtctggaggccagtttgaaggaacaaaaaatcgacagattccgctcaagactgggcaagttgatagggtccctgtcggttgaaataaaaggcttgccacagtcggagtgacagcttctctctgtcactgcggttttctgcgattcaactggacaggctgcctttcgctttcacggcaggctcaaaagaaagtcgcgacctttcgaatgagttggccaatccgagttcggcgcagaaccgctgaaaacgcgacccctggtggttttttcttcaatgcgttacccgcctcctgccaatcgcatactgcaagaacttccgtcttcctgggtgcttccgcaagcaattccccttcgagattgtgccgaaggcaatgccgtccgagcgatcgttcctggcgcctcacagcaaggacagacaatgcagaggccagagtcgcacgacgcagctgtatgcgaagaaaatattcaggatacggcacgtgaaatcacttcctccttgacagacgcacagagaaacctgaggcaagcgggtcgcacggctgctacaaatgggttttggacaggccacacatgcactgcgattctacagcgcaggacgggagttcctgaagtggtacaaagtcggacgagaagcaacaaacgcaggaactcgagactcgctagaaaaagcaaaagtgccgtaggaactgttgaccgacagctcgtgttgataattcagcgcagagcctccactgaaagtcattttcccgtctgcatgaaaatgaatttgtccgtgcatgcagtggacaggcatctacgaccaccagagggggctgttcctcgatgctcatccattctcttggtgacagaaacacaagaaggaggatgtctcagcttgatttctttccctcatgaatttgagcaacagctgaaacttcagttgctccgctgttcactggttctttcgctggtttgcatccgacagtcgcgagataccgtggagaagtccctgcagtaaacctgagatagccgttattttggttcgaatacgtactgcggcggtgtttttgattacccagtgtaaatgtccttcgatcgcttactgaatgaggtctgttcggtggagcactttgtggctccgggctctgtctgtgctgcaggtggatgtgtggactcaaagagttacggtagccatgaagagttgatcctttccttcaagcttttatggctttcctctgcaagttcgcgccaccggtattgtccccactacatggcagcgataactcgccagtgcacatatagcgcttcccgctgtgtgtaaatgaggggaactctatagcgcagatcgcggtgttccacagcgcgtatcatgcaccgttatgtttgtccctgggcacaaatgcacacgaggaagcttggttggttgtcgatgagatcgatgcagggacgcatcgagtttgttgcttgtcctctcacgtcggaagcgcagcatctccataacgctagtggggaataccggtgtgtcatcccagtgcaccgcccactggtcatatacggagcaacgtcatacgcagatacgctgaaaacctcctcagcctccaccacttgagacacgaaacagatttctggatgtgaaaccgtggttgcttgatttgctcgtgctctatctgtaaacatgggagagatggggctacctggagccggtaaacaaagatgttcaagctataacccagtagtcctcggtttcgtggcggcagcttccgcatcagctcttgccaagggtcggggaaaattcgttagaaagaggaaacacggaatcttgataacggcgctgttgcaaggacacttttcacaccttgaactcgaaccacggttgtaaaggatgcttgaaaaggtaatgtgctcggtccctcacgagaacagcgtcgtgacagtccgacacctgcctattaacgtggcgcagctggtggaagcttcccactgctatgggatgtttctcgcgtttctaactgccaggcatcacgcagtatctatcaaacacaagggatcgtttcaacataccttaaccactaaaggttcttgctcaacaggtccgctccgtcgattctgggtacttctagagaccgtactgtcctaaagcgctattcatttcagcacattggctgtaattctgcaacagcctttggccaaaaggtaaaaggggcttcctcgggcacatttcgttccgtaaacgcaactactatcgattatcaggttggtccgcttcctagaaactacggctagcctcagcatctacacgagaaacaggacgtcgccgcccatcttcaacggcggctgagtttcctctgcgggaacggtgaataaaaaaaagccagataacacttggcaaagatacagtttgcagctttttgtgacaacggtcgcttgaatctctctgtttccgtgtaacgacattccaggactttccgcctttgtcttagctctccgggtcggagctgttttcattatccgtcccgcttgaggtggtcactcgctccgtagctttgaagctgttcatcccgtgcaggctgtagcgataacactggtatctgtaccgcgtagatccacgcagccagccgttctgttacttgtaatgtttctgttcgagtcctcttcgagcccatccctcacgttatcacagggcgacttctctctacacaagcaccgttacaaataacataacgcgcacagcgtgacacaaaagggagtacctctaagtggacagggaaaatgaagagcgatatgtataggtaaaaccacatgaacacgtcaagcgtgccctgcggacccggtggcactcgaaggggcagtccgtggcaaggctccagaacagaaatcgagctttcgctgggggtgatactggtcgcctgatttgcaaaccgcttctgactttgggaaaatgcgtgcgataactgttggtcagccaacttttgcgccagttcgtgtttgagtgtttctgtagaatctggatgaatgtgcagaggctcaaggcagcagggcctcagtttttcactatgccgtgctcccccccataccagtttggcttcaaccgctgatcagtgcaagtttcattgcctggttttaagctgttgctatgaccccaaaacgtcgataaaacgactcctcaagatcaacacatcggctgtgccaagtgtgagcgccagttcctgaaagacaggcactccacgaatatgccggtaccgttcccccgagtttcggcgggtgtatcaacgggtcacctggcggcctgtgacgcgagtggaaaaaacacgccgtatggactttttgtgcagacctaatgggtgccagcaacagcttcgtggttgcatggatgctttgttttaaccagaagatgaactgcgttgtactgtcgctgccttcaactgcatacaaaaaagggtggctgtgtaactacgtccgggacagcgattgctaggggaagtgtcaacagactcatcgggcattctgacagttgagaccaggtaagcgtcgcttctgagaaaaaacgcgactttcgtgccacaaaaaagtcatgcatgcgttccgcaattgagttcttggcatctgaccgccatgctgaatcggcagtgtcgagtgtgcgctttttgtcatgcctgcatgcccggtagttgtagaggtggtcgacggtacgaaagacgattccgtgaaagcatccgaatacagttcccgtgaacagtgttatgaactcctagtgtcactgcgtgttgcccctttctgcagcgttcattgtgagaaccacccagtgttttaaggttgaagaccccggtactctggacttgctagaggggtgtccccgattggaatggaggcgggtgtgattgacgggggcgcgaggtcgctttatcttagcaacaaagcggtgtcgaccatcttatctttctggttcgcgtgtacgattcattcatttctgtattcgtcttcgccagtaagactgcttagagctttgagcaggtttaagcagggaaccatgaagccaggtcgaatcaccgccactgccagggacctgccgtttcctggcccacgcgtttgcgcccgaatccaatcaaatctataatcttcgggcatgtcgaacgacaagcggcttctgcccggcacgcgcagaaacgaaggtgcaggtaacggcggaaggagctgtacacacagccaggctcttcgacgtgctcgctcgctcttttgtagttcggggcgctctggcgattcgccgggaatattcccagcgtttcagagctctcttcgggcggatgcctgtgccttcccctttgtagtttgtcgccaaaa

SEQ ID NO: 2708 - DNA, 1743 bp, Toxoplasma gondii
  source 1..1743: mol_type = genomic DNA
aaacatatcgctgacgacgttcttttgttaatatcctcattctgcatgcgagtagacacaattttaaaagtggattcatctactatccatctactacccacaactcaccttgttgtagaaaaaaatcttctcggcggcagcattaagttccttgagtcgcgcgacgtaagctccgcggtcgaaaactccagcaaagagatcttctacctcttcgtcacccctcattcttgcggtggccctcttcgtgtcgtcgagtgctggcagatgtgcagacgataaaacaaccgagatagattttgaaagagacgacacggtagacggcttaaaaagccagaagacgtacgcggataaagcaattgtcccgataatgcaactgagaggagagggaggtgtaacggagtgtacagtattgggaaaggaacaaatcaagaatgcagagagcagacgaaagcaaagcacgcggcaggacagtttgaaacccagagagagagatgaaagactggacgaaggcatataagaacgcgaaaacgtagacggactgtaaaggaaaatcttgccttgatctccttggcaaactggggtgacaaacacctttgttttgcaacgtaaacgttgggtatcttgcaaggactatattcagttgctgcgttccgctgcccacacagaagggcgcaaacaaaagtgatgacgccacgagacagaagacggaaagaatggggaaacagagaagagagaaatctgtttggtggaaaacaccgccctggaaagtacgatttttaccgcgctcccgctgcgtttacaacggacgttcgctcttagtagtacccgttcatgcacagtggtatttcgttactccccgttacttctggcaaatgcagctgaggaaaaaaggaactgtccttttggtgttccttgacgctactatagatgttctcacacggacatttaaacgaaacttcattctgattttcagcaagatacgctcccctgttagacgttttcaagattgattcccggtcagactttctccgtgagagcgactcagcgatgcatgcatgcatgcaaaaacgcgcttctccgtagtattgacaagccttcagaagttcccttgttattccgtagaaaaagaccaagtcgtgtcgtttcttgtcaccttctttcagtgaaaccggcgcgtgccgcgcctggatggaatttgtttgtctttctttcaacgcggtgcgtctcacagacggaccgaaaccgccaggaacccaggtttgctgcgtttcttcaccgaaggtgaggcaagctcgtctgaacatctttaaccgcatgtaggattgccggttgtttgcaacttcgccgtcttcccgaccgtacttgcagctcctgagccctggcgctccttacttgtgacctgctgctcaagcgccggtacaaggtttagtgtaaaccgaccgagtttgcgtcgcgagttttccagtttaccaccattgcttccttttccttgtccagtcctgaaatggcaagtgaagagggcagggacacggtgttgccgagccatgctctttctggatgtccgtcgccgcctgacgcactgcctctctcctgcggcacttgcatcgcatgaatccctcgccggtcgagacgtctaacagttttcctctgcagacttggaaacacctaagcatttgcgtagtttttcacagcgccttctgacacattgcgacgttagccctcgacgctacgctttcgccacaa

SEQ ID NO: 2709 - DNA, 1961 bp, Toxoplasma gondii
  source 1..1961: mol_type = genomic DNA
tcaagtgccgagggtctttaaccaggcatacaaagtggaaacggcgccgtgggctgtagcctgtgtagggccactttaattttggcagttcaacgatttgcaggtgcgtggatttttgaaagcagtggcgtcagcagtatttccttttttccaaaccgttttgagagatcgttaaaagttttcagaccataggaccagcagaacatacgaagacaagtcagctgccagtcatcttgcggatggcaggacagcaattcggtgcactcgtttgagaggcttgcgtttagctaaagtgttggatttcaatatcctacggcattctccttaaaggttcaccgagactgttgcaggaagtcagataaatcgacactgattcatgatagtgccagtaccagccaagccccccaaaacatgtgcccctaaacttcgatctcgccgactcgacgagctgcaagagatcatgaagctatatcgattgccgttgcccagaatcgtttacaaaatagaaacaactcgtggaacaaatgcctcaaccttcttcgtgaagatgttattgattcgagcgtgtatcgggtagctaacagcggaagtccaagtcttgacgtggtcgtgtacgtgacgtacctcttaaggttatgctgtcatgggtcggcagtgatgatgcgctctgttcgggtgttcgtcgccatgtgacggtgcaccacgatttctgtgactgggtaaaagaaactgtaattaactatattaggcctgtcaccgttggtaatttcgaagggctgcagctgcaagatgtgggcacaactatatacagtaacagttccaacagtaaagttacaagtaacagagaaggttcccgggcgttggacgccgatatagccataaagcaatgaattgacagttgcggccaggatgcagtgtgatagtcatatgatgaggtgcgcttgtgctgatgcatttaaatcatagcttctgagtcacatccactagtttggtcatttacctaagagtgtcactccgctggaaaatgttctgtggcgctgcgtgacagggctgtacagcaaacaaagaggtcaaatgtcgagggttacttgttccccatgtgcggctcatttgcattttgtcatgtgtgacacgtatgtggggcactgcaagtgacgtctgatgatcgacactgtgctgagagacgaaaatgccagcgcggtgttacacggtgtggcagttcttccacaggaaaatgatacatttcggtgctgaaagcttgtgcacaatgaggtatcttttatgcagccattcatcatacaactgtctaccgtgaatttttcttgttacgccggtgctgctcctgcagagcagcgggatgttcatctggccagcagtatagggtacatgcttgtcgaaccggtcaagccaatgggtgaagcagccctttcagcaactactcacagaaagatcttccgaatatctgctcgaattttgacaacagtcacgcgcagaggacaaagtggccgcgctatatggcaactctttcgtgactcacggacttcccacctaagcaaaaactcttcacggcaaagaagcggttcaagaaaccgaattttccgaaaggactgaaataccgtacattgcaagttgctataagacgtccctgcaacaggtgtacggtcaaaggaactccctcgccgaaagagctgtgcctatcagtctagggtttaggaatccctccacatatcttcaaaaatgcatccccaattaaccactgccaccgtgattcactaaacgactctaccatcttgctaaccactatcgctcgtgccgtgtcgggggcacgtgtgtctgtgtcgcgtgtcgcgtctcggtcatcttctgccgctgtttatcagcgtcgcactcctctaccactgtagaatgatgtgtttaaattgctagtttaacttagaacattcctagacccacggacaaca

SEQ ID NO: 2710 - DNA, 1653 bp, Toxoplasma gondii
  source 1..1653: mol_type = genomic DNA
tgctcacacaacggagatcgctcagaaaaagaagactgctcagaaaacggagagcgctcagaaaacggagagcgctcagagaaaggagactgctcagaaaacggagagcgctcagacaacggagactgctcacacaaccgagagcgctctgagaaaggagactgctcagagaaaggaggcagttcagaaaacggagagcgctcagagaaaggagactgttcagaaaacggagagcgctcagacaacggagactgctcacacaacggagagcgctctgagaaaggagactgctcagagaaaggaggcagttcagaaaacgcagctcggtcagggaaaggaggcagtgcagaaattgaagatcgttcagagaaaggagtcaggtcagaaaccggagagcgctcagacaacggagagcgctcagagaaaggagactgctcagaggaaggagtcaggtcagagaaaggaggcagatcagaaaacggagagcgttcagagaaaggaggcagtgcagaaattgaagaccgttcagagaaaggagtcagttcagaaaacggagagcgctcagacaacggagagcgttcagagaaaggagtcagttcacagaaaggagactgcttagaaaatggagatcgttcagagaaaggagtctgttctgaaaacggagagcattcagagaaaagagacagtgcaggcagacttgcagttgcgggaggagaggcgagacgcgcctccgttgaagagacgagttgtccatgcgaaagaagagataaacgcgggagcgactgtgtagaagagaagatagacgacagagaagcagccccggaagaaggcacagaaagcctggagacgaaggtgcaagagagagaaatggcgagaggagaaatgcgagtgtcggccgtggcgaggacacagcacaacctcccttcaggtctttcagagagtggagagacgcgtacagacgaaacgctgacaaaagacaggaaagaggcgagaaatctgtcaggtgactagtccacctagagcgagcgcacgatgccacaaaaccaagcagtgtggggaaagagacaaaaaaaattcctgacttctgacagtctttcattctcaattcaccactagagtcacttgccctgcgatgggggtcttgacgcttgcgagggacccgcatccacacctgcggcatagcgaaacgtgtaaaggcaaaaagccaagaacgtaaggagagaaactgcaggcacagaaagacacagcgcaaacgtatctgaaatacgtttcgagacaaaggcggcaccaaacgagttcgccgtcacagaatgctgcggggcaaagacagccacttgggaagtgaagaagagcaacggggacgattagtcgcgaaacctccgggaggaaagagagaagagtccgcgagactcggaaaccccttcgagaagagagacgctgagataaggaagtaacttgctttcaagaaaggggatgaaagacatttgtttgagcttttctggctctttcctctcgaggtgcactgcaggcgttggacaggctgtggagcacctgtcggtcggactctcaggggtctcccgtcagcctcgctgggaacgtggaaacgaaaaaaaactgtccactctgacgaatcgttggccatcctttcttgca

SEQ ID NO: 2711 - DNA, 3821 bp, Toxoplasma gondii
  source 1..3821: mol_type = genomic DNA
ggttaaggcatcgtttttcgagatgtgtgcctcagcctccaaccacccagatacgctcactattcgtgtccgcattgtttcacattgtccgtctagctgctagtagatgttctggttttttcttttgtttcacgacactgtgttgcttctcacgaagcgaatggcagctcgagatgtccactactatgaatggggtctggtctatgaatgcaacattatggattaatttatcgttaacaggcaaatacgagatatcgtgtagcaggctttgtgttttgcacttgcgtttcatcaaacgagaagctttgcaaatgtcagcatgtccgcctactgttcggtaaagtgcttcctggtttaatgtcttccgaaggtatttgcttcctttcattcctattctcagcctggtgtccccgcaagaatgttaactgcagtgtttgtctgcttatgatgttgtctcagtatcaacgtgatgcaagtacgctgctttaccgctcaaaatgtgaaacgtggatgcgctcgtgtggtacaaaaaactgcaccgtgtgctggtatgttgaattttgattggaagcttatccactcgacgggtttctaatacattgaagtctacgtcagcactgctctgtctgtttgcgagcgaaaatatgaaaaaacactctgcgaaacaacgcggtagcaaattgcaaagctgtttacctggagtatgccagtttggacgtccaagcaacgcagaaaccgtgatggattgcatctctaacccaaagaagataatagacatggttatgaagttactaatcggaaaagaagcctgtctttaggtgttgtctgattgatatcgagaaatgtgttctgcccagcggtttgccatctgatgggcatcaaaagtgagatgaaggcgcacgtctcagtgacagtcgcagagacaactgctatttcatcaggctgatgacgatatgatgcctacaactggcccaactgtgatcagctgcaggggcgagtaaaaaagtgaaactcatttaaggcccagattagaactataccttgataagggcgggcgttgtaggcaaaccacagggagacgcactggacggtcgggaagaggtgggtgcttcaattgtctcccaatgcgaatgctcgccttgggattagaggtgatcggacgagcctccgtcccttttgtgtgtatcttactactgttattcagcagtacagccacagcggactttggtgggtcctcatgtctttgccacactttgacgaactgacgttccacagcaccgaagatgtccaccgcacggttgacctcctcaccactgacttgtctcatgtcgagtcgcctcactgtcgacttagtgaggcgtacgaatgctgcatagtgaagtaactagcatatgttggacgcatctaaggagtgtcttgtgacagcttacaaccaatgcagaagctggagcacggtaagagatagaaattgaaagagaacctcgtactcaagattcgacgacccttattattattgtgctgccggcgttccacgtagttgtgccccttatttgtagcattgccacaaccgatcggatgtattcgatactcagcctgccattgcaatgccatgaaaaaactgttccttttgagactaccttccgcgctctccgagggaagcacgtggggcatcgcgaatgccccacggtcttactgaattggcatcggctcacctgctgtaaatccgagtagtgtttgaaaaccgatgtgatacgacgtttgccttcactaagaattgcccatctctctcttctatctcactcccgggcgctgtgacgcttcgggttcattttgtctggcacttcccctgtcttgctgcggtaagcagagacgctggatcccacctggagtcaatagaaaatgccatctgtggtagacctgatgaacttatccaatataggctcaggagtacctatggaaaccgtcgacagatttaccttgtggggcgaagcgcaatcttgggcaccgtgttgtacggcggacgaacgcctgtgcgttgctattggttcagccgtacaaaacgaaaatacaagtactgtcgccatgcatgtctcttgcgcagtacgaaaaaagttgcgctaagagcagacaaaccgtattcgacgaggattacagcgtgaaatataattgcattatcgatgtatgcggtactttccaaattctatttcatgtgccgactgaacatactttagagataggtatcgctatgcgaaattcttaaaacggaacccttctatgtctcgctacgtctgaccgcaatgaacgatgggatacgagacctcaagcttgcaagcgttcatacaacgttggacctatgaaggctggcgtcacggccaactgtgcggatgacatcatttccatgaacatgcttcgacttcagagagcttctttctttctatcttggtcagacgttctggacaggactgctcagcagtcagtcactcgcacagtaagccggaagggagttccttttctagtaacggtatcgtcttcgcgcgatggaggcaacgaatccccgaacgttgttaccatcaggagtggaagccgccttgccttccgcggacgaacactaaattatcgtcatccgcacatgctccattagattggcatttcatggcatccaatgtaagtttgtgtgcaagccttcgaacgtggtgcatctcaagtcaaatataatagattatgtgccgccatccacggacccccagcactccgtcacggtagttgtagcacctgtcgaatcgacaaagaagaattgatcctcaatatcactaataggtacaaaggcgcttaaggtcgaacaatggagctatctcaaatatcatatttgatgggtgcagtattactgtactggtttagcgcagtgaagtcctgcttccgcgtttcgcgtagctttctgcattaagcggtaaccacttaaatggatgatcacgtgatatatacacattgcaagagcaaatgtaaggttacggcctgatgtaaaacaccatctgagtatatttgacatcattagcaagacacatgcctacactacttcgtgaaacggagtgactacactggaatgcggtatagacaaacgatctgtctttttttttgatgttgaatcggacactttgcctttgcaccagactccagaccgtttcaggtcgctggcctctttgtccttcagttgttttaatgctggtggagatcaaatttgccttttcttgtcgttggccggcgcacagcatgtgccttctacgcgaacgtgtgagcacgcggacacggggcccatggggtttcggtcacccatcggggtcagcagccattcgacgctgtgtgcggccgcatcaatcgttgctgcttcggggacagcgcaaacttcgcacgcattccgtcgaccgaacggagatgcatgctcactggagggtgctgttcagctgaaattaaacatattcgctcacctcaaaaacaactgcggacttctataagcctagatgagtaggtcaggcgaagtcactcagtttgactcaagccctcgtaggcgccgttgctggcggagaagtgtttcatgaattgaaaatcgctgaacgttttcctggtgagcgagcgtctttcccttgtatctctacggatagttgtgcaatctccccacttcgaaaccgttttcgcaacaaagcaggagcttgtcattgttctcccggtgtcgtgccgttcaggttcaccgcaaacgacgacgcctacacccgatagggtcgtcgcgtctccggaggtgaccagcggtgaaaagacaatagagaaca

SEQ ID NO: 2712 - DNA, 2154 bp, Toxoplasma gondii
  source 1..2154: mol_type = genomic DNA
ttagtgacgttgcctttctatcctgttatctccgttgtctgtctgtttaatcctacatatatatacatatatgaacatataaaatatacacaatgataagcatgtgcagaccctcctgtatctcttgtatatatgtatccaaacacacacatttataaccatatgctaacttattatatttatgtgtttaccaatatacatcagcctctgtaaatacacatctacatatatacatttattaatacatataaataatgcatatatatatatatatatatatagacacatgattaaggcccatatacatacatatatatgtatgcatgtatatgggccatctgcttgactgtgaatggggtctgtgtgtatcgttggtttttttgtgctattttggaagcaattctacatgcaatgaaagccaacgagaggatggtttattctgttcttctttcgcttcttctttgtcgccgtttccctcgttttcttccatgccgcctgcacggcgcaaagagcctcggtggttctcagcgggcatccaccacaacggcgaaactgcgcggatgttctgatttgttcgaaagacgacgcgttcaggaagatccctccctgtcctgttgtaaagacaattcagagaaaagctgtaaaaacagaaacctctctaggcttcccttggatgatcttgacaaccagcgtgggcccccacgaagattcttcgcagtctctacgtctctacagctacttcacatgcacatagtcgatacgcacatacattcatgtatatagcacttctatgcatatatatatatatatatatatatatatatatatatatttgcgtatctggtttcacttgtaaggcattgaacacctcgttgcgcgtgcaggggagaagcagagcgtctctctttttgcttgttcccgagacaacggagacagcgatcgagtattggaagcttcctggcttcttctctctcggtctcttgtttgctgtttgaccggttaaacaggggggggggacacagggtcgtgaatcgagccacccttccggtctggcgagaagcatgtcagatctcgagtttcagatatctcttctttctgcggtcgctgcatgcggggccgaaaaggctgttccgtctgcgttgttagtcgaagaaaactgtgggggttattacgtcggggctgtaaagtctctgctgtctctgaacttcttttatcgcgggaggttcgagtttttagacagctttctccgtgtgcatcgccttgccgctacttttgactggcggtttctctgcgagctttgtcgagggactcttgtagcgtctctctcttccgttacccgcagaaattctccccggtctcggagcggaactttttctgcctcttcatgcctcgcactttcactgctcgcgcgtgagcgggcagatggggggaagtcctgcaacggaaatccggattcttctcgtttttcccctgccctttcacagggctcgttgtcttctttcgctcctgtctccacttgggagttctttcttctctcctttcctccgtcttgctttcttgtcgcccgagtttgcgaaaaaccgagccgcgccttcctcgctctgcaccgacgtgtgtcgcaggcctcaaacgctctcgactttctcctggctttctgtggccggctttcgtcgccttttttctgctccacaacgcagacgcaaatcaacttttccagcgacgaaggccgtttctgcagggagagcgcataaagcagcaaaagcggactcttcgtgaagtgagcgcatcgtggagagctcgcgggcctcagtgcgcatgcgcgagagaaaaacactcacttccctctggagcttggaaacgcgttcgtcggcttctgctgcgactgctctgcgactccaccgtgtctcttttcgcctatcctgaaaagaaaaacaggaaacctcgggggagacatctcttccggccgttcagctccctcacaaagtgctgaactcgaaagggcacgagagttcatcttctctcacggtgtctctctcgccttctcactccccttcccgttccccgatcgtttcgttccctttctcacttcccctgctttgtttttctcgcgagtcgccgtgcggcctctccgtgtttcctccccattctcaacca

SEQ ID NO: 2713 - DNA, 2824 bp, Toxoplasma gondii
  source 1..2824: mol_type = genomic DNA
cagactttgcttgcttctagattgtttgtctctcctgtggagttctttctctcttcagaggctcttcgtcgaaagatgacctttcgccggcgttcttctcagcgactatttctcctttctttggaagcgcatcctttcgcagggctcccctctcctctgtccagcagcgcttctttcagcatgcctgtagctccccccccccctaagacgggcatggcctggcgttttgctgtctggcgttttttcggattggtcttccttttctaaagctttagaactcgtttcctacccgaagccttcgtgtcgcactggcctgaagacttcttcgtagtccccttcacacaaatctggttcctcgaagccgaaccacagtctgagatcaagccaggtgcgacatcgctgcgagttgcagagcttttctcgagccttctccgtgagtatttgtcctctttgcgggagagtgaggtcgtcttctccctcccactgctctgcctccttcgcgagcaacgctgcccagagggaaggctcatactcttcttcttcgccgccgcggcgagcgcgcggtcgaaattcacacgaggcgcagtgcggcacctgcgtcgccgaggaagggtggatcgtgagaagtgcgctcgacgccattggaaggaaacggaggaaggagagagcaagacaacgcggagaggaagcagagggaaggaggcgagcgaggaactgggggacgactggtggatacacggggagggcgccgaacaacgacgatgactgaggaaagacaaaaaaaccgacgcgcaacggaaacaggaacgagagtcgaggaagcagacgacaaggagaagaaaggacaggagcagaaggagcagcagctgggagaggaggtcgtggagattcgactcttcgttctctctctttctctccctcacctcgttctccttgaagccggtggaggctctccttctcttttctcttttctcgcgctaaccccaagaagcgaacacctagggaagagagttctctcgcgcctcatcgcaaaagcagcgtgtagcgcagagacagagaagaagaaaaccgcccacaaatccgacgcatctccagaaatgaacactaccgcctttgcctgcgcgtggtcagggagagagctggacgtctctccggcgagggaggcccaaggaaaagcagaagccgagtggcaactgaagacaagggagacacagccgatctcggacgatttagataggaggacggtagccaagacccgcgcctccgttctccgtcggcgaagaaggaggccttgactgctcacaagagcgcggaagaatggaaccgtttcctgcaagtcgatccagcgcgaaaaactcagaaaaacgagagaagcctcgagggcgccgcgacctccgccgccgctcgagtccggcgttgccgcgggaagctcgacaggtcaaagaggctttcgtttaaaggagagtcgcaggtgaaaaaagcaacgctgtcctttttcatcagggaaaaactggggggaagtactcctcaagaaatggacgcgaaacaccagccgcgctgcaccctgcgggtgtcttcttgtctttgactttgaggagtagggacgcctgaggtgaagctcggagctctgcgctacagtctttctcgtcattctcgtttttcgcgaggagtcaaattgttgaagagacggagaagccgacgcgtcgctgtgcgagaaaaaagatccccgcaagaaggctcggaaattgtcgaaagcgtcgggactagccgaggggagagaggcgaggcgaagagagagagcgagagcgaggcctctgagttgtgatcgagcgcgcttagtcgcgagtgcttgagagcgtccgctttttcgacaaccgggggctgttttcgagtttcgtttgtttctcttctccgcgtttccttcctcaaggacagagaaagcgaaccttcttcggcgatctctgagactcaaggcaacaagccacagtgaagaggttcttcgaatcgacgacgaccgctgctttttcctctcttcttcctccagacaaaaagggcgccacggagtctcctcgacgcagcggcgaggctcttctctccccttcagtttcgaagacgcctccagcgaacaggtgaaagaaggccgtttcggcaggacagtttttatcaaggttttctgcactcgcctttttgcttccctaaaacacaaaaccacaccaagctctctccgcgcggtctccttgttcggcgtcggccgccggccggacgttcgatttttttcctcccttctttgtgctctccaggctgcatgttcttcccgaccgcgggaaagtcgcctctctccgagtccatttcgctccgtttttcacctggatctcttcttcttctgtgggggaggggggccgccctcctccctgccgtctcgccgcgagtctccctcctcctgcgtcaaaaccgctctcgctggttcctgccctggagacagaatcccctcattccaacttcgcgtccaaggccagcaccactctgtcgccgagctcgagtcgagagctgcctcggcgtcttctcctggccctgtctccacagcaagaactccactgcgtcgtcgtccttcgccatcttttcttctcttcttctctcgtcttttttccccgccttctctttgccgcgatgtgaagccccgcgaaactcagagatacggaaggcaaaaacagtgcaagtgcatggccgactccgttcgccgcgcggcctctcgcttctgcggcttgagacgccttccagatctccttctgcgttcctgctcttctcccttctctcccgcgctcca

SEQ ID NO: 2714 - DNA, 3458 bp, Toxoplasma gondii
  source 1..3458: mol_type = genomic DNA
ctttgctgcaaatgatgttgtcgcgtatctcagtagtttccctagaaacgcagatgacttcgctctcccatgattttctcgtacagcgctgcttgcctcgtgtagactctgcgcggtgacctcgaccgctatgcactatcacaaacgtggagttccaaatcttctcctcaaggcccctctggagcatctcccaaccactgatcagtcgttttcccctgatgcatttatcacacagagctcacctttcgcccgagttcgtctgtgctgttcacgggctccacgttcacttcggcaggctcctgacgcctcgatgctgcggccccggatgccgtcttttctctcttggtgggggctgcggccgaaagaactttggcggcactggagacgctcgaagatgtctcagggcgcgagatatccctcaccgcagttctggatcccaacgcacctgcggcaatcgcagcaatcgaggcgtgagcatcttgagctgctgcggcgttgctgaggctgcttcctcccacagggggccgtccctcctttgctctctcgcgctgtgcagctgccgccgccgcaaacacactcgcctgaatctcttcttcttcagcttcttgctgttttgcagcagcaggaggttccggcgcgggagacggaaatacaggaggcgccggggagaagttggagggatgtccaggagaaaagttcgaggtaggcgctgaagagaagttagagagaggtcccgaggaaaagttagacacacgaggcttcgaagaaaagttagatggaggtgccggagagaacttagagtctggaggaggcggcggggaaaagttagaggcgggaggaggtgctggagggaaggcagacgaagaaatcgctgcagagaagttaaacgaagaagctgctggagaaaagttagatgaagaaggagttgcagagcagttcgacctcggagtaggttgagaggttagccctccggcagatcgtgacgcagcggctgttgccaaggcagcttggacagctgcaactgcatgcgcgggcgcgctcttgtctccaggagtgtctccactcgaggacaaagcacctggtggaggattcggagatgaagaaaatgccattgtgtgtttctcgagacaaagcaaacagaaagagacccgtttatacgtcgggtggtggcgcacccgtcctacaactggggactgtaggtcggacaagcagaggccaacggcggagaggcagcaagagaaaaagggatggtgccttcgaataaggaagcaaatgtgaacaaacgttaaagctttacgatggtgcagcgtcgcagagggctggacagccaaaaggtttcgaagacgaacttccccatcaccgcaactcctccctctacacggtcggtcctttcaagttggatgcacagtgaacccacaccttccccaggagagtttgtcggacaaacgctaaattagagggacgaatctgataaagaaggcgggaaacaacgaaaggcaaaacagtaatgcgaggtccacaatccgcgtccgcgtttgagcggggcaacctaccgaagggagagcggacgacgcgaggtatgctctcgcattatttatggtggaagaaaaacttgctatctcaaaaggctttcattggaagaagcaaatgcagtaacgataggagattttcctgttttcttgagaaaatcttcttctccacctccaggaagacggccgggcgctcccctacgggctgcaaccggaaagatgcaggaaaaagaagggaggtaactgcggaagaagaagtggcggaggggcagctttcacggggagcttgctccagtaaaaaatgatttactttctgaaggacattggaattgtatctgatctctatgtctcgaccctgcacagtcgtttgtattcgcttctttgcatgcgctgtctgtctcgaggcgtttcgtagatggcaatgtgctggcgaacgatcctgtaactccaatcgacaatcgttgtctgccttcttcatgtcttgttgcagagaccagtttcatctagtgacacgtcctttccctaccgtgttccctctccgtttatggcaccttttagtctgttcaacaaccattccaatacacggctagagtactacaggtttcacagaaaggcaccagacaaaacctgctcataggctgtcgcacgtactgggacacgcggcgtgagaacaacaacgagggacgggggtcaaggtacgctctcttctccctttccacctggtttttagtggtttctcccacgttcacccccttcaattttgagttctaggccagctgtctgggcactttgtcgacaagatctttccttggcttctggctcattgagcctgagccctggagccatgtctcgccctcgcccccactggcgccctcacaccggaagccacatcggcacggacttttcagcgtcaaaattcgagagcgtgacccgctaacaatgaatggtgctgtctctctgttcgttctcgttggatggaaccgcttgcattcttcttcgattgaccggaagaaccgtttctcgctttccggccggctcgcgctagtctcggtttgagactggttaaggttgtttggtctgtgcgagactggacaagatcttgtgcatacacactgtcggcaggaaccccggtacgggaacgccggaccgcacgcgccctcgtctcatggggtccaggttttttcaaccgttttatcatccgggcattttccacacaccttcctgttgcagcaaagtaggagcctttcatgtcctagccgcttgagaagtctgtctagggctcagttcagtggatctttccacgggtggggcgaaagagcgcgtagcctgggggcagcgaacaggtgagctgcctctttcatctctctaatctctacgggcttgtctgtgtgtttgtgtcttcctgtagatgaacctacgacgggtcgctcgaaagtgtgtggggcttatagaaagaaccgagaggggatgtaggtgaggaaaggcaagacgcggggcggactgttgacgccttcgcgaaaaatgtagcggcgtccagtaacaacacgcaattgtcaattgcggagatattcatgtgctgcctagctggcatgtgtgtccttcgcttcggttggaaggtatcgcagtccggatcgtgcgagtggagaggttaacgagaccccatttttaaacttgaacaagaagtcgatcgcattccttcattcaggacgtttcgcgctttcgctgcccttacccaccaggtgtgtgtgtgtgtgtttatgcgtgtgtgtgtgtgtgttctccacacattctcgaatggcagccgtcttgcaggcagtccgacaacacgactctcgattgacaggagctttccaggaaattcgctcacggtggcagagtgtgccgtttttgctgcttcagcttcagaacctcttagaacctccgtcgcca

SEQ ID NO: 2715 - DNA, 1818 bp, Toxoplasma gondii
  source 1..1818: mol_type = genomic DNA
gtgtcgccggaagagactgagtgatcactgaagcttaactcacaaaaagaacttcgattcggtagacaaatgacaccttcaagagaagttggaaacaagtcttctgtcctaaagccaatgcagcgtactgagaaacgaacacacatacacctggttccacatataaatacatacatttttatgtatatatatatatatatatatatatatatatgtatttattcatatgtttatatatataatatataattatatatataataataaattatatatatatatatatatatatatatatatatataattatgtatgcatatatccttgtgtgtaattatacatatctatatctatatatatatatatagatagatatagatacatatatatttttttgtatgtttgtagacgacgaccgaggtagacggagaattgcaagggcctgcaggaggagaataggtcgatagacaccaccgaagggtgtggatgtacatcgctccaaacgggatgcatttacaggaaaagactcggaaggggaattgcttgacaaggaagtcaactgccgacagccgtcgaggctttgaaatccaaggtctttcgagcgcctgtctcacgcggtggaaggcccagctaccgtacgggagaaagctcgattccctcctcctttttgtcgcctctccatttccgcttgcacaagagcctcttcggagtgtgtgttttaaaaagagagaagcagaacgacggaaaagaacagcaaagtcccgaggccctctgaaaaaccaagaccagcgcatgcagcgcgaaagggagcgtcggtcctcaggcgctgctgcgcctctgaggcatggctgcttcgtctgcgcgagtcgttgcctgtacttttcttgagtcctcaaacgcagcaagacaagaaaggtttcatggcgtttcttcgcttcttccacgcgcgaaaaaaagaaaaaggacgagaacggacctgtccagctgtcgctcacgcagcagctggccgcccctgcttctctgtgcgttttaacagagcgcctgcgcggaaaaaagtctctctttctgttttttttgtccgcctgtgttgctagaagtttcttcacttgtttttcgaaagaatccttcttcacggttttgcgcatatacaacttctggtccacaaatgaactatcttcgacgcgggtcttaccgtagcctcgcttctccgagtcttgtctgagagaactttgttctctctgaagactgagagaacttggttctctctgaagaatttcttctttgtcccggtcgtgacgctgcacaccgcgttcgctgtcgactcaggtgaccgagacttccagaactcacggcagcgccgttctttccttgaacacggtagcgagtcagaagccagagagaaacgtcgacggacgtctcttctcgtccagctgcgtatgtctctctcgttgtttgtcgctgcatttctactacatgtcttgcgctgtgtgacgttgaactgtcagacctgtcaagcttctctagacatccagatctggatgggttccttcgctccactcttctcttcccccgtctccttcctggtcgtctcttctctgccgacccccgtcctgtcttctctctgttgcttcctctccttccgttgtttattcttttttctcctttttctcgtctgctctgctcctgtctcctccgcttcctctttctccctccccttctcgatcctggcttccctctcttctttcgctgttcctcttctcgctctcccttctcttcctccttctccgcttcctctttctccctttttttcctgaacaa

SEQ ID NO: 2716 - DNA, 3858 bp, Toxoplasma gondii
  source 1..3858: mol_type = genomic DNA
ctgatacacctgtcacacacacaaagacagctacgactagcacgaatagttcggttcacgccttgctgacagacaaaaaacgtgatatccatcccccattgcgccgctataaataggatctcggtacctttagaaaaacggagaagaagcttcagagaagaccctgaacaacgctccacttttcaagactcagatgacttcatctacgaatctctttccgtacttgcgactggttgggcgaagaagacaatggtgcactcagcatccgcgatgtttgtctacttttgtatgcgacaattaacatcctccgacgatcccaatcgtcagctctccaaagcgtgaagagtaccgccgatatcttcgttcactttacagagaaggtggcgacacacaaacagggaagggagggccacctcttggtcaaaacgtgcttattgggtagatagtgctccgactgtcgactggattatgtcgaagatggagtctcacccagcacctgttgtcagggacattttacaaggcaacctggccacagttgccgtgctttttgcagagaaacatttcatggcgatacttctctttctgttccaaatgaagtgtacggaatgcgtccttatcatcaccaacaaacaccactctgaaaggacaagcgaattgtgctactgtggacacatgcctggacagtatgggtttttaagcggaacgtgtgggactggaaagacagaggtggaagaagcctgtaagctagtgattcaaaagggaagtttaggaaaacaaccggattgaatcacagccaagactgccctgtatgaacctttctaattacactgaagacaggacttaagactgtatctcgcggagtctactaccttttctttaaacacaggggccgagatttgctgccgtgtttctgcagcgagaacacgtgcgacaaacagccgagcaggtaagctacgagaagacgaaaatactgaaaatcattgcgggataaatttagggtaaaaaatgtgcgacacaagtatacggtacaaacggaaaaatatcctcaggttttcgaacgcaacacgggaggaccacctaactctaccatagctttttgggctcctccagtgtggtttttgtttctgaacaaagagaaaaaaaaatctatgacgcacgtgcatagtattgctcgacactggttggagtttcgtcatgtgcaacaagtaaggacgtgtgtttaaagatattgttacggtcttaacagtgagaagagggtgaggagaggttttcccaagttaccggatgttccttccgggaaacatggcgggacaggcgagtaagacaaaaggaacagatttcgagctgaactcttgaacaaacggcacacaacacagacatcgtgaaacaacttttgcgttagaatagggctatttgacgcttctcgcgatggaacatttttgaggactgcagtaacgagccactcacccacaatcctcctttgttcagcagaccggcccaaggaaagaggaaatggaattcaacatcgccatgatgtgaaagggagagttcgaatgcttttcagaatctaacttttgttgacttatttgattcgaaagcgcggtgcctccacgtaatgccccgtaagacggacccacggtgcaagttggagagagaagttatttgggtgaaccgtccgtccctttggcaaggttttgactatcgtacgcagacttctgactggacttcgtatggtgcgtctggaatgttgaactcttggtggtgcagcagcgaggtcttgtatttggcatgtgaaagggacatttgaaagacagattcgaggaaccaagacaagcaagtcgtcacgttctgcagtgccggtagctcacgatagtgaggacaacgagcgggccacagtgttatcctagagtgacaggaagtcagaggaacagattgaagaaaaaacgtcatcttccaagggtgtctctcttgtgcggtcgtgagaccaaaatgggaggcagcatcacaaaactgcgcatggtgcacaaatatcctgtaggttgtttgggtaagatgacctatgcgaactacacagtctctcaccgaatacagcattgagggggaatacgaggcggcggcagtcgtctctgttacctaacggtgacactttcgtcagtccggcatacgaagtgaaactccccaagaaactatcgaacaccttgtagatatccaatatgtcgacctgaggccggcatgcgaagacagggaatgtttaatcacaagttggcgctccagaagggtactaaggcgctcttgcgagcgggccgtatggtggtctgatttgatggagagcagaaacaagttatctataactctatgcggcggcggcgcaaacaatgcagtaaaaaaaaataccgatagaagacccctgtaagcacaaaacattggtgctcatattgacgcagcacggatctgagttccttcttagcgatcggatttgctcacaaccgtagcgtgataaaaaccatcacacccccatacgtcgctctgcggtgagaaaacttatcggtgaaagaggaagcgcctttccacaattgtcgttgtttttctcttcccgctgccgttatcagttgccgtcaaggcaaggaaggagtaagacctcgccgtcccccgcgaggaattcgagagacagcctggcacaagacatcggcgtgggcagggactgacacaccaacggttccaaactttcaccactgaaaccgagttcttcgtttcagacttgttccctccgttgccttggaggtgcctgatttatttcaaccattttctctgttcatcagggagacagtgaaacgattctctcgacttcacttctacccggttcgtctgattaccgcctggcttcagctcgctagtctctgcgtttttgcactgaaaaaaaccgtaccgaattttgtctttcatctgcgtcgtttgttcgcatcttgttcgagttgtatattctttgcgcgggtgggcttccgctttttctgcaaccgcttttatatctcctcttcgcggtgtcgggggggttgcgaagctgtggtgtctccgttccagtcacgtctctatgcatcttgcctcctttccgctttcgttggaatttccggcttttctgttctcccgatttgcgtgtgcgccatttttcgtttttttgcgctttacaactcatctgggactccgggtcttcacgcttgtcaaaaacaaatacatgcgcttttcccccctatactgaggtcagcgatttccatcaccccttctccgtttggatatatttcttaccttactatcgcgtttttcgttggccccatttgctatttttttcatttttgactccgtttacccctctccttacggaacgaggcgcttgtcccacttttctccccgcattggcggcctccgacgcttacttagcttacccgaaggcgaggagacggagggcttgcgtcttttttgcctggcctgtttctcttttgtcaacgtgtctcttgccacttgccgtacattccttcccacgtagtgatagcttcacattcctcggcctcaacaagaacgagatccctcttctctccgtcgggctttgagatttttttgcaggctgtctctctccgcttgttctttccttggtgcctagacaggaggatactcgagacgttgcggaaacacgatggaacacaaagtttcaaagtttcagttttgacgcctacgcgtgaatgaaaggtctcctgttgaaagaggcataacaaatacgccgggcacatagagggatagacacgacaggacaagacgagacagatatccacgcttgtcgaggactccaccaagtcttcatccgaccca

SEQ ID NO: 2717 - DNA, 3936 bp, Toxoplasma gondii
  source 1..3936: mol_type = genomic DNA
ccgaagacatgtcatttgttgttcccagcgcacaaggcgacgaggaacgagaaagcgaagagagagaagaggacggaccgcatgcaggggagagtgctgaagttgaaggggcgggaagctgcgacggcgaggcttcttgaatgcgaggatgggaactggggtcaccaccagaattccaagagcacatgcacctcggtctggcgcacagaggcgtgaaagctagacagtcaaaagggataagataaggcaatttccagaggcctcgagactcaaacgttcctgcgcggatgttgtcaggatggccatggcttccacttccactctgacaggttttacccccgacctcagcctcggatgcttccccggtgcgcttcccgcgttgggcgcctgacgaggagcttttctgagacctctgccttgtcgacgacttccgcttctccgtcaaaaacaagcactcctcttgctccaagtcgaaggaaatgtagcgcagaggaactgcgtgaagcagcctgcgcatcacagacagacagcggcaggtgccccagggcttccacgcggaagcggcggtgcgctctcggcggttgttcaaagagagtttctgagagcgtcgcgactgtccagaagcacttggaaaggacggagggaatgagtccagcggatcggcgcagacgagcgatccagaggagcagagatgcgagacggtggaacaggaagactgggaaaccaagagattcgggtggaggtcctggtcgcgacaaagcagacaatcggctctctgagatagactctcatcgcaagagctggaaaaagatgtgtacggctcatatgaagagcaggacggagatgcagagttccggggacacggagtcgacatcctggaaactataaggaaacaaaccacttaaaactcgcctggggggctggcttcccagccacacaaagcgagaaagtcgtcgagattaacggcatagagggttaagtggggagagagaggatttcaaagggagagaagggagacttccgtgcaggaccaactaatgaggaaaagaggaaagggtagctccgtcgttttggcaaaagcatctggggccccgcgcgaactccaggaaaacgctctgctgggaggaaaccaaggaaggtgtgcaaggcaaacactccctttaaaggaacccggaaaacgctctgtctcgatcctatcgcctcctatcgattcgagcggatggaggaattccgtgtagaaccgcgcctagaaaattgcaatgccaccatatacaacgccatgacaaagacaccgcgagggttggaggtggggggtgctgctgcagcagctgtcgttggctttgaacatcaaacaaaaactctttgtcaaagaagaaccgcctatcaataaacacgacagaatgtcactgaaacacagaagaagaaaccgagtctgtttcaacaaaaagcgacaaggaaatgggcattcgatcgcaagcgtttgccttgaccggttgagaggcgtggaactcgacaaagtgtgccacacgctgtcgcatgcgcccaaatcgacgcctgtgctgcaatggctgcttcgttcttcgtaatgccttccgtcgagaacaggtatacataatgaaaacgtttcagagttttcttgtccaatctcattcacctcatgcgcgtcacacgggtgtctttttagtggaacgaagaaaagtttggtgtcacaagacgcagaccacagggttgccgttaaatcccgtgttcctcatcctctggcaagaatcatcagcacagaggtgttcggtttcgctgtggcactttttacccttgaatactgaaaagagccttctctctgatctcccagccatgtgcaacagggcagttaatgcttccctgggcctaataaggattcgtcctccagcttacaaataaactccgtactcagatgggcacatgcaaactaatcttaaacacaccgcacacaactgagagtatgagcaaaaacaaagtagtttcctaacgggcaactggaggaacagcgaagcgacaggaaggcgatgtctccggagtctttaaaactagaggtgaaagcggggggaactgtatgtgttaacgcggagagttacctggagaaacgttctcatgtgtgttgagacctttgttttggctctacggcattacatataaacacgcttctctccggctttctgcaagatgcccgtcttctgggggtataacgcctccttttacacttttttctggtgttctctcattagttttgaaccaggggcaaccacttagccgctgtccgtctcggcgacacccgataaacctgttcactcaacttcgcaaggcgttgcttttttaccaagtagtcttagtggacaccagatgtagtcaacgaacgttgggaatgctgaaaaaaggtggaatagtgtttcctagaagctccgtgctgaggtcctgtgcaagcaccgtcataagaaactttaagcttcccgcatagcaaggtgcgggaagagggtgttttgaaggctacgcatatcagctcaaggatagcttcttactcattacaagcaccgttcgatgtgcaaatgagatccgtatcaccaccgtcgcctgaactagcaatgtatttagtgtaggaagaagacgctctgtagccacaaaagcattgtcaagtcgccaccttgttaatgcagactgtttctggtggctttgacttgtgtgtcgctactctcacccgtcaggttcaccgattatttgccttcttcttcagggaagacgcacctccgttcaccagtttgttcgcatctgttcagtttagatgtctcctgcgtctgccgtatctggcggactgtttcctggatctatcgatgtctcttgtgcagtacgctaagtggtgccatttccacacttttttctctgccgacgccggaggcgtgagtgaccctcaaaattcggtccctcacattgcaagagtatcgcaaacagggccgttcagaagagtacagatgaatctctggactatttttgaacgtatagcgacaacaaggcctcgcgtgcatgaacacgatctcgaaggatggggcttcctatccagtaagctaaaacgtacaacatctgttgatccttcaccagtcgacgggcaaaaggtttcgacacacgcgagagcacattagaagaggtcctcacagttttcggcctgttttttcacacctaccggttatatcgtctctctgtgtgtacaagctgaaaactcgatatgcttgcagctaagtgttgaatagaaccatctgaagccaagcttctttccgtttgcagattgtttccaacccagcacagaatctctactgttcactgaagtgtgccttttgcaaaacctaacccatggcatcatctcggccgcttatgagaagtgcaccatctcgcatgccgacagaaaagtttcaacctcttcaaattactccttcagtttcacgtggaacttcggtatggaagcctgccacgcttaaatgtagtcagtgtacgggatttatttaggtgagacacaaaaaaacagccgtcaagatggacggtgcttaaggcggccagctggtcaagcctaaaacccgagtggggggggggacgaattgacacgaaatcgcgggttattttatctttgtgatatcgttttgcgaagtaacgaatcctgcatcaaagagtcacttagtagtcgcacctgtcggcaaaaggttaagatcgggacaacgtgtcagagacaccaggcatcgggactgcgggaaagttgcacgtggcagcggtacgcttgcgggaagtccgttgtgtctcacgctggcgacaagcgatcgaaaacgcatctctgagcctctcccgccgcgcgccgggattcgggaatcgatttcttttccacaaactcgtgttgggattttcctccgcaagaagccagga

SEQ ID NO: 2718 - DNA, 3322 bp, Toxoplasma gondii
  source 1..3322: mol_type = genomic DNA
atggtgtgcgacgaggaggaccgaggaaacgaaaaagcgagaaaaagagaaaagccggtgggggaagaggcacagagaagacacaaagaaagcaacagagaggcaacaaagaggagacaacggagacgaagcggtcgcgtccgcgtatccgttcgaagtactgaaaaatcgccgctggtctagagaggcgcagcacgatccgaacaaccagtggtcgtttcaacttgtgtactgatatagtctcaaagaaaaatgacgcatgcaccgatacaagcatacatacatacagatacatatatatatatatatatatgcatattatacagaggtggatagatagagttagacagatagagaggaaaagatagttggtgatagatagaaatagatagaaagacagcttgtggcagatcgatagagaaacggatagatagatatgctcgttttcctaacgcttttttgcatgtccactggagcagcctgtcgcaccgtttcttcgagcgtcattatcccattttcctgacaaagacggcgaggtccaaggggagagagtgaggaaaggagttcacgaccggagggaggcagagcaagtgagagttccgccgagatcgcgtttgcctgcaaggaggggtacgctttcattggacgaggaaaggcgagaacagaaggaaacacccgagaagagactgaagtgacgaaagacaacggaagagctgaaagactcttccttcggagagacgaagaacatcaagaaagtcgtttttgcgacacagcagtacctccccccgccctccagcttgggatgcccgagagaggaacccagagaaacagaagaccgcctgctgagaagatcgacggcgcgctttaggattgagttcgctggtgtcaatacttggagctcatcaacaaacgagaaataaaatcccaagaaaatttggtttcgttttttgcgcaaagttgggctagcacttgtatatctacgctgtgtgccgcagacatctacggctgcatgcatatctctctttcgcgtttctcgctgccgcaagaagcaaacaccgacgagaaacgcgccaggatcgacggtttgattatgttttcggcatcgcagagtagatgtttgtcggcgcagggtctgtaggaagttgcagttcaggcctgtccactgtgtaagcgcgcggatatatgcgctggtaagacgaaagacaggcttctgttgcgagggtcgcatgaaagaaacgactgtgcaagtagcatggacacagttcagcctttgtacctgcaggactgcgacatgtacgcgaaaaacaaagcagtcctgatgcgtctctcttttgaaggggactttctgaatatgcgctagacacagacacacacacagacgacgcttgacgctcttgacacggtggttgtgaagagcacagaagatcttgaataaagtgaatcgtcagggaaaggctgaaagcattaactgcacaccaacagctcaagaaaggcgtcgttttcctttttcagagagcgactcgaactgctctttcctccggactttgtcttcgattcagcctcgtagtcgtctgcgtccttcttccgagacttgacctgcgataggaagtcctttctttgctcgccactactccatgcaaaggtgattttatcaagcacggagtattgtcatacgatgtgtgactcaaatgcatgttcttttgacgtgatgcgattgcaatgcaaggtctttttatgcgcctttgtggccattcagtgttgtgttgtccgagtgagaggggaacttctggcgtgtgtcaaactcgagcaaataaatcggcaaattcgctgttttatatcgataatcgagttccaggagggctctcatctcttttagttgtcttcagcgcgccagaggaatggtaaaacggacagcagtcgtcaggaccttgattgcctgtctctcctactggactcatgtacagagtcctacgaatcagacaatcaggaaccagtttcaataaggcacatgagatgttattaaaacaaatataaaagtgtgtcactctctcaagtttccatatcgacctaaaaattccaatactctactcgtgagattcggatagatcccccacaagtttttcgttttctgggactgtgggttcgtatttcttcagcgagtctgaaaagaggccttcctgtgtcgccaattcgcgtcagttgctgggaacatgacttccgaaccggcatttgtgtgaataaaagatacactaactttttcctgttcgaatttaagcttaaaaacagtgcactgataatctcataattgcgcctgtgcattcaagtgactttcagaagacagattggtacagagaagtgataagcatgagcagttgaaaaaacagtctcgaagttcgaaaaaaagcgaaaggtctaatgatggagaataagaacgtttgggagttctaaagcgagataaactatgacgtagacttcgcaaacaagagtctgaaatttcacaggcaagagtgactgtggcaatgcagaaataagagtcgaaatcctcaggtcgtaaaggcgagaagaggcgaaagtgtggaataaaaatacaagagctcgattttcgaaatgggggaatttcttgattcttctccggttgggttgtcaacacaccacccgcgtggtgcccggcgcacacatgcagaaggcgggaggaagcttttcctgtttcacgatttctccgcgggctttcgtcggaaaaactgagataagaatcacaaaaatgcaggaaagaaaaagacgtttttttccttttatatcaagcgaaacgccgtcatcccggccactgtgtttcgccgtcacccgcgagtggatatgtgcatgcagctcgactcttgtcttgaaaaaaaggccgcttttcactcctcacgcgcttctcttcaacttctcttcgtcgccactgggtgtgtttttctgtcttttctagaggtccgcagccgattcgcttctcaccttttgttcctcctgctctgtgtgggcgttttcggtcatccacggtctctcctcggcgtcttcctatcaaaacactggacacagcaggcgtcagaggacctgctctttttttctccagtttcttgtcttctcgctctgcgtttcgtttccaggctcggcagagttgtcaggggagaacggttttttcgcagagaagccgttctctctcccgcttgtccgcttccacatcgcatttgcgcccaccttgcttgtcgaggaaaactgtaaaataggcattcgtgtatcttttttgtccacatctcatgcacaaacggctgtagcgagctgcgca

SEQ ID NO: 2719 - DNA, 3029 bp, Toxoplasma gondii
  source 1..3029: mol_type = genomic DNA
ccttcatttgtagcatctccagataatgcacctgtcgccacgatgcaggctagctattgttgtgtcgtatcatttccaatatatttgttgaggtgtcttctggggtacagacatgcctgttcagggccaataataacaccgtcgttagagtagccagtccgacccttatcactcagtttgcccgcacactgaagccaaatcaagtcacataaaatactgggaatcgtagtaccaatactctgcgtggggtgttgctcccttggcgttccggcactggcttttgcatgatgttgtgctgcctcgagagcaagcactgctggacgcatattgacccctgagcccgcaatcacaggtccgggtgggaaacactaacacatgtagagcttttacgcgacacagtggtgtgtttatgtcactacttgtggatggccctgctaacagtgtaactgatagtccatcttgtccctgagctctgtcgaagagcgacgaaagcacccgaataaatggcagttcaagagttgttggcggggaggtatccagatcatgtccattttttctatgccctgtctggttccggctgttctaccacaggtactcacgaggagagtagattccgtttaggcatggtgtggagcattgcagactactgtttggttctgtgaaaatatcataaccatcatcattcatataactgagtgaagtaacttcatctgacaccggttcaccttgtcaacgggtaccagtccctggtgttgtcagtggctcagttctctgccagcaacatcgtaattttgaaactgcaaaaatttttgagaagacaatgctgtcaaattgacgattctcctttgagagttccgcaaagaaacggtaacaggacgcggggtgaaggcaacactgctttgccgaagtatacgtgctttgtgtgctaaatggctgtgcatccccaattagaactgtagggtgacgttgagttatactggcagacgggccaaaagtacggatccttcgaagcagttgggctgggatttttgtggcatcttccgttacatggttggtcttctgtcgaatcatctggcactattcgcattacacatgcatgcaacgtcgtcagtagcgaaagccttgccaccgccggcgtggggcccctgaaacggggacaaaacaagaacggcttgccggtttcgccggaatctggggtggtccttcgagagtggactggctctgagcgaaccccgtttgtagaaagggtattaactgtatcacaatacatggctggacgaaaagtgtggcgaacatgaattcagcggttggtgtcccataatctataactttcagtcagttcacaatcagcacttttacaataattctattatgacgttaaactgttcactgttgagaaaaactatgcaacagcgatgaccgcaatattcttcagatgtaatgattgttatggagcgtggatggactaaacagatgcgctgtatgatgtctccgctgtctctgaaagccccagcaattgcgccaccttacgagctgaagtaccctgcttctgtcacttcttacgagaattgcttgcaccgctgccgcaacagcatcatggcatgttcacaatgtaggaaaccactgggggagagtttaacaaataaaccggactcgtccggtggcaataacgattcagagttgcgacggagagagcatctgttcaagcacagaccgtaagtttcacagtctcttaccactttacaataaaatgcacggcatgctacgaagtaaagggcagcgagtgtctgccctggcaatgcaggcattcgttcaaaggtcacaaaacgctcacacaacctgaacatgctagccaattcaagtagaaggaaaactcagggcctcggctccccttgagtcatcatgcatctctactacacagaacccccatactgcaaaagaaccaataagaacacaaagtatttgcgcttccctctgtccacacatgtctgcacacagcagatctggacattgaagtattcctgtcagtccccagctgcatcatttacatcctgaggcgctaggcatgcgagtggtgttcagtcaactttaaaaccatcctcgcctttcgtatgatgactgcttttctggcgacgagatcagggaaggcgtgtctgtcgccaaagttgcaaagcttcagagcgaggtcgaagcggcagaggcgatgctaaggaatttaaagttcaaaacaggctgcctcaacataccatcacatatggaaactgaagtttattttgaaaaccctaaaatgtacgtctcaccctggtaacgtgtgtgactgtacccatctggtacagttgcaatgccgtgacatatttatggtaaaatccctccgaaatggcgggccacattgaagtattgcgtcgtttatcaggcaaccacgatatcaagaaacgttactgcagaggcagaaattaatgatgctttgctgaggtggctcgttcgtcctcttaggagacgctggtggcggatgcgagtgacaaaggttgagaaggacagagtgcctggtcctctcgaatacacaagatggtgatcccaacactgcttaaacagaaggtgtcgtgtatacgtttttaccgacgaatgattttgatttcaccaggattggtacattgcatgatggaggccgcatggttcaaagaagcatctctgtgaaggtgttcaactctgcatcaggctcacaagctcgtacccgcagagcgggtccagatcaagttgctcgtcaagaattagcgacaagacgactcattcagcgtacgaaacccacgagatttcacaatcgacacatctaagaggacacaatcacaaaacttctacctgttcatcgccgaacagcgcttctgcaacctccttcctcaatgcgccggagtctcgagacgcgcaggggcacgtatcctattcacacattgttgtgaagcggaacaagcaagcggatcttcctcaaaataaggcagctgcgccgacggttattaaccaactgacaaaaagca

SEQ ID NO: 2720 - DNA, 2656 bp, Toxoplasma gondii
  source 1..2656: mol_type = genomic DNA
cagagcgaagacttcttcttccgcgcgatttcgccgagcacttcgtagccgcccagaaccttgggggcgccgaacgccgcgtcgcgctcggcctgcggagcctccgcgagaggcgacgcccgcgcctccgcgactttcccctcctcaataggctccaaagctcgaggcgcgtccgcgagaggcgaggcttgtttttgcgcggcttccctcgcttcgcgtccgcgagacgcctcgtccgcggccgcgaacgccgatggccctcgagaagaagagggagagggaggagacggaggagtgagacaagtgaggggagacggaggagtgaggcaagtgaggggagacgggggagtgagacacgatggaggaggaggaggacagcggtggggagacggcgaagggagaaaaggatctgatggcttctcggagcgcagagactcgcggcagtctgcgcattcgtcggcttgatgtagaccgtcctggagacctgagggaagctcggaagacgcgtcggcaggttcggtgcttcgaccagccgagtcgagacgcgcgggcggactgagaacggggagaaagccagacttatccgaggggccggacgctgagggaggagcgcctgagggaggcgccttctcgggaggcttcggagcgtgatgaggctcgaactctgcagccggcgcctcggccgcctccgtcgacgaactcttcagagaaagagaggggaagcggaaaaacgtcttgcggcgctgcatctggattgcacgcagacgaagaagagaagaaaagaacagaagaagataagaagagaggaagagaagagaaaaagaagagaagaagaagaggagagaagaagagaacgggcggctcgaaggagttcctgggacccgcgcaggctggaagtctctgtacggagagctgagagaagagaaagagaagacagcagacgtgagaaagtgacagcgaaacttggggaagagaattcgagagaggcacagaacggagaaagagaagacagggggatagcaagagagctcggcggcggtcaggagagagaggaacgccggacgaaaacaagcaaagttgacgaagactgtgaacgaagcgcgtcacgagggaatgcggggcggccttccagaaaccgcctttgctccagcctcagaaaagtctctcgccactcagaggagagagaaagacgcgtttccatctacacaaagtcgacgcaaagaacacagcagagaggaaaatttgtgattggcgggcgcagtggagggtgctgtggccgcggagacgagggcgctttttcggagacaggagagagggtgagagttttggaagtgaaaaggccgagaaagaagagaagagaaactgtggttccaaaaaagagaggaaggagaagcgccaactgccgcgcgcgctcttgcatgcaggagagcgcgagagaagtacagtgtctgcgtcctgcgtcgccggaaaggcagagatccacgctgaaaacgggagacgagagagaagaagagcaaaaagaaagaaaagacggaggaaaaaaacgaagagcaaaaggaaagagagagagagaggacaccacgagcggggggaccgtcactctcagggcaacggaaatggacagaccgacgagcacgagaaggacgatacagaagcagaaacagcgcggcgttcttggggtgtgcatccctttttcgacgcatctgtgaaataatagatttctgaaaatcgaaacagaaactctcgaaatacgcgcgagagagcgttgagtgaagaaaggaacaccggagtctgtagacatgcgcctttcctcccgccggcgagcagcggccctggagtcggcgtcttgcgagttcggcaccaggtgaaaacaagcatggagggaaaccggaagaaaaggcaggaagaaaaggcaggaagagaaggcaggaagataggcaaagaagcagagtcgatcgcggtgtctcgacagcagctgaggcgcgaaaactcgacctgggggccgccttcgagtgagcgagagagaaaaagccgagaagcagcgagctcgtcgaggcaagacttgcagctgctcgggtgtctctcgaccccccttcgtcggaaactggagtggacgcgttctcggctctgcacttctgcgagtctgcgactccgttttctccttttccttcctctgttgcgtctttcctttcccctttcgcgactccgccgccacagctccgagcgcgcaggtcgagagaagcgcgcaggcctggaaggaggcgaccgcctggcggttgaggggagttcttctcgagactgcatgcgcggcaagtcgccgatgaacggagagtctaccctgcacaaagggcggagccgcgtttgagtctccgcacagaaaacactctcaaacagagtctccgaaaagacggagaaggcgcgaatctgctcccgcgtctccgcgtcgcctgcgcccgtttttctgcccgagactgacagcgcgcagcgctttgcgcaagtgcgccgtttcgtcggggacgagtcgccagaatctttcacgcttctggggatctgttcgagagcgccaacgaagagattcgacggccgtcggagtgtcttctccgcgacacggctctctgaccgagcattccgcatttcagccaccagaagacaacca

SEQ ID NO: 2721 - DNA, 1369 bp, Toxoplasma gondii
  source 1..1369: mol_type = genomic DNA
agacaaagaaagattttgttacttttcgaatgagggacggtgaatgcatgagcgagacaagccgagaatgtaacagcgtctttgaaaacgctttgtaaagctccctctacagacacttacctgtcgagtggtcattccatgtggaagggtcggaagagctaccccatctgaacaggccgtcaaagaaaccggcgatgcctccagttgaagaggaggaggaggagcgactgggggcagcagacgaagaatgctttttcttgcgactgtctccactggatcccttcgtcttctttccagaagacgcagccttcgtttcctctccaccgaagacgctccacacgtccaatgtcccgaagaaatcagctgcagaagaagaggaggcagatggagtcgtcggagaggaagcagacgaagcagaagaggcagaggagggagacgggggaacaggagacgaagacatggtggtgtgcggaggagcagagatgggggtaattgaccgtggatgaggaactctcaggagcatgcaggaaaaccgaaaacgcggaggactggggacctgttttaagagagaacgagagaagcaacgacgaagaacgagctatacagaaggatgcgtccacataagaaatttttgcctagcaagcgcctcataccgagatgtggagactttcacaggtgtgcgacgaagagagaattgaacgactggccgtttacggaagcaagagggccgtgacgaaattcttgcgactctgtttttccctcgaaatgtcacaaaacccggaaaaggtacgcagcaaagagggggaccgaatctttaaagcaactttactatcgaagcgcgacgaaaaagagagagcgatggttgagggagcacgcgtaaaaccgacatgagaaggcgacacacttgagggcatctcgcttctggcaggaaaaaccgaagtctggtggagagctgtgtcaaaaacgcaccgagaaaaaggaggggggggaaatgaacttctagagatagcagaataccagcgaactgtggctctgccggggagagaaataacgcgagagaagtgaagcagagaaaagctaaccgggtgcaactgccggcggagagccggagaccgcgacgctttcgattgccacgcagaagcggacgtgggaaacaccgattagagaaatcgattgcaaacggatcccaacgggtgcttgctggcgcgtgtctctttctcgaggtctcatcggctctcgatgagtagcgaacccgatctcagctgctcctctgcacggacagccgcatgcaagttcgcgacccaatcgaacaaggaattcagtcattgcccggacgaaaaactggacgcaggtcttctctttcctaaaa

SEQ ID NO: 2722 - DNA, 4867 bp, Toxoplasma gondii
  source 1..4867: mol_type = genomic DNA
aacaactgttggctttcgatgtactctatcacaccaacgttactcctcaacggctgcgcctaggcgtactatggacggattactgttatccctcgtgtaacttcattcacggaaacgagaaggtcgtccatgaactgcatttacgaaacgcagctgcttgttgcggcgtaccgcgtctccagcggcaggcaacgcagacgcgcaggaagttgagctgaggaatccggcttggcgtgtaggagatgagagaacgacggcgcgcggcaacgtttctgcagatcccggcgacgtcggacctggaatgtgcttcgactgtgcgctgctcgttttccctgactcggatttctccgatttcccttcgaagggactctgtcgcccagaccccggctggtccagaatctgcagctgagaccattgtcgacgcagattctcatggaaagaccagatggcatctgaaagcgacgagccgtttctagacagagaggcagtcttctcacctcccttcccggaattctgcggaaaagttcctcccatcgtcggagttgcttcgccgtgaaagtcgctcctggtgacccaggcacggacacgcgaggggttttcccgctccggcagcgcaggcgccgtcgaacaaacagccaggggatctgagatcgaagtcaaaggaacattccgcagatacgacgtgatgctgttcagtgtttcttccatggccagcgatgggatccgcgggggaggaaggaagctacagcagagacgccgcgggctctgcgacctgtggaagcaaagttcttggtggaagaggcgaatgaacgaaaccgccgacaaatcccccgcttcttgaggaacctactcgcggtgaaataaacacgagggaaagctgcgaaggacaaggtgaaacgcggcggggtaacgaaactgcgcgctgcacgggaacggatgctcagctgggtcaccgagcgcacagacacacaactcacctatggacctgcgtcgagttgacactcaaggccgatggacggagaaaaaaagaaagagaactgaaaaacgggggcacgccagtctcgattttcgccccgaaagcctcacggaaacgaggcaaagggacccttcagtcgagaatccgctctcatcatgggagcgggcaactgctgccgctcagcagttttgttgaagacggacaaaagcagagaggaaacttcactcccaaaaaaacgataccaggtccacaaaataccaccaaaactccttcaggttcctctttcaacgatgtcaaccgggagaacggcgcgtactcagacgcaaccgccagacagaacatgtacaccaacaccagatgcctagcaaaaaaagaacgcccctttagtaaacctggcgccagcgatcggttggaaaaacagggaaagtggacaatttctcagaggaacaacatcaggaagagacaagccatgagtgtaaaaacaggacgatgaaaaagactgaatttgcgatcttcgcacaggcgtgctgcacggctgcggtcctccatcctgcatgacagccaaggtacggagcggcctactttgtctcatgaaagaacgacagacgggaatactgcgaaaaattcgcagacagacctaaccccaacgaacgaaaggacgtgcgatttccctacaaaaaggccaatttgctcgcagaccccgacagaaagcaaagtcacacgatacccaactcgtcccgcggtgggtggaacgctagatgagaaaagcgtttgctaccagtgatcatcgacaaatcgccagctccatctgtagatggggaaataacccgtaaagaacggcaacaaaacagtgtagcagaaatctcaacctgagagcgattgttggtagatctcaaacggaaatgaaggtagaggttcatgctcgtcactttcgctccgagaaggacccctagtccactgcacaaatcccaagaaacaccgggctagcgctaacaaagcgacatacagcaacaagctggagcgtttctgccggatgcgttccaagtgttgtttcatgcatagctctgtatgcgaatccgtaactacgtggatcagtatgccctttgaacgccctctctcctcacgtactcatgtaggattactcgttactgtctcccttttcgcgtttctttatgcaagtgtctcacgcttatcttatgtgatgaaattaaaccaaagcagtttacaatggtgatactcactttcaacaacacatctgcgccacaaatgcggagtagcttcgagttagtctacatgaggatcgcctccatttctattcgaagactgcgtgaggcatctgtatgttgattccaccattacacgttcacaactctacggccttttgcttagtgccactgtgacacccacgcctttctggcgctgaattctgtcgagacagagtctgttgtgacatactagaggtttaagtcgggcagttctgccccaaatccctaaacaccgtcaaaaaaaagacgaacgagcgtctgcctctctagatgcatgattgaatcggtgcggaagaaatcgcaagcgtagaaagccagatgctgaagatgggtggggtgtttacgtcttcgaaaacggtctcgtgaagctgagcgccgcgaggattgactcttccataaagagtcataacattcgctgccaggcatgcggtaccaatataaaaacaactggagctagcctgcctgatacacgatatgaaaaggaattcctaggtttacatgtccgagtggaatcccgcagcgcatgcattcgcatgttccggtagttgttgccgcctactgcagtgactactgtcggaaacaagtaccacggggactgcagcatcccgtctgttaggaaactcgtcaacgtaaccccagtttcccgattagtgaattgaagatgtgcttgggtgacgcggcacgagagccattcttactgatcgaggcatctgaccacgttttttccaattcgattatactcttccgaagacattggcttcccacagtggcgccgaaagacctgaagccacttttgtcgacaagtaacatcttctgtggaacaagcatccgttctgctggacgtatagctggcgcctatattaaaggactgtgattgcgccatatcgcgaacactcgccagtgccgacattcttcgacaagaaaccgttcggaatgtcttttgagctctgaatcaacatcatttgcttagcagctcaaaagggagtgatagcagactttttctgcctcattgaatgagaggatcaaggctttcagcctcctgaaggtgctggtttgacacaaattacgtagcgtggtctgcggagcagccgtctactgagatccaagaaagctaatggttaacaccgacacgcgcatctaatcagaaatggcagagtgagtttccagacacttccactccaccgcttctctagcacggcagactaggcgcagttaatgggtctcggtaaacgcgtatttccccccagcacatgtttccgcagactcagtcagaaaatttactcgcagaggttttcatttaatccaagaagtgttttgtctcaagaaagaggttgtcccaccgcgtgttcacatggacaactgttacgtagactgatatgtgactacattgacacacaaagagtaggctgcgtgtgtatgtgaaccagcattcactcgctatgttagaaaatgacttcgtcttcttttacctccgatactttgcgttgttatgattgggagagaaaccttttacatgatgccggttacaacaaacacaaacatccgggcaggtgaaagttagtgtgaaccgacatccacgtccaacgaatgaggtcaagataatccggaacacacacatatcctggttggtgtatcctggctgtcggcgacgaggacagatccctgcttgcagagccactgaagacacgaacagcaagcgttttccagcacgacaatcacatgtccgtcatgcggttgtgttctggggggcggttcgactgttcaccgtcacccaatttttggaagaacttgccttccctgctgtgcatctgactgcagccttacacatacaaagccttaactatctggatgttgcaaggtaacacgggacggcgaatgccgtagttcccgaaacaaaggaagacagacgaacttctacagcgtgcattcgtgcgcgccagctactcgagagacggcacttttccccgggtgcgccgtggttccgaagatccaaaacagttaaagtgaccccatgaacgaccattttcggttttcagacttaaacgtgtgctcgagttgtcccagcgcgttcatttttgactgttggttgtatcctttctcgaagaaagtgaaggaagtccgtgtggacgccgagcgcgcatgctcgctgcatgtggccattccatgtgtagacacggaatcttttcgtggtcggcgtccgtggctgaatcgaattcatcattttgagattgttgcacaagcccttctgtttctgcgtctgaatgtctgaacgtgttaccttccgctgagtaccaacgcctcatgctcaggcgaaagctgctgagcttcctttctgtgcatgtgcagcccgagtgtctggctgcgactagcgcatccttgcgcatagaaccgtgaattgtccacatttcttccatccattcctaacacacacggctccggacggagcgagagaagcctctgtttgatcctgaattgagtggtcgagaatgcccccgttttttgacgggcaagccgtctttctggagggaaagatcgtagcgctccgactcagaggagggccggcgagcccgtctttcttccgttccttcgttccagtcctgccccccgtttccaccgattccaagca

SEQ ID NO: 2723 - DNA, 2022 bp, Toxoplasma gondii
  source 1..2022: mol_type = genomic DNA
agctcaaagcacagcagcatgacgcagcgagagatttcagagagactgaggaggaccgagtaaagcgaagggacagctggagaaaatggaaacatgtacaagaaatgacacaggaccatcgacaaggaatacaaagaaaacatgcaccgtgaatgagagagctcgatcaccctgtttagactgtggaccagactcaaatggtccctaagactacaaggtgaaaggcacaaaaagaagaattcgctgtttctcttgaaacgaggtccaaagagtctctcgaagtttcgcacctgctcctgtgacgaaaaggatcctctcttgttcgtcgcgcttatttggaaacgctgaagttgaggccgaggctgaacagccgaagagaagccgacgcagagcgtccagatttcctgagtttcttgttcgtctttccatctctgtcttctctgatcttcgagagtcaaagacgaagccgaaccttctctctcctcttcttccctcttcttttctttccttttcttttcaccactctcaccttagtgtctcctctccccatcctcgacggagggccatgtctctgcagccgtcttttttttctctctctagtgttttcctctccctcctgtccctcccttgccctactttcttggtccttcttcgttcttgttccttcttctttctcgttctgtctaagtcttcagggcgtcggcagctaggtcttcttctttttctttcagagttggctgaggagaccgtcgctcgcctctctgtgcttcactttccttctcacagacttcgttcttccttcttcgcttcaacgcccctgcttttcagctggagtaggccttttccatccgcttctcttggccttcttcgccgctccatcccgatcttcccctcgcgctggctgtccgggtcttcggtcttccctccttttttttctctgaacttcttctttttccctttaattccttccttctccactgaatttcttctgtgtacgctgagttccctctttgccctcctgaatctcttgtttccccggtgaacttccttttccttcctcttcctctcgcgtccctctctcctctgttgtgtctctgctctgtctccttcaagcttttggaagcatagtgcaggttggccacacacaactccggcgcagacggaggaaaatgtaaaaaggcgaagccggagggaacgggaagactcatgttttttctgggacaaggaactccgaaaaaaacgcgaggagcgcagcggcagatgtgcgcatgtagattcgaggtctctcaataaaaaacggcgaaacgcatgcgccagcggagtgccaagacaccgggagatcatgcctctgtttttgaaacttctgtcggaaaggagagccgacgacccccgaggcgaacagctgtcgctttttctgtttttcatgaagaggctggaggaattaggagaaagagacaaacgacttggggggactgcccgcctgcggaccctacctcgttttcggggacgacagtgaaaagagcttggttcgtctccagaaacgctctctttgaaatttttgtaatttttgtggccttcgctttctccaaatcacctccagtcttgggagcgcgtttcagacgcgccgcctcgcactcaaacggagctgtccggccttttttctgcgcctctgcttcctttcgctgggcttccacagactctcggtctcgttcgcaaaacagggcctcacgctgacctccaagtcttcgttgttcgtcgtctcggtgaccgaattcctcttttagtcgcggtctctgcttttccgcccactggttcctcgttctcttccttcttcttcttttgttctcttcttcttctgttctctctcttcttcttcttctgttctctctcttcttcttctgttctctctcttcttcttctgttctctctcttctctgctccgtctcttctttccttgccccccctaccttcctcccgctttgcttctctctttctctccctttttttccgctgttgccgcga

SEQ ID NO: 2724 - DNA, 3733 bp, Toxoplasma gondii
  source 1..3733: mol_type = genomic DNA
gccgcacttggatgccaacatggcgcactgggaaatgcagaatgtggggatgttatggaaaaatacacggaaggcgggggtggcaaagacgcgaatagaacgcaacgagatctggtgtcacgcgcaagaaatgtggagtttctagtgcagacacgccgctaggaagactccagggcagacgtccaaagaaccaatgcatgcacactgccgttgagattggaagtttcgctgttcacgcgtccactggccttagagccttggcggatcggcgagctgagaggactgtggtctttgttacggagttttcaaacacagacccaagtcttccggagggaaatagagtgccgccactgtggagtttctgcgctgaatcgagaccggacaggaacgtaaggggaaggaggttgagatcttcgcacgggggaacaccgcgctggactccctcccagatgaggcaccgcagcttctgcagctgcgttcgtccctaggctttcatctggcttcccgtctggcgtgttgtcaaaagataagagcgaagctaaaaagaaaacgagcccgtgaaaactgactcagaggagagtccagaccccatatggaacgatagttgagcaaaacggggaggttttccagttcgctacgaatttccgagaagagtgaacaatgcgccccaactctgaaggaaaagtcaagagagttggcggtatcctaggaaatgccggggaaaagggggagacaaacgggcgaaaagcgagacacggagaaggaacaacggagagacacggcgaggcggagagcaagacagtgagtgacagacaccgccacggacagaaaagcgcaaggacgcggcagaaacgatgggtatggcaagggtagatacacaggcatagagaaggggaaatgggaaagacaaaaggaaaggtccgcctgcgagatgaataactcagaaaagagtgtaccaacgaacgtggacctggaaaaattcacgggaagagagcaactctgtcaggacacactggcggcaccgagcgtttccgacagcggatccgacagcatggacagaaaatccgcggacgagacaagaagtcaagcaattatttcgagactacctcgtttccatttgagaaaaaacgtccaatagacgagggagggcacagcagaagaacgagtcttcgaatccagagaggagctcgagtaggtcgagcgatgcgacctaggtccggaaggaggcggctctttcgggaagtgtgcggaagatagtggctctttcccgtacatcaaaagagagaaaaatcgagaacttgtgattcgattcagtttttcacgatgattctccgatggcagagaagggggaaaggccgggcaacgcgagacctctcttgcagcgctctaccatcgcaaagtcacaactgttgtgacgatctgaacctgatttctcatttgatcgtttggaggtttcggcaattcaagtgcgctgttggtctcagaaacactcccttctgtgcgatgaaggcgaccggtgttccgcattcacttggcgagcatagccgcaccaccaaggtggtcagcggtcccgattagaagggggggttgggggcaaggaactcaaggagggagtgcgggttgggtggcgctttgaagacaagtgatcagaagtcgcaatctgtgcagcgttcacagggatgcatgcacaagcgtgaagcaaagaatggagcacactctcaggtcgcctgaagcttcaaacgaagaagagacgactcacggtgaagcagcaacattattccctttggaggtttttgcaaggacccggaggctcgagagtaggattgcccattcccgaatcttcgctggactcatactcgcgttcagcgtgcttgcttgaccagacccgcccgtagcaactagactgttctagcttctggaggtcgaagcaagtcagaagcaacgggactgcgcgcgttcgacggaggcatgcccagtagcagtttgcacggatgtgctgtacatctagtgtttcgtttaacgacatgaagtcgtagactgtgtgtgtgtgtgtgtgaaactgcgcgctagtgtctgagctccagacgatctctttcgctcactcgtctagcttctctgtcaaggaagggtgtgacccggctactgcgtaaacctatatatgtgttcatggcaaaagatgtatttaggatgtctttccttttgtttcacctttcgtggtgcgattttaacttgccaggcacttttgagagacagtcgaaaatatgtttcccttgccctagctctcgcgtgcgaaccctcatcgtcccggctcttgcaggagcaagacggggctgcggacggcactccccgcacgaggagtcgctagtccggtggagttctcgagtcctttctctgcgtgttcgtggctcaattttcagtggagaaagatgggtatgtgtgtgttgttgaaactaaggcgtacctcgtggaaatatctttttgttttgcttcggtttcgcaaacacaactctggcttttggggcttatcgtcgcaaagtgtcggcggggactcttctctcatgttggcgagcggaactagacaacgagacgagagcagacgagagagctgagcagaaagcggtgaaaacactcctttctgtgtttgcatcgcgattttttgccgcaagacggcaacttgagattcatgaagccgttggttgggagaaatctgctgttttgtagcgagctcttcaccgcgttaatgcggcaatgccgcagtgtctgccagaagcgcgccgtagtcattcattcctccacagtggatagggaggctttgccggtctgaaaacggctaaaaacgccccacagacataacgcgtttgtccttttctcagtagctgtatagtttcctcccagtaaagtggcaaactggagtcttctagggacgtagacgggcgagatgtgagtgcggatacccgcccctcagctattttcgcggactcgaggcaccaggctgtactttcgtctgtgttctcttgcagtttaccgcttccgctgtccttcccgggttcgtctccaaagcgttggctttttaaccatcgaggtgttttaatgttaactcactacagaccatgggagcgaagacaatctattatgtaactccgttcatagaaagcaaaatgctttcacgcttgttgcacgctatcatgtgccgcagcccttggtaacaacgtcttgtttaagacctccctctgttccttcaattgtttgactctatcgtctgcgtttcttttctggataacgcatgtgcaagagattatcgcctttcttcctgcatttgaggtatcaaatcgcctctgtagcggaatcgctctccaaacctaaagtcaagcggtctttcagcgccagcttttcacgtcggcattcaatttttttcccctgttacgtgcagttctagctgtctacatctccgtggcggctcgcacgctgaaagatttcggttccggacgcggcgtgtgcctgccgttccattctgctccagaaatttgcagagaattactgattggagtgtgcacacaagcgagtggacagtcgcctcggtgctgctaagccgttggtttcttttcgctactctgaaacccctttatttctgtgggcctccaagtgctagttgactttttccgtaatgcatgcagtgggaaagtgtcgttgtttttacacactggatggtgcggctttgcgtcctaccacggaa

SEQ ID NO: 2725 - DNA, 4482 bp, Toxoplasma gondii
  source 1..4482: mol_type = genomic DNA
gtgtcgtgagtgaaggaagataggcggcgatttttccaaagatatgaaattgaaaagcccgattttcgaaagaggcagggcaaacggttctgtccaggtagctgcatgcatcgacccaggaggctcccccttgctacgggaagtgagaacaaggttaaattatggccgtatgtggatctacgttgacacttctcggttagaggagttcaactctgatcgagcttacctccctcaggaagatgccatgcctcagtggaaagaagcgttacgcagaagacgcaaaaaaggacccttgacatcgccaggtaaccaccgaagctcgaattccgaaacagccttccgcccattgctgtcgctttcacccttttgagtggcattcgcagatgcacgtctacttcatcaatgtgtaaaacatctatttacctccgtatacatatgtgcgcatctggagtgagtttcagcgggcgcagacacgaatccacatgcatgcacagggcgtagtcgttcgcggcatcgggggaagaatgcgagtcatgaaatccgtctgccctccatttcacttctccctactttccatatgctcaaaagtgggtaactgacaaacattcgttcacatacgaatagacgtacacatacacacgcataagcatacatgtatacggatgtatacaaatatacctatatatatacattggcaggggagggtcatatgtccacgtgcctgtttgaagcttgtcgagtaaactaagaagagaaaaactggaacaaaagagcgaagtacaccaagcgccgaaacggttacttggcgtggttgagaagtcggcaggtgccgacgcgcaggagttagcttgggcgttccacctacgggacacagattctacttgcgacggggaaaacgcgcagagatttgcgttcgcattttcttttcaagcatcgaggttacacacggttacactttcacaaattttgaaggaaaccacggaaatacccatgataacagtttgcgcgtatcagtggacgccgactgcggaccggcagagacaagcggagacaagcgtctaggttcgtggacgcagtggaggatccgcaggttgtttgaaaacaggggaatttaaccgattttttcgtgtgcaaaggcagtctcttagggcacgctacagaagcgaacgaaagcaaaagcgtggtcgtcgtaccgcgctttagccgctgtgtcacggcggaaatctgacgcatgcagaaacggagacaccacgcaacggagggcggggtagcgaattgagtctctggctcgcaacgaggaagcactgttagtcgtctctagacgagaattatgtaccgacacaacgacacaacgatttcgatttgcattgacatttacacacccagttactggagggtattttgactacagaatgaaacagcgtctgcgcacgacgaaggacagcaaattcgtaggaggggaattgttgattttcagagcgattttaaggcgacaattatgcacaccttgtgaaaagacagtggaaatttctttcaaatccagtaaaagcgtctactaccatcggcacactcactcaagtaggcgttctgttgccagcctgaaaacagggctaaaaaggtatcaagggatcctcttggcgacgttaaaactttcacgcggtgcttcgttctctgtgcggatgtgagtgtctttaatgccttatgatattgaaattaagccttctgagctgttttccgcggttcagtgagcggcggtgtacagcaatcgtcaagaactcggccgtctatgtctcgtaactggagtcacccattctatctccaaggtaggatgctgtctccttttattcgatttgcgttgttcagttctggacagcggacgagagaatttctttgctttccgctgacttctgcgatccgatatgcgcgcaagttaagtcgacagcaccgctctgaccgaaatgtaggaacggctacctagccgtctgatgccggagaaagagatgttttagcgccgcggcaatatatgccgcacgagtaaaaatggaattctgaagttgactcgggttactctgaaactatgtgctcactggtttgggctagaaagccttgaaggggtgtaaacatgtgcagaagggatttcagaggttgctatttttagagccctgtagaagaatgtagttccaaaaaacgatgccgagcgactcttccaatatgacaacacggaaaggtcgacaaagagactcctctctataagtatttgtacgatgggggacttctgaagctgtggtaaaagcctatgtactcggagtgtgcttgcttttctccactcaggaggtcacgcgtgcaaaggcaagttctcccaggcaggtttcggttgccgcctggactacaaactacctaaaaagacaaaggtcccagagagacaggctgtaaaaagtggagcatccttcattggccaagagtatgtgagggagctgcacatgcaaacgcttacacgcacttgtttaagcttcgtgtctgtcgttcacggggtcccgttgtctcagttctgcgagctagctaggcaaggtcgagtctatggtcagggaatgtttcatgatgttggtgtcaaaactcccggattcccaacattatgcggagagttgaaacggcggaaaagaacgctcataggagactgtttcttccgtgatcatcgccggacatgttgcctgatgatttggaatcaaatcatcccatccgggttctcctgccccgcactacccctgctttacccatcctttttcgaaatggcctcaaatcatcatcgtttgcgctagagcaaccgagcacatgggcaacaatttggagtatttcgtctccaataacgaagacggacttaaaccgtaaacttcgttttttgcagagaaggcaagactgacccgcccttcctctacgttggaccccttactagggcgttttagtgtacattcgcctgacacgccgtttgaaatccaaatgaaaaactcaaggcaaagtacggtcgcgatacttccgattcggagggaacgaaaagagcttcactctctcgttaccggttcgtagagaatccgcagggagtttagtgttcacggaagtggcgagtgctgcagaataaaccagttagcgagtgactagactgggaagccgtgagaggcagtctccttttctcgagagcatgtactctgggtgagactagtgatttcgattatgactatctttgtttaccggatccaagttctcgcgctttgtatgctgctgctgttcaataaaaagattaaaagagcgcagttgttccgcgaaatacgtgtcaaaaacgttcacgtaggcatgcacaagttgtctcaaggccagcgtagacaccggttttgtatctcttcaaacaaataccagtcaaacgcacaagagtccggagattcacaaggctctgtggagctataggcgaatcttcgaacgagcggtgttatatcttgcggcactgcgctttcaattcgtccgtcaaaagctgtcagtactgaaactttcatgtctcaaggtctaaactaaaccgttttcttacaaccagtctttgcggatgccttcgaacctgtggcgggaacaccccttctctggtagtaaatgtgcacgccatgagtcgaaaaaaagaactgggtgatttgaatttcatcattggagtcacgttcattgtcctctgtttttttagggtctctgtgtactcgactggagtttcgttcgatctcgagcaacccaaaaacaggatgctgacgctctgctctggaccgggttgacgaggctctacacgccgtccggcagaaccacgaacttgaacgaccttatttcattccagccacgaaattagagcttcccaggttcgccacatccgtgtcagctgtaaatggacgcactcgcagccaacagaatcccgggaaaagagaggaaggtgctcggtgtccatattgcgggccagagagatttgtgcagaagcgttttgttgcggtagcttgcatgcaacagtctggggcgcaataaaggggctgccatcttgacttcgaagtcacttctccgtctcagactgcggagagaccaccatccacagttggcaaacttgtccgttatcgccacgggagctgccagcatgctctatagttttctcggggttcagattcgcggtggtgtgctggacaccggaaatcgtggccactgaaaataccctgcgactcccgtccttttttgtggactcctttttcaacaaactactcaattgtcccatcattgctgtttccctctttctctttaccgacagtggctgctccttcggtcctgtcccgtgtccggctccccctggatgtcgcttttctgcacgcaactcgacggtctcccgaaacgtttttctttttcctgttacaccgctgataacagctctttccccccgttttcccgcgcttccattccgaaaagaacacacga

SEQ ID NO: 2726 - DNA, 932 bp, Toxoplasma gondii
  source 1..932: mol_type = genomic DNA
aaccgatcctctgcctgtctcctgttcttcgagaaagaagacacacgcagactacagaagactgtctcctttccttcttcgtctcaccaatatcggggttgtcgtaaggatttcctttcacagcaatgaggaccttgctcttcttcttcttctcctcctcctcctcttcgcctcccgaactcttctcgtctccctcctctcgcttctcgacgtgtacaaagagtgactcgatcgtccaccttcccgtcgctccatcttcttcttctttttcttcttcgtctccttcttcttctccttcgtttccttttccgtcttttttcctcgagctggacgtccctctggaccgtttcacatcttcgtaggcttcccccgaggcaacactcacgagggcgagatgcactgcgcgaatgcggtcgcgcagccagagtttgaggaggaaaggtcgctcgcgcagagcgcgccagtcgagctcatctcctgcaaagagactctgcgaagagagaagcagaacagaactgacgctcgagagtctactcggttgaaactgccggagtcgcgcgagcgaagcggggcgcgttctggactggcaaccacacgcgtcaaaggaaaaaaggaacagatggaaatgagagaaaacgaggcacttgcgtgagaggaagcgagagaacatccacacacaaacacagttcctcgaaagcggcaaacgaggtcgagaggtcgctcgggcatggcggcgagagcgaacccacgggggagaggcgctcgccaagggagaaggaaaggaaagagggaaagacagttgcgagactcgacagttaggaaaatccttctgcggagaagaaccgcgccctccaacagagcacagatggttgggggggacgacggggacatgcgagagagaacaagacaaggaaggcccccgtgtctcccat

SEQ ID NO: 2727 - DNA, 2084 bp, Toxoplasma gondii
  source 1..2084: mol_type = genomic DNA
gaattccgtgattcaactggcgatgacatcacgctggtgtttacaactgtgcttgccccacatttctctgccatccctgtcgtcacgtgcgacaactgctggtcagggttcttcgagccgggttcgttgcaaatgcccacaaaatctcctgtttgaccactgcaaggccaccccgcgggaggcgtttcccacccagtttcgcttttgactttctcagctggcacgcagagacgggaatcatggttgagcgtgtgactaccgtcccactctgtcgtaccatacttctgagtggatgcgctcgatcgttttgtcaatgaagcaagaacacgagcagcacctgggacataaaacgaccggcggatttgcagatgcggcattgagagcactgcaggatggttttccaaacgacggcacgattttctgccaagcctgagaaacagatgaagagaaggaaagatagtgcaccctccttgttatcacgcactgtgcacaacacgtacgcattgtaccagctgtgtggttaccagcacagctcaatctcacaaaacagatctataccggagacacttgcacaacatccgactccataaacgaccacgcgcgagcatccctatgtgccagttgtaacggagtcgcaggattttgaaacccagaaccgcttgtcagagacagggaaaatgctgtccctaccaccatggtaaccatcaggccagtagcgtgaccagctgcgaacactcaataatgatggtcccgccttgcatgtcacttcaggggggcgccccggacatgaggaataatgaggcttaattagccatatcaatcgaccaaaacttgaacagcccaggaatctgaaatccggcaacgattaccaccggaaatgcctcgtttcagagctgccgtttcgtttgccacgcacatgccaccagtcacatcacacccggtgacgcggaggatgacacgtccaatcggtctcttccggaaaaggaaatccacgcagcatgtcatctgatacctggtgctggatccggcgttattctttatttcccccggagctagttggccaaacacgagatagggtggtagcagttgaactcacagacgccggaccaaaacacatcagggcatccgaaaatccttcagcgacgtaaagcaacaaccaacaaaccctcacacatcgtatatcaaagaaaaacgaaaacgaacatgcggcaggaacatggcggttcacccaattgccactgcgccggaggttccgcatgcatcgcagccagcaaggaccagtggtcccatgctccggtgaagagagaaagccaatggaccggctggtgcgtagagcgcctatatacctcgcctgatgcacacttgttgcaacgggtgattctaccgtggtgctagccacccgttgtggactactgacagtcaaaaggcgcattttcccctagtggaaaagcacacacgtttttctggagagtgccgcacccattctagtgatgctgcttagctgaacggcgatattgtgcaagcagtggtcgaaccaaacccttcgtccaaaggttcgctgaagtgttgatcctgcagtagtgtacgtaccgccgcagcgtttcctagccagtcacagccgcatgcgaaaatgactaggtcggagccttgtggatggcacaatcctagacgtttcggttcaccggcgaactgaacaatcctttcgctgagaatctgcgaacaaacagccctgatggcagtacctacgctaaaaagggttctcccctggggggtgtgctttgccctacttctatacgcagcacttgctgaagcgggttttcagtttcccgacctcaccactcaccccatcaagcaacacgcgattccagtagaagaattctttcctgtcaaccggtaagcgactataagtttgcctttgctacattcattagtacgcctaactcccttcagccccggagagattgaccaaggtgtagcaaagagaagtaaaccgagttctaccagcagagggacaggagatgcagctggccgcgatggtgaagcagcggctccgacacgttcgccattcattcagttgccaacaa

SEQ ID NO: 2728 - DNA, 2020 bp, Toxoplasma gondii
  source 1..2020: mol_type = genomic DNA
cgcttctgccgatagttccgagtttcagaacaggcagaagagacagaaggaaaagaagaggaagccgagaaggaagacaaagagagaggagaagaggcagacgaagaagaggcggacgacgaagaggcagaagcggaggacgaagaagacggtgaaggagaagagaggcgacaaggaggagttaacgcataggcacctgaagaagtagaggaaggcctgcatttttttcgcagtgttttgtcctcccgctcggtctcgacttcctcgcctcgcgctcgcttctgcctgcgcattccatgcgcaagcttcggactctccaccggagaaggcgaaacctcctcggcctctcgaggcctctctgccgagggagggtcatggttctcatccatagtccgcccatgacaaagagaaggagaaagcgagaaagagagagaggagagcgagaagagagagaagagagagagaaggataggaggaggctggagacgagaacaaagatgaaaccgagaagaaggcagagatggagagtcctttgtccgagcaggtcggagagaagagcggtcgaaaaaagagagacacacacgaagcagcagacagaggagaccgagcgagtttgtcttgaatgcaagagagaagacaggcaggagaccaaggggaagaagaggaaggcgcagcaacaaacaacaaggcggacccaggcatgaccactggagaagaagcatttagagtctttcgtcgcatcaagttccactttcatgtacacacaccgtcgcaagtacatgcgtaagcgcttgtccacatgcgttcaagattgagagttcttgttcgctgaagatccccgttctcgacctcgctctctctcctctgctgttctctcgtgtctcctctctccctccttctctctgtcatttctcgctgtctctgtctatctctctctctctttctctgtgtctctgccgcgcttttctcctcctgctcgtgggcagctgtgcgatgctttccaagaactgtcaaaaggcggaagagagagaaagcagacaggcaggaaagcggatcttggagacgaaaagcaagaagaaaggctttcgaagtgacaagacaagagagggaggttctttcactgcgactttgcgtacgcgggggccgagtcgcgggagagacggatgcatgtgcggcgaggtctctcggatcggagacgggggatgaaactggacgttgaaaaaaaagagaggcagaggcagacgcgtctggcggccagcaacgttcaagccagcaacaggaagaagcgagagcggaggcggcgaagaaaacgcaaagacggccttggtggaagaagaggaggagggcgcctgctcatctccacccaccgttgccgggcgcactgtgaaaagcgaacaagacaggggggaggagggtgccaagttgaggtggagtgagggagacgagagaggagaaaacgcgttttgaggaggattctccagatgaagtgaggaacgcctttcctggcgaaaagactcgacttctggggagaacctcagggaggagaggaccgcaggggtgtgtgcggcgcgagtggtgcgagtctcgagtctgacggcagcgctgaaaaagctctcttttttctctgaaggcgtctcctctgggtcgccgcgctgtctgtgcgtaggcgtctgtgtccacctgcgtcgagtccagaaaaaaacagagaaaaaagactcgccggaagtccactgcctcagcggccttcccccctgcttcgtcttcatctgggccttctccttcaccggaaactttcggggaacctctctctgccggagctgcttgcgtcgatagaaagcagcgacggtggcgcggaacgaagaggagagacgccgacgcgtcggcggcctccgagcaaaaaaacgagcgagaactctcctctccactccgaccgaaggcgatcgctgtcggcccggagaaaaagaaaccggtctccccccggtcctcgttgcaactggtttctccaagatcttctcgcata

SEQ ID NO: 2729 - DNA, 2729 bp, Toxoplasma gondii
  source 1..2729: mol_type = genomic DNA
attgcgagaaacgtacatggtcaaggagttagcaccgccgccggtcgggtcttcctcactactgggcatgcctctgcctcgtaccatcaccgttgttcaagttcctcttctctctgctagcgagcttttggtggcgccactgccggcgcccgtcgagcgcgggggtggtaagagcacagaaagacaggaaaaagcaaagagtaaagcccgtcaaaagaccgccggctaccctgtgtcctttggaggaaagggggagttcgcggaagggaaaccggggaagaaaaaggagaacgacagcgggagccgcgaaggtgaggacgggcgcggagccgcgggagaaggtgcgttcacgcgggaggttttggagaggactttgcgggactcttgcgaaaaaacaggtttttctgacgttctcgacgtggaaaaggtggtggaagccattcgaaaggaggcagcaaaacgagtgaagcaggacagttcttccgaaacgtattccagctcatcggcatactgcgacccggacgcattcacggaattcgccaccgtgctgtaccccgaggcctgcgcacgagttgagcaaagtctcgcggtggaacagaaaagcggaactgtgaaaattcgcagagcgctgaaaaactctctgcaggcagttggtgaatggtgggctgcaattcgcggacaatggaaatccccctcgctggcgaacccactctggcttggggtggtgggcttgggcgccgcagcggttgttactctgttcgcatccgtggctgtaagaagacgtaggtgaggtgatgagaaagaactagttccgtctgaaatttttggacgagttgtcaaaaaaaatgctgccaatcgtgaaaagatttgctgcagatgcagcgggtgttttggagaacagtggcaggtctcttacgcaggtggagtgcagttcggttctctctagacacattaattgccaccgctatttccacgcacttcctgactgaagtctctgtacaaacatacttagagatattcgtgtagttagatttctttcttcccgcaaaattgcgaattctgcattccagagttgtagagtatctcggttggtgaaatggatgtagtactgttggagtggaacacgcggcagtatataaaagaacatccgaaagcagggctagaaatcgtcggcgaggacttaggactatagtaagctgctcagtcctgtaaaagaaaattaccaaacagcacagaacagtcaccgacggtaaactgcagttgactctcaaggcttttgccagcgacttcttatcgacagacattttttgttattctttcagcacaaaaagtcggcggccggtcacttgctagacaacaaccaaagcacagccagataccgacgctgaagtacctagtcaccgtctacggcttaatggttccgccgcgcagatgatgccgattaaaggatcggatttcctgaacagccatatgtagccctgtcggttcttcatgttggtcttagtggcgtacggtatttctgtcacatgtagatgctaccatcgcgtcagattcggtgctacgaacgtccaagatatcgatacgttcagtacaattatggcgataccactgttgtgttacgaaccggctgcgtggtattacgttagctctctgtgatggtccttcaaaccaaaagccattcttcattatcgatacgttcagtacaattatggcgataccactgttgtgttacgaaccggttgcgtcgtattacgttagctctctgtgatggtgcatcaaaccaaaagccattcttcatttccttaccactggcatgcagtccgcaacagggaggcacaagacaaagctggcatattgtgcccgtgagatactgtaaatgtttaatggacaatcagagttgtgtttcagtccattcgctgcgctggtatttacgacaaattgcatggcgaatgctgcaaaagtgagaaagggtgaaaaagatcaccgcataacaccgcgcgaaagcggcactgccctgtcaatgaaactggcaagagttagcgtacagcgaccacagggcgcaacgcaaattgtcaacggtttgtccctggttctttcgattctctgaacgtgccgcattccacgccgggaccagaaaccttgacataagtgtaattttgactcctgttcacaagttcatgcatttaacattctatttccagagaaacgagcgcggctcaaaaatgttttgtgttggttttcgcggggtctaagtgtatcccatatggtgcgccgataagtcacgggagcgaagaaggtaaagcatgcgcatgcactcttctttttttgtgaagcatgcggttgttacagctgcctctgcaactgtactggtgagaaggcaaaaacaacttttcggtacgggaactttgcatccgacataatcagtcgtgtggatgtgtgaggcgtggatgtctggtgtcgagcagtgctgcgaagacttgcctattttgtcgcacagcgaaagcgtgttatctgtgattttcccaactctcacagttaaacagtaatgatctttttttccatcatcctgtagacaacgtccgaaaaaaacgactaccaatcaattgcaaacaggggatcttcgctctacgccaaaaacgcctccctttctcggttcttcgtcctgcaagtctcttgccggcagctctcagttcaaccgaagaaaagttgccgcccctttctcgagaaaa

SEQ ID NO: 2730 - DNA, 1294 bp, Toxoplasma gondii
  source 1..1294: mol_type = genomic DNA
tagtcaagctcagatgacgcaatgagacgccactcaaagataactgcgggctccatggaaagacaattctctctgcagacagcgtgaagaacttctcgtgtagcgctaatgccgcaatacacatctatatttctcttttgcagagaaaaaggtagctgaaatacgcgtcacaggatgcatcaattacaccaagaagacacaagacgcgtgtgtgtttcaagagcggcattacttccctgcttcgcatttttccttcgtcgcggaagcggtaaaaaaaaggcggtgcccctaacgagtaactactccagcatattgaatgagtagaacatcggaatggcgcaacaaggcaattcatttttctaaagcggaggccgttctttggaattgaactcacgtagaggacaagcatccagtgtggaagcctatgcttccgaaagaacccaggcttatgcggatttatttcagaataccgtagcagtttcagttaagaggcactgtaatggtggcagatataatttaccactattatgtgctcctggacccaacgacatttctgctgtgccatagctatgcaaccccgaggttgctgcaagagttttcggggatataggacaactttggataccgttgctcccgggtctctgccgtgtagtgaacttcgtgcgctgcactaaacacggcctgaaacacttcgcctgttcacacgccatctttcagacgcgtagccctatcaatggtgggtacgtttcggtcttcgaaacccacacactacacgtttggtcgcctgcaaaagttacactgatgacgtgaatcaaatctgcagtccagttccgagccagtctgattttggtttgttgcatctaggccactccgacgctttgaatctgccacacgaaagcagggacaggagatactcatagacgctgttgctttgctgccgtgggagtccctgtgttcacctcgctggtgacttatagtgtgccctgatgatgcacgtgtcgcgggcatccccatgtaaaggtgactcacccgatctatgggccttttttggctcaagatgatccaggcttgttgtcaccaagagtccatcgtttctgggattgatacagtttttctttactggagcgttgagctcgtttccctgctgacagttgacacgttgccgttttcacaatctgtcattgcgtgctgcattctaatacgacgcacagcagtggaggctcccgcctcacgtttttgtcgccgcgctattgtgtgaaggatcagttgtcttgccaagagcagcgccgcgaaa

SEQ ID NO: 2731 - DNA, 1997 bp, Toxoplasma gondii
  source 1..1997: mol_type = genomic DNA
cctccgatttcctatagacagtcaaactggtgttggagctcattggttattcgacagtccgcgctcaatatgcggcattccaatgagagagtttgctgcttctgctttttcaagcagcagcctctctgggcacttccccatcttcgtcaccaaagccattcagcttccaaagcataaaaatcgtgacaaattttgactcaagtgcaatttgtgatactgtcactcggtgcgccccactcattcgtcttatgaacagacctctgagtcacgctgacacctgtccgtggtaagccgatctgacacctattctggtgaaggatcaacagagaatggcgtcgaacagaagtagcctttgaccggacagctcgcctctcgagagaggcgcatcatcactccacacgaaatcgagtggcgatacgtttccgtcgcacggtaaaagtgtcgctcggtggacagtcgccgcacaccagtctcgtgttagatttgtttgtgctggagaaccgcctgccggaagaggattttcttatgagcttcaggctgctacgaattctccctggtgttgtttagcgactgtcaccaatgtgtttctgtcctcctgtaccgcgtaaaacggacatttttcatattgaaaccggagcctcaccgactcggcaacatcactccgtaacgacacagtcgcctgagcacaagacagcgaagtccgtgcctacgtattcgactgaatgcaatctggaaaagctctttcgagttccatggacggagatcagacgatcttcgcttgttatttgattcccggggcgtcgccgcatacggaatatatccgctcaaatgcaacaccagctcccggcaagatactttcagacatggcacccgacagaacatgttagaaaacaccttccaggtaccaaacaggtcgctgtgcgactaagcgcccgtgtggtactgtcgcttctgcgagccgacgttagtcggaagaacgcccacaaaatctgcggatacgcatgtatcgcctagagggcatgctttcgtgttcttgtgtattttaattcacacacctcgaagagtacataaccagacttatagttgccgaactcccgcttggatatctggtgtagctttatatcgactgactataaccacttcctccagcgtcgaagctgtgtgtagaatctttgctgcccctagaaaaccacagcgttgacacgtagttgccagctgcttttcaacaagactcaggctagatacaaaaagtcactggttccgatgagtaagaacagggacgcttttttcacacattagcgtgcaagtaaatgggtgttttggggtggtaatttggatgcatgcatgctgtgcctttgcgccgccagaattggttcaaggagacaatcctcgcaggttccactcaggaaactcgcaagcatgtccaccgttttcatcagcagccttgaccgagccgaaatgtgctttagtacgcgtttaacgtggctcgttcagaagtcagtaagagcggacagacttcccggggcgctgcctgccttctgggttctcgtggcgcatgtttgaagttcgattgaaacgcgttctccgcttcagtcgaaatgtgtgttcagaaagagagtattcctgagttgttctccgagaaggggtcagaacagtattgctgtcacgccctgtaaaccgtctgcggcgagtgtgtctgcgttggtgacgcttccatgccgtgtcgcgtttgcaggggggactttcgacttttctgtgtatttatctcgcctgtcaaccgctcgtgcccgttcagtgttgaatgcctgagtggtgtttttccagcgttttgagcgatcttgaattccccttcgaaacaggccgtcactctcctgcgcgtaccccggagtactacatgatgcgcttatctgtccacttctttgcgtagttcgaatcgaataaacaggaacctgttgtctctacgtcccgccgctctgttttccctccagttcagtaca

SEQ ID NO: 2732 - DNA, 2717 bp, Toxoplasma gondii
  source 1..2717: mol_type = genomic DNA
ttcgactttgttcgttttcatgtcagcgaggttcgcgaggcagatcccccacttgagcgcaggagcccagaagtgaatggtgaaaggccccgcgggatgagctgaaggcaaaaacagaagactctgcacctcggaagacgtaagcaccacttgcctgctgcggaggggttgctgcacttcagcgagaaaaggctgaaaagtgcatgcagtctgcttctggagattcaacgaaagtagacggtcgtgctcgtcgctggacgcatccaacagcctgtagagacagtttcacctatggctgtatgcagaggtatttcaaggaccacacacgcaagcacagatgcggctatcccccacacagtcccttatatccatgtgcacttcggggtgcaagaacgtgacacaggtaggcgtcgatgcctgcatgcaccatagaaactcgacaccgaaaacacacgacaaaagacggcgcgtgtcaactctggtgacaaacggggaagcgaaccgcgaatgaaggggactccaggaaagaaggaagagagggaaacggggaccaagacagtgagagatgaacgcgagaagatgcagaggagaggaacagaaaaactcacaaatgactttcttcacgcggtccgagaggggtagctggagcgccttcgcctggaggtagggagcgaaccccgggaagaagattttgtggaccacagatgccatgctgtcaaactggaaatctccttcgctctcgcctcctctttttctgttgccacccgagatccgcttccctgagtcacccttcttctggtcgacgacccgcgacagacgtgggcgacgcgtgtgctctctgcaggttctctggaggtctcttcaaaatccacaaaaaaaaccgcaacacgcttctgccgcaatgctagccttctcgccgttctcacgccttgtttcccgtgtctcgacactcgctttcgctctgcagaggaaccgatgctacagaccgagcgacgtggaccgccttgtacaccgacacaaaaacatggagccgcaagaaatggccctgcatgcgggcctacctctctctttagagatagtcgcacggtggatagctctggggaaaaacagacagagtacgacgtgtgctggaatagagagccggaggtcgacaagtctcaacgaagaactggggtccaagcagcagagaggtcctcgtgattgtgtctctgaagaggttgccttaatttaccacgaaaaggaagaggggaggaaacagaagaaaagacgaaagttcatagacaacaatgcacgcctggaatccgaaagacacagagctcagagttgccagggatggcactgctcgagaaacctgggagacagatgcagcgaacagacacgggaacaacggactcgacctcgccttctcattcacttacaaactgaaagtcctttcgcctccccagaagaagtgcgcctttctcgccgccggaaaaatccttgacagtgtcagtgtgctttgcatgcaccagccgttgtcggccgcggggcgacaggacgacacacagcgcacgcggaaaaacctggaaggagaggcggcgagactgtttccctgtcacagtctgtgtcgaatatggcctgctcgaaaggaaacagggaacatgagagaaggcagaaacgcgggagattctgaggggcatcagcagcttttttctcggtcaaatagcctagaatagcggctcggcctcacgcagctcgccgcgcctcccgggtgtatatacacccaaagagagagatcgctagtgtgtgtccggggggagggttccgcaagcgcgggagaggaatttgcgaggagaggtcttatcatgcgtttttattgtcttattttcctgggttcggttggggaagatgcttttttccttctcgtagcgattgacaagttttgccaccggatattgtgaattacgtggaccaccagagctcatcgctcgctccttttgccttgccacacatcgccaggtgtatgcacaatacctgtgtgcgcgcaccagtctgctttctcgcgagtttcctctgtgtgccattttcgtgttgcctccctttgtgtttctccggatttctgtgattctctccgtttaagaagagacacactcgaagactccttgccctccgcgcaggagcggcggcccagacggacgcacatacctctcgcggcaacgcgttcttcctctgcatgcgctcgacgcatttgatattgaacagaacgcgactgaatcgtcgcttgcgcgtctcgagtctgcgccttctctcgtccgcactgctggcgcccgctcaagtgtagatacacccttcccttgtctcaccccggtccccagacacccggtgcatcgacggcggccgtgtgccggcagccacagtctcagtctccaccatcacggcttccatatctccccttttcgtcctctactctccgtctgtttggtcttcttgctctccacctccctttctcgtcctgccgaattgctcgtgtgactcctctccttcgcgttctgcgtcggacaaccccgttttcctctccttgcctggagctccctctttttgtctctcttcgtctgctctcgttctccatctcggtgcacctctacccggagggcagcttgggcagcggttgtggtaagggcctccgcgacacaaattcttttccgcggcctttcgtgtttcctgttcaactctcccga

SEQ ID NO: 2733 - DNA, 3350 bp, Toxoplasma gondii
  source 1..3350: mol_type = genomic DNA
ctttgtctctgttcctgcagaatcacatggaagtttccgtcaccccagacgtcggccgccactgagggcgacgccagccaggcgccgagagagaaaggcgcggagtcgagactccatgccttctggcctgcggacagttgcagctggaagcaagtggcggaggagactgcagacgcaagcgaagacgaagagagcgaagaggaaatcagcgcagctgcagacggcgaagagagacctgtcccggagccgccgcgcgtctggagtccatgctggacaatcacctgcccagctgccgtgacagccgagcgccagagaagctcgccgcctgcagccgagccagaggagacatgggaggagagacgcgcagcagagagccagacagggagacttgagagaagcggagatgagaaggagtcgaagaaaggaaacgacaaaagaaacacagagcaccgagaagcagaaaggaagaaagggggagcaggatcggcgagagggagcgagcagagagaaaaagagaaagagagtgaacacacacgagagagaagaaagagaagagaaccagagacagcgacagaaagacaaaagacgaaaggcacatcgagtgaaggtggcgtcgtcaagttttcatgtctgatctctccgtcggctgtccatccacccccgtccccctccccccccccccccaagtacctgacgcccgtctctccgccttcgcctcgtcgctttcttctctgccgtttgggtcttttcctttcttcgtaccgtgtttgacttgctcgccgagaccagtgacagcgacgctgagagcgcggccgagcttctgtgtgtcgattctgacggttccatcgtcttctgttcgcggcttcccagtgagagacggtgaccgcttgcaccctccagtgtcgcgccagtcctgcaagccagactcgacgccgctgccgagaaatgccgtggtttcgtcggagcctgacgacgcaactcggtccggcgcgactgcggcaccgcccccgcggccgcccgcgtagtctgggtcgtgcttgacgaggaattcatcgagactctcgtcgatgacgttgctgcagccgcggaagagagccatcttggggaaaactcgaggaacgcggcgggagcctcggacgcggcgaagagctggacttcagtatcctgcaccaacgaggttgtttcacatcggtggtgttctgcacgtaagatacgagtgagtatttaaatgcgaacagatggtttgccgttgccgctccttgaacgggggaaaaagagaggagacgcagaagaaagagagcagggaggaggaggcacgagcaacagagttattcagggaggaagcggcggtttcgcgccgacgagaggcgcatggtgcgaggaaggaaaaaacgaaaacggaaaagagacaaccgtgcaattttgctatcttgcggatctccgtgagtgctggcttcgcgtcgaaaccgtcgcagacggggagaggacgggaagaagacttgacagagtcctgcggtgcggaagcagggcgcagattccaggtagaagacaggagaagcggccacaagagaagcgagttttcgggtgtcttcacggcggagtcgaagtcgcggaaacgcgtggtgagaaaagagcggcgtattcgcaaaaagggcggcgaggagcgaaacgcgcgcccgcgagaaacggctgtgacagagcagacaaacttacgaaagcgcagttcgccgcgcagcagcaggaaacagtctttgccgcactctttcgcggagtcggtcgagaagaaaacgcgagagtctcgaagaaaaccggaaaaaatcgctgtgtcttttccactttttcctcgcgaatttgcgcaagccgcacagcagtcgacagccagcctgatatagaaacgaaggttgactctgctctctgatcctctctgatcttctggacagcgaactcgagggacgaacactggcgggtcggacgagaagccgagcaaagcagagcagcgaagaaggtgaggtcagaactgccgcgactatttaggaacgttgccagtttcgcgtttccgccccggcgggacccactccgcgactgcgataacgtggtttttcccctctgcaggaaggcggctttgtcgtagaagatccgcgagtaccagggcgaagtgagaggtgtgtcggcgagctcagagagggggaggggcaggctggcgcagctgcgcagcggcagcggacaagtttctcccagtgcgaccccagaaaaggcaagtgaacagtctagattgtaaagatttaccctgctcctcgaagcgaggccttctcccgggatacgtcggcgcgcccgcgaaaaaacacgctttagagcgtgcagtcgtccaccaggtctgcagctggcacacggtttcgcgttcggagcggcgaggcaagaacagttttgtaggaacggtgaaaaggcagcagaaacgaggaaagctggcgcacctcgaaaaacggcgaaaaagaaagttaggaggacgacgaggagtcgcactgcccctcggacactcacgtggcagagaaaagaaacggttgggcgttgaaagcagccaagttgtcggactggaggatcgcgtttctttaaagccttttgtcttgccggtcgcacgattcgctgcatggaagaaaaataaaagccacgagctgtttgtgagaacggggatctcgctcactgtcgaagacgctggacagttgtcgcgaggacaccgcattcgagttgagagcaagcgaagagctcttgtcgtcgcacttggctaaaacacagtccatctgaaacgactgtgaggcgtttgccagccgtttcgcgccttccctctcgttgctcagaacacaccatcagcggagtttctccgttcgtagaccgacgcctaggtgccggaagaggacgcagtcgcacttgccaaacttcagtcttcttttccttcggtcgcagaggggcttcctcagactgcctgcatctccacgaaactcgtctgtggagattcagtttcagcccggctggttagcctggcggggcagttaaaaaacagttcaaagtacagaacctcgcgcacgcgcccacagcgccgccagtcacagttcgcgttgtccgatggctgggatttagcatctgtaaaagcctctgcgaagtcgctcaagtttcttcttgaccagcggtttgtcccagggagcttttgacgagctgtcgctgcaggtttaagtgcaggaaggcagttcgccgcggtagaaaaggtgtctaaaacccagtccatcgtttcacagcgcggcgggctcgattcgcacatttgtgtgttccggtagctcctcacaggacaaagaaaatca

SEQ ID NO: 2734 - DNA, 2716 bp, Toxoplasma gondii
  source 1..2716: mol_type = genomic DNA
attcccagaggtcctgtctctccctcaaattggtctcttggcgaccccatggctttctcgctctagcgcgatacgcacacgcagagaggaagaaatcctaataagaacgacaactgaaacaaccctatgcagatatatacgtaaacagagtatgtagtcgctggtgttttgcggtgtcgagcacagagcggcgacgagagaagactagaaagggtggactggggattgtggagtcagacggtacaatggacagtgtctcgattatgacggatgctcacagctccttcacggaagaaaatctgccaagacaatgatgcgtacagtattggacccgaacgtggagacgaggacggcacacaagggcggagggaggggaaaggtggcccagcaaaagagacgaaacgagaggcagcaaggctcacggcgggagtgcgagcgaaagcgcccagctcgagcctcgaaggaaaatgagagaaggcacaggacgcgaaaaaaattttgtggtttgatggaaagacaggagaacgaaaaggaatgcaatcaggggcacaggttctgactctgttggtagttgcatacagccactaccacgatgaaggacggagccttttccgcagaagagaaaaaccagcaagacagggcttctgagtgttttgcagtttggtgaggaagcaccttgcgttgacgagcgcagtggacgccggaagaggtgcatcagggtgaaaagcaaagagacgcaaatcagcgggacaaagatacacacggtaagaaggaatcgggatttgaagagaggcaggctaaatcagaaagaagcacggcgactaccggatagaaaaagagcacaggcaagtctgagggagagacacgcgaaaatatacgaagtatgccagctgcgactttgtcgtcgtctccggtgaaaaagtgtggtcaaaaaccgcactgtcctctctcacagtccctgcgaacctgccctcgaactttcgccacgaaacggaacctctaacgaggaagtcgacttgagaaaaaggctgggaaacggattgcttcgtcgagtagagagggggcaaaaggtcactcagagcgagagaaaccgcatgttcgtggccaagaagtcaaaaccaagaaaatagccaatctgctacgcgctggtaaatcgattcgcttgttcgtttctgccaggttgactccaatcaccgcacagtcgcagcctgcgaccgtccaagaaagtacgaaacgaaacctctccgaagtggagaaacatttagccgtggcactttttttcgtccgagaatagaagtgcggcgattctccaagcagctgaaatttgttttggtctttcatgaaggtgggaacaagtaccaccgacagagttggtgaagatcgtgctggactcagaggctgggcaaaagtgtcgggacctcgacgtttttctgccgagtggattcgggttacaaatgaatcaaagtgaccgcgaactccagcaaagggcatgcgcaaaatgttgtcttggcggaaaacgagacacttaaaaaaactgctgctgtttgtcaatgccctggacggggttatggccttttcgttcgcagagaccccgctgtacgtacacctgggaagaaacgctagcggaatgcgacattcccgatgcttaggctgagagagcgagcgcaagcagcagacttgccgctgccccgtttccacgcggcactaaaataatgcttgcctgttttggccgaggatacattttctgtgctctgggaccctttgctgggcggaaacgctgagtctgaacacgcaatcggctggaccgcctaaacagaccctcaagcatgcacccgatcgccaagatgcgcgcacactttacgtgtggatagtgtgcttgtctgtacgacgcgtggtgccaggctttcgccacgacggtgcgactccgaggcttgctttcactagtttcggccttaacaccataaaaaacatgcatacgtgctgttgtagcaaaagcctttttcttcaagcaaaaatacgttgctgtgatgtttatggcaaaacagtcaacgccgtacaaaaagcacttgactatggcggactgtttcgtgctttgcagcgcccattagagggtccctagatccttccagcatgcagtcgccacgtgcgggttctctcagatgccgatcgacggtatcccgattctcggaggggtcagacccgtggattagatgctgattttggggaccttgtccaacagacggatttgccagaattattgcgccctctttccgaccctcaggtgttttctactttgtttcctccctcaactccctccaccatcacacctgcctcgtgctacccagacccgttcggacaacgtggcgaccgcgtcgtggcgccctgcctctggctattgctgccgcctactttcttcctttgacttcgttgttaagtaatcggcaccacctcattttttgcgtttccagttgacgagtatcaggtggcgtgtgctgagtaacgcagatctctgcatagaagttctgccgctgccaactgcgtctgcttccccagctgaccaaccactcttttttcgccgatacgaggcagtcgcgtagctattctgcccgaccccccgagcgtggccgacgaatcggagtcgttctgtggcggggcgtgttctgcctctcgaatcggttggctcttatcacattccactggctttctctcgtcgaga

SEQ ID NO: 2735 - DNA, 3005 bp, Toxoplasma gondii
  source 1..3005: mol_type = genomic DNA
tggctggagaatctctttaaccagccgcaaggcaatgtctccaatgctcgcgttgagcggcaaacaagaggtcaccgacgggaaagcgaaccccggagacactggcggcaccggcgcggaggcactgcggcccgcaggcggcgcctcagaagcccaaggcccggaggccgggaggcgcccatccgctccggaagggagcgaaggcccctctgcgggctcggcatgcgaagagcggcgtgagcctcgtcctacgaaagctgagagacgccccgagtcctctcccttcctcgaattcgctacttctttctccttctcaccgtcaggcgagacagccgcgtcggctgcagcctgctgcaactctccgctcgtcgttctgagctgaggagacagagctgtctccaccctcgcactaagacctggcccctccgcaaacgcttgtcgctctcgctccattgcgccctcgccccccagcgggtctgcggaaggatcgccgccggaggcctcggccccgaggagggggacgtgaggagcagagacgtccgaagtcggaggagacgccggattcttcggctgagttgaactgagctgagcacgatgaggagagtgagaagagacagctgaggacggcgtctctgacgaactcggttctgcagaaactcgcgactctccagacccccccggcgcgtcgctgggacactctgaaggcgccatttttgatcgatagtggtcttggagaagagacggagaaagcttctaacagaagaaccctacacacatgactcgacggagtggggtacggcgagatttatacgactagagcctgggagaaagagaagaaaaaatggacaaattcaagaagcaagacgtcgcaatttatttgaagagaaggaattttacttagaaaggaagagacagactgcagaagaatgagggcaggcagaagaagctgtagacgatgtcggcgaggaaggagacagcgttaagggcagggaggggaaaaaacagacgagagagcagtgagcaaagagggaatggaatgcgggagaaaactgtaccgtttgactcgtctgcggacactgcagcaacctgttggatatgacagaaaagagaaaagaaattgaccggctgtcgacaaagagggtctatggtatcatgaatcgacccccgccgtgctcccacgggcaaggcgccaaagagacgggcgtagggaagcgaggagccttgcagaaaatctcccgtgaacccacgaagaaaatgccaagaaaaacaattgctctcgatcttttgcgcctctttccagtgtgtgaggcagagccttcgcgtgaagacagcgacggccccagagcggcaaacactttgaggaaaacgagaaggacgaccgccaccttgatctcgaagaaggatagccgaaaaacgggggaaagaagttgctcccgccgaagtcaatttttccttccactgttttccggtcgaagaaagtaggatgccgcgcctctccctccgccccgcctctgtacaccggagatcttggcgaagagagcagacttccccttcgcgagaaaaaaacagagcgtcaaaaaaggacacagacaagggtgaaaaggcaggagattttcgcagcggaaaaaacaggctgagtcgttcaagaaaagggcagtctgtttgaaaaaccggcgcatgcggacaagcttcagacccgcaatttttcggcgcgggcgagaccctctcaccgacaagaagatcgagttcagagatcgcggcgcgaagagctgctctccagggtagctgtgacaaagcgttctaaagataagccagcaaaaccaggaaggcggcggtctccgcaaaaagcggaatctcgctgctgtcggaggggtagcaagcgacagagaggacagaaaggcaagggcgattgtcgtttcaacggaaaaccacgagaaaagcaagctctggctcgcagccgctgcggcgctgcgccttctggaaagcgggaacctgtgatgtgacgctcaagtgtacatacacagcgtctcgcttttttgcggcgggcgggtaacagatttctctggatgttcgtggcatttcgagacgccgttttctctgtcggaagaagaattgctggctgtctcgggactgcacacttaacagaccaccgcctttgtgtcttgggaacagaggaacgcgccgtttccttcatctaaaaacgagtagtccgttcccctgcttgaactgtgtttaagttttcaggccaaagaaggccgtgacggagactgaagagagagaaacgcgccacggcatcgtcctttttcgccttctcctcgtgatccagcctcatctcttcttttttcggcgcgtcggttcctcgcttgccgtgtgtacttcgcgctcgctcatttctacttccgctgaactctcttcctcttgaatttctcctcctttactcagctgctgttaagcccttccccctcatccgtctgtattcgtcgtcgcatttctttcgtgcttcgtctgattccgggggtgtcttcgtcttccgctgcgcgtatacactcagtgtgagttgccgccttttcccttgaatttgtttttgcctttcctgttcctccgttcgcatcgctctcccggcacccggcctccacactgaacttctcttccttcacagcgtctcctcctcttcctccttctcctctagctgtgttcggccagttctcttctgcgagtcttcacgctacctgtcctcttcgtcgtccacgtcactcgtttcttctgtctctgtgtatgttccccttctgtcgcagcgtcgcgcgaaggcctgcatctttgaatgcaacttgtgcgccgtcttcgccgaaaatgttgctagctattcgtgagtttgtttcggtcgctctacttgcagctgtcgcctctttgtttctcggcttcctggactccaggctccacgggattgacctcgtttttcaagttttcaaagtcgaaattatatgaaacgcgaccagcaagcacca

SEQ ID NO: 2736 - DNA, 2223 bp, Toxoplasma gondii
  source 1..2223: mol_type = genomic DNA
agggtcgtttaaatctcatggattcgcaggcgtcggaaacaagaatcgtagacgccggcagccggcacagactctgcgtcggtgaaaatgcacagtgcttcaacttacgaagaagggcttggttgacttcctggcgtgtctccggcagctgcagcgcgtcaaatgcctgctttagaataataaagtcccgagtaggagcctctgtcgaactgaaggcgttcccgtccgccaaacagcgtccttttccccctattttctcatttccctgtgatctagacgaatgtactgtctcatcgggtggtacggaaacagtggcaccgtcgggattcctgctctgaagtcccgaacggtccagctgtctatctgggggaagtgatgacttgccatcggaaacggcgtttgtaggatccggtttcaaattatttgtgtcttcgctcaacagcgagcagccgttcaagtcgttcagtctctggagctgctgctgcttatcagggtggcagagacgcgctgcccgaaagaaggcagcgcgtatttctgctctcgaggcattcggagccacgccgagaatttcgtacggggatggctgcgcctttcccatctgctttgtccacgtgttccgtttactttccgaactcaacggatcgggcgcaacaggctgccggccggaaaacacgagcgcagagaggactgaaaaaaagtctggcgcccgatgaacgagaaacaccaactggcaccatgcggcaccggcaacgaagtgggtgtacatacagcagacacttcgtcagaggcgtcgaagcaccgctggaaaagatgggcttcagaacagactcaattgtgcttcagtctttgacatcatagaaacgctgacaggagacataatcgatcgcgtgttggctagtgctggaggggcattttcgcggcgggcggaagtattgtcttgtacctttatctgtttgagcaacccactgccccgttggagacaacttcgttcaacacctttccatcccgagagacccggaatcttcacatcagcgtacaagagagggaacgaggtaagcgaagccggttaacatgctcacgcagacgagcgctggttctccgtacatcgcggaattggatacgctgtcgcaacaagggcggtacagcagacaacgtttgggaagacagatcccgccgtacagcttgtccctgtgcctaagcgaagcaaattcgagtttgcctttctttttagattgaggcgtttgggacgggcctcctgccattgcccctgttggcaatacttgactgtaggatcggtctcgctcaaagctgcatgcatgcaccagcgagaaaaaggaaggcctggaaggtggtcgctggctgactgtggtatcagcatcctagtggcgcctccgccgtggggggatgggggggccaagcgagagaaaaagcacagagaccgctttttcgaaggtcatcttgaacatcaggccgaggtctcgtccggagctgcgcacaaactctggaggacagcggccgacgagctgcatcgttgaagggagcaaaaaatctgtcgtgctgttgtgttacgtttgagaagatgcatgtcagtgaacccccatgttcttttttctcgtttatcgggggtagcggcgtgtgctgtagcgggagctggtttcttcgacgtgcattttgatcggtacagtgtcgcagcgcgaacgggaccgcgtgttttttttttggcgtcaatcgacttccgtctgcttgggagttctccgaccccctccctcgcttcggtagctcctgtcctgttctttcgcttgtctggcaattcatttggaattgctccttctctgtgcttctcagagtcgcgtggaggctgagcgcgacaacgccgagagcatatagtccgaggcttgggcgtgtcacacagttcagtgtttcaaccgagcagctgttcaggacgacgttttgctgctgaatgctgatttggagtgtctttcttcgttgccacttgtcctcgacaaggcttcaacgtgttcgaatcgactgtagtggatcccgacgcccacaggcgccgtcgtcctgcttcgagtcttttttccggggtgtaaacgtctaatatcgctgtgactcactgcggaactttgtcaagttccaatcgtctaccgtctctaggcgcctacttccacctggtagaagaagagtgccctctcctaaatttcttttagttcctcgggaaaa

SEQ ID NO: 2737 - DNA, 4438 bp, Toxoplasma gondii
  source 1..4438: mol_type = genomic DNA
aagcttgcgaaaatggaggactttaagggaacgcgttcttcagtgagaagacttttggacaaatgtatatcaaaaggggagagaagaggaacacccggtgccgtacgcgttcgggtgtcgtcctgtagatcagtccccggttcgtgggcggtgtatcgactcataggtatactgagtgctggtctcaaactcacgctgacgcggtaagacttggatccggtgagcacaaattttcaagagctaagccagcagtccagctcatagtatactctacgcctctgcaatcccgctctggtttttctgggcttctttcgctcggataaagccgtcgcagtttgcgttcaaaagacccgtgtctcccttttgtcggattccccacaagttcacgatggtgacttccttgctgtattcgtttccgtttcgcctacgtggaacctatttcgttagtctatattttcatcgattgtgcctgtgctcagttgggctgcagcttcggtttttctgggtacggttatttgttgtgttttcctttttcgcttttctgctgggtggtgtaacttcctcgctgctcgtctgccggtcttctccagcttgtgagatgccagacacgtttctgcgaaaaaatcttccagcacgccttttcgcgtccgccgcgctgaaaccgccctcgttgccgaagttagagcgcatggaaacaagaccagctgcggttccactctagtttccagagacacgcagatggacagaaaagtttcgctcggagtgatcgctaaactcacaaaatagagaatctggatatttttatcggggctacgaatagccgcagtgaagcagagagtgtctgtgtacctgacaggtttctgtcactgcgaaaccaccgactcatgcactgtcattttgggggactgtttcccctccagcggaagacagcgagcggcccgagaaaatgggctactagatctcaaaaagagaaaaaaatgtagttttgaagtacagctgagggtcttcttgttccacaacctaaccataatttgctgccctaaaaaacttcagtttcggtattcttttggtggcagtccaccgttaggcacaccatagttcaacaagagtccgacccgtgtagtcgccccatgcgaagttacggagacaacctaatatggtattcgtaaagctttaaaccagtttgaagtcctcaagtatatggtggacacatttataccgagtgcctctatcatgatgtcgctttatcgacagatgatggaaattcaaacacagctctgcgtcacggtttttctccgtgcaacttcagctagccctctgcatctcgacaggcttcagtgtgagaccctgtgataaccccgatggcagtgttgtactatcgttctttcatttctttcccgagacgacctgccgcatctctccgtgtttccgcctagctctctgttcagtgacgaggatcggcgaaatgaagcatttcggcctacacatgtccgttcgcttttgtgtagacagaaaacaccaggaccgtctccaggcgtctcagtagcaggtcgcttatcacttcatagaaagtcacttgccactttgggatggttttctcgccctctgtagtgtcctccggtcttcgcgttcttcctcggtgcctgctgtcgggttttagaaaagttctcttttcagttaccaagtgtgaaagttatgcccgaaacgcaaagtcctgctttgacgggttgtatgtcttcgtaaaaatatactccagcgtgcatcaggcgccctgttcgttcgagagagaactccgcagaccaatcaaaaatcaaggcagaacgagctctcgcttcccagatcccgccggtccgtctgtgggtaactggattgagcgagttcttcttggccttgcaggcaagcgccttcaccctgttcatcaacctcggtgatttgcacctgtatttcgtcaatcaaaagtcgcgatctgccgtccttctgttgccttcgcattgtactgcggagacacactgtccaagggaggttgtcaacgttgtttcagcagcaaaacgtgaaaccggcaatgagaggtcatttgcctctccacccgtatgtctgctgtctacttgagtcccctagctgtggcaaggaggcgactaacgtgtcgaatggatcgtctactactgcgtgcacttttgtgtgtgcgacggtgagtggactggttgagccggttaacgtgctggattttagtgtccttgaacagtgaggatattccacaccggctacgttctaggcgtaatagatgggcaggttgcttgaggaagaaagtggaaatcgcaccagattgctcaggggaaactgcgtcatttgcaggtctcttaccagtggtcggcaagtgtgtataaagtggaccgcaaaccgagttcattctggaaaggaatcgattggctaccaaaagtgggcttctgatgcatgggcatacgcgcgtgtttgccttcacagcttctttggcagaaagacgctgggaaaccacgtgtgaaacggcgagactctcaggggagacacggtataaggctggggaaggcggcctgctcgagacccgtgtataccatcgaggccgcttggggtattcaagagcaagaagggtcacttcagaaaaaaaggcagacagccgagaatcctgcaaaactcgggggctgtggtagcgcgcttcccagaccccctgactccgtggttcttgcctgtgggggttccctctgggtttcgcaacccacgcgggtcaggatacccgtcgtctcctctcggagacaagagaaccagcttcaccacacactgcgaaaagttgcaattcgaaaatcgcgggggcaattggagagtttgggtttttcccgttccgcatgcaggcgaggtagtgggtgccacgggttccgtccacgtccggcggcgccgcgctccccgcttctgtctccgagttttgggtctgcaagattttcctctcagcgttcgttttccttttcttcactcagacggggcgttgttttttgctggtcctcaatcttgaaagtgtaggcttctccatcgtgtccggctgcgtttgccgtcgaccgtcgttttctgcccgtaaccgaagaggggcggtaacagaggctcctctccaggacgtagcggcgccgccctagaaggcctgcttcttgcgaccgcatgcatctggaactttgcaaagacatttcacccgcttttttcttttctttctcgactccagcgtcgcctgtggaggggtgcgaaaaccatgtgctcgaggctttcccaggcttttcctccttcccgaaatagtcttggcacggtcccgtggaaaggcacggaccgcggacgcgggacccagcttgggagggcgaccgcggcgtttccaaattcttttcttccatttgctttgttttttctggagacacgcttgaaaccccgctcgacctccacgcggttccggcgtacgtcctgcgaaacgcagtccacaaatcaaatttggcgcatactcccctcgggttggtgaaagaaccactgagtttaagacgggaatatgattttcgtttctccttgtgcaggtcttgcttcacgtcaacaagactgtcggcagcgcccgggcctccttccttgcaaaatgggtgcgccgacgtcgagcagttgatcgtgtggccgcgaacgtttctcagtcgccgggtcgccgccaaagacttttatcggcaggcgggcaaggcgaatctcgtgcctctgggcgtttgcaagggaaggttcgcacgtctacgagtccgttaggtttcgaaggcaacttcaggctcggctctggggaaaaggtcgcgaaactgttgcggggaagcgcctcgcgcacatggaacgaagcgtcgacccagcagccgccgtcttcttggcatctcgcaggcaaagagtacagtcgagtgcaaacaagcagccggtctcttcgcgggcaaaatatatggcagaggacgttgtctcccgacctgcaccgtcctgtctggaactctcaacagagcgctgaaagttgcgtaagcggatgcatgcaaccagaaaaaacggagagccggcaacggaacgcctctctcgttcgctgaaccgcacaccttcccttcttctcagtttccaagctttctcgcgcttctcaccgtcactgcgtttcggagttccctgaggctagccccgcaacaggggaaacccccagcagcgccatggtcctcacgtagctacacactccgcagaaacaaagcctttctgtgtctgaaccagacgcaaggtctccactgttgtcgagtctgttccgcgagattgtcttgagtgcgtcagccctgctggacggccaggcgagcgcctctcttggcgccagtgcaaagggcactctcaaagcggtgcagcgatatatgaactgcatgcggctatgtgcgcgtaggaa

SEQ ID NO: 2738 - DNA, 1646 bp, Toxoplasma gondii
  source 1..1646: mol_type = genomic DNA
tggatcttttacgcgctcctcattccctcttgtacctgtgttttctgtattctgggtcaagcgtgtgcacctttcgcctttctctcggcacatttgaacgctctgacgagcttccaaaaatgtagattttctgcctcagtccggcgatgtgtgggaggcggagtgcgcacggcttcagtgtcttctattatatgttctgtgggcgcagacttttgtggtcgaatgtcactacatctctgagagtatcgcttcgttgatggtcggcttctccgtgcattctcagttgacgatcagcaggtgtttcccctgatactgttttaccacatgctctcgtcttggtcgcctgtctcgtgggttcacctgtttgccagcgttcgtctcttcagcgatctcttctctttctcttcttcttgcgcaatcaaaaggcagagaactttccccactttctctcgtccgtgagagacggaacggtccctctcccaaccgttgctcttcccgtggaagagcgaggcggcgagcgcgtttctagaaaatccaatttcacacaaaaagcaatttcgaagcaaacaggccagcgaaaaatgtaacttgctggagtggcgccagatgcaaagaaagagtacactgcaagcagggtccacggtcggtataccgccagagggaaaaaaagaagtaggatgcctggacagaacaccggaattgaacattctctttcgcactcttgtttatttctgtttacatgactcgtagattgtataactggagttatagttttcgtcgaccggggacccgagaaatagtgcagcgaactgaacatcataggacttctgcagtctacatgagatacaccgaagaaacataaagtcacaacttcaccttaagcaatatatatatatatatatgtatatatatatatatatatatatatatatatatattatagactcgagatgaaattcgactgttcagtgcaggtgcacgacaggtcacttcgcttcaagaacaaacgacgcatatcgctgaagaagcctcaaagatcttcacaaaaaggggaaagagggcgcccaaactgcaccaacaacacatgcgacagcccatcttttacaccgcactccgtacctgtctacgaaacctacatacgtttagatagatagatactcttacacggacattggcaagcgcgtgaagtggacatctgctgcccttatcgatgaaatctccagaagacactcgattttttggtgttgttttcggtggatgtgcagcgatatacttgagcatcgcttctgttgcttagttcccgagtcagctcgtgaagtcgaggtgtcagttttctgtcctcgactctccttgtgttgaaagtttgcaacttctttttccgtctttctcgcctctaaagtttcttgttgattgtcaagggttgatgactgcaaatttctgcttttccttgagtgtaattaaaaaaaggccgccgctcttccactgagaaagcttctttctctgcgtgcgctgaccttcgcgggtgtcgcggcacgagttagctctacacttcgacacgcagatcgtcgactgagtagagaagcgggagaaatttctttgttgacacggtgacggcaagcaaaattgatgcgtcgaccatgtgacca

SEQ ID NO: 2739 - DNA, 1592 bp, Toxoplasma gondii
  source 1..1592: mol_type = genomic DNA
gaccacgctgtgctaaatatgacgaacacgaacgcacataatgcgttaaaccaaaccatcaataatggctttggtgcggctgccactgcagcttaagtttccaacacacgtcgctgacttaacaccttttcctcacgcacccctcagaagacactggtaccaatcagaccagtatttgcagggacatattcctctcctgcgctttacttgacttcgcattcgtgaggttggaaatgtcgtttgcttggggaatatccgacaactgacctagaccgcagagcatgcagccgctttagtttcttcgtgggaacgcagtacgagaggcttcctcaacggaaccgctgcaagaataactaggctatttgtaaggcgttgactacgaggaacgttagccgattgatcttgccgagattactgacgacaaacgtaactattattcagctgaacgggagcagcagctttacgatggatcacttgcctgtcctagtaaacaaagcggtgctgctggtgaagccgtctgctcgctgggcaatttcgagcggtaacgccaaatcgtgggaaattttaatggcgaagccgcgtttgcgatcccaaatgatatgtgtgatatgtacgaggcaacggatttcgccaaaacgatatccctaaaataaaacggcactgccaacttttatggcaatccgagctcataacagtatgtgagtatgcgaagacacaatacagtcgtgcgccgttgacgtgaaacggtacttacccgattcctggaagaatcgcctggagtctcgacaacttttgtcggacagtgtcacgcatccaagaggggatagcgcgggagacaagtcttcgacgtttctttcggatggctaatgtgcaggaggttttgagacgcttcttcaaagacatgcacctgaaaaaaagttgcgcatgcaactaagcatgcacactgcttcgttttactacgacacattcagatcggatagaaatgcgttctgaatgcgcagcagtttgccctgttcttcgtttagtaagaagtcacaacacggacatctttctttcttcttcaggggttccttttctcccttgaagcaaacgtcattttcagtccgtttactgactgtccaacgccgcgcatggtggcgtcggttctaaattgtaacatcccaccttcccccgtaaaattacccatgctgtataactgaacctctggagtgtgaaccgtaaactgcacgcatcgcatactcccagaatcaaagttgtcggcagttgtgcgtccgccactggcggtgaaatttcactattagcaggtttttcatacgttgtcgactcatcagctccttcggtaaatactctgagtaaggcggtcttttacccatggtgtgacgaaatcagcggtgctcgagacccgaagaaactccatggtgcatgctctttgtccttaaggtgcccctgctgaactgagtcgacccacaaaagaagaacgtaccacttaccgctcggagtaggatgattcatttgatcctacaggcaacgggatgaagagaactagattgtttatgtagtggaggactaaccttatcgcgcggtggtcaaca

SEQ ID NO: 2740 - DNA, 2155 bp, Toxoplasma gondii
  source 1..2155: mol_type = genomic DNA
ctctcgacaggtccatgtccttcctgagtcgatctctttcttttcctgcttcgccgctgagtgaaccagggatgcaaaaaggtattattgcccttttgtgaaaggcaggcgctgtgtgtagaagttgcgaccaggcgtcttttgggtttcgcgtctgacgttccaagttgccatgtgattagctgcgaaactgctgaagtgaaaacgtctctgccagcgtcgcagagattcgcaaaaacgtacgctttctcgaaatcgaattggctgaggcaagggcaagttccccttccggtgtttctgctaaagagaatcgagcaaagaactgtaggacacagacggattcctctctctcccgtttcgcctgctcacctcagtctccttctctccaagtctctcactcccgagtcacggccctccacgttcctctctttgccttaccgcattctctcctttctcccctctctttccgactgtttgcctggactgattcaaatcgaggaacttgttttcctgcaggaacggctgcatggacttgtgcagctgcatgcacagatatatccatcgactttcggatctcacgcgtttacaaagatgcctgtgcgcgtatatgcttccgtggacgattgcgtctcccgacggtcacagatacgtatgtgtgtgtgaacgcacaactctccatagtgccgaccagtaaatggatatgaaccttctaggctctctctggtcttccataaatcgcgattttgtagatctcttcgctgaaagcgtggacccccgtttacgggtctgcgtctctcctccaaactgatgaagagacagggacaaccgaaggagaaaaatggcgatttgcgtcgtcttcacactgctcttgctgtgattctcacctctagacgtcccctggggggagactcctcaaaactctacaatctctcaatgaaagctgccctctcgaacgtccaagacttgcagagttcgcccctgccctctttgtctgtttttcgatcgcgcaaatctccagaagaagttcgtttgtgagcttggtgagtggagtgtcgttcttccttcgcgagcagagccgcgcctttgtcacgaagaaacgcttttgtcgcattccctcgtcacttctgcgtttcggcctcgcgtaggtgaaccctgtctgcttttcctctccccatttccccctcattcgtattattgcaggaacccagggttttctctgcgttctgttgacaaaagtgactgtgcttttcgtttttcctccctcccccccccgagccgtcccgcgagtctccttttctcccctcgttcctgctctccacgtttctcctttcctctgtgtcccccaccgttttgctgctgtgcgcgctcgcgcatgcaatctccgaaggtctgcgtgcaggggagaaagacgaaaacgacgcgaaaggagaagggaagagaagccgcaagggtgggtcttttttcagttcttttcttgtgtttcttgaaagattgacctttgcgtcgtcgcctctgggtctacagggagcgtctccccgcctgctggagaagggaaccagtcgacttggcaccgtttgcacagtttccattcgcgtttttctttcgtttttctctgctcctcgttcgtacgctttgtagtgcgtctggcgttctttctctgtgaaggcctgaacgcggtctttctctcgctttgtttcctcacttcgtttgtttcctttctcccgaagaaaggaaccctgtgaaccagttcgagttttccgcaagttccgagcggcgttttccaggcctttctcgctgtccttctggttcgtgtctgcttccccattctgtttgccgtctggcctcccgcgcactgttctccggtctcttcgtcttttctgtgaactccagagcgcccctcgacttttccgtccagcgcgcaccgtcaacgacgcctctccctctctctcgcctttttctcgcttcccctcgtttctctcttcccctcgttctcttcccctcgtttctcttcccctcgtttctcttcccctcgtttctctctgtgcgccttctcttcgccttctctttgccctcccgttcttcttcccccgcggcggcctgtcgcgtcttttgacctccgttcgcttgtgtgagtcgtctgttttctcctccagaa

SEQ ID NO: 2741 - DNA, 4705 bp, Toxoplasma gondii
  source 1..4705: mol_type = genomic DNA
cttttctcccaagtttgtcataacgtgtcgcagctcggccgcgctaatgaagccgttaccatctcgatcgaagaccttgaatgcttcaatcaactcttcttccgtgtcagtgtccttcatcttccgggccataagagtaaggaactccgggaagtcgattgtgcctgtagattttgcgaacagaatgcataagcgacaatgaaactgtcgcagaactgcagctgcacccgattcatgctactgtgtgcttttcgtaagtaaaaaaggttcttgttttaacaggactgccgactgcgttacacatcacatggctcccacatgaatacacactttagacgactgaaatgcgctgaaaataacgagctacaaaaagactcacagaggtcatacatggcgtaagacaacgcacaatctccagagcagttgcagaggcgccgcaccgttggtatacgcggtggaaaattacttgcagatttttattgccgtgaaaaacttaccatttccatcagcatcgacctcattgatcatatcctgaagttctgcctctgtcgggttttggcccaaggaccgcatgacggtgccgagttccttagtggtaatggctgcatcacatcacaacaccccacacagttattaaacaaagccaagcttttgcggttgtttcattgtaaattttaatagccctactgtggccagaaaatgcatttctcatgcgctgtcctttggcatcctcgttgccactgtggctgcacaacgtgtctgatgtgttgggtgaatgaacccggagtacaccgttttccccttcggcggaagctgtgatgtccttcctggcaaagcgatagcacaaactccactgttcggcattggaccagaaacacacaaaacacttaactttccactttccaaaagtcgggagcgctagaacaagagtggttctgtggcgccaacggacacccttgcctctgtgaaaagtagaggcatggctcttctcacggcctttaaagctttgctaacaagctgcctacgtctatgttgtcttcagttaaacttccaatgacttcacagacgttcccacgaaaggtgctgcacctctactctcggaggagcctaaaatctgcagaaatcggtaaccccaaggagagaagtcaaatacatcgccaaaataaatgtgtgagccacgcacgacgcacaatgacaaatactccaggtgattcagaagattttccgccggagtccactgtattatctgagttcaccgtcgcagcgcagagccacacattcccaaatttaaaaatgaaaacgacctccaccgtcccgtcttcgaagaacaggcaaacttcttcatgagtgtgagtagcgtgaagcaaagatgaaacacactggtcggcaagtgttcggagtggcagaagaagagatagatgtgccaagtttacacgagtcttctaggaaagagagcctgtactcactcccatcgccgtctttgtcgaacaggctgaaagcctccttgaactcggcaatttgttcctccgtcagctggtctgccattttgtttgtaaaaaaagaggagttttctggaacggaaatgtgagaagtgtatgtgtacgctaaccaccaccactatcggggccaggagaacacccccggacaagaaacaccgaatgtgaaaatccgaaagctttccgagcccagaatccgcgcgcgctcacagaaaaagggatttccagttcatgtgaatttttcagaaaagagccgcacgcacgcacagtgggtataccgctgcactccggggtggacagagaagagcggattttgaatgagccgtcaccaaaaccaccacagttttcgcgagcagcgtagctgacagcagcagcctgtatgtaacgccacattctcgacgcgccctccctctggcgcgcagcttaccaccggcaagcactagcggtttgtgtgttacaacaataaacgagcgcgggaaatggcaagaacccggtcaacgcggggactgaggagagcaatttaacttcatttaccctgaagcccaaagcatgctcatgtgcgcgttagacaggaacagcctttctattctagcgataaataaacgccatcattaatcaagccgccaatagcacaggttgggatcaaaaccaagttgtctgccatcgcagcaacgacggactaggtgccgtaacaaataaacacgttttccagtgtccgagatctttggtatccgacacagatggcagaaatggagtccatgaattgacatttctcccactcaccaagccaaatgctccagaatttgcactttgaaccggccaggccggctgctgtgttgtggcttgcctcgccggatctacaaagttttccgggcgagtggcgcagtttctttcgtcggcatcaacaaagacttacccataattgactatgaaacggagaaacagggacacgctttattgctcaccttgtagctcacaagtatatgcggctttctagtgggcgtgctcgtatgcgacggtgctggctgcccgtcggacgaagagaccctacggacacacactgtactgtttcgtttcacccacatgatttttttgtatggtagatggcatttagaaatgggtgcacaaataaccgatcttgtcatgcttgtaggacagactgttggctatttgactctgcatacgggggaccggaggtgagggattgagagcggacggtcacacgacccgttgccggtaaacaaaactgcaagacgaaatgaggtgcagctcgctctctgtgagacgactgttgctttggctgaggcgagaaactggtcgagtgggcaacttctgtccgtatccccgtcgtgggaacgcacttgccagcactacaggatctgtaccttcactcactgggagatacccacagatgagagggaagactacgaaccatctggagttgatccatgcagatagagtgactttgtagacatcggcagccccctttatctggaatggcacatactgtgaactttctgaagtggggagaacgacatcctaggcgacccgactcagcaggccacttcataatgtgaacaggttacggggcggatagtaccagcacaggggcactcccgtaagtcgtacagggggtcgagagtgcttgccaacctgtaaaatatctgtcttgagaagcaagaccttgcagccattaccggaacgagtgtcggaaggctgattcagtggtatccgatgcgcagtgcccttttgtttttcgctgcgagaagcgtccgatccttccaaagaaaatcaagttgttacatgatttttgaggatggacagtcggtaagcacaataacccgagggtttcacgacggagtccgagataccccgtagaatgttacaggcaaggcgctgagtgggtatgctcccgaatcaggccacactcgtacgagtactgacgcgtatggcaaaccgataggcagcacaagtctatcgacgttacgagcggacacagcagcatatctttcactctggctgctattcgcgccggcaacaaatctagagacacaaaccaatgggcagacgctgaggttgcctctcacaacaatacgtgcgaccgaatgttgaatgacgcatcgtcgccacggcttgttccgatgtcgcgcactttatgcactgcgccataattgtgaagagactcgcgctcgccgtaagcctcttgactgatggcgcagagtaattcacgaactgagctcagttcgtgtttagaggtttcggtgtgcgtgaatcgacgcgtgcgttttcgttcctgttaagccggcgactcgctcccttgagcacgagatctgccaccagtacgcggaatccagataaagggggctaccaatgcctacagagtcaaatctcgtcatgaagcaactccagctcttgcagactcttcccgctcatctgtgggtaactcccagttagtgaaggtatagatcccggagtgtcggcaactgaagcttagagcccgcccgcccatgtctgctttcaacgttccctcaggctcgattttcctgcggttccctaggtgagaggatcaaatataccaccgttcccacggaaatagcgaaattaccggaggattccccgggaattggctgatgggccggttcgaggaactatgattaagccgacagggaatgtctcggcaatgtcccgttagcaaccctggtcgcagcttcaccgtccctacacttccatacaagcaattctttggaagaaagatcaaaatcaagtggcctaaacagtgggggaacaggggctttgtaagatgtggaagcagctggtggacgtctctcgctttgtcccacacaaatgcgatgctcattttttctcgtttttcggatgtgcagtgcgaggctgacttctgcgaaactcgcacgcacccgggctgcacgttttctccaattttgttcaattacgccactttctgttcggacgaagacatgcgcccgtcgataaggcgatccagtgggatgactgtggcggcctctcaggggggggggactcgtctgttgcagcggagcgaagtagacccgttttcgatcgacacgtggcatttgctgaagcggagactggtctggcctgcgaggagacgggaagtcccgcgattcaggctcttgttacatttttccttcttttttccttgtggttaagtgtgccatctcttgtcgcgagga

SEQ ID NO: 2742 - DNA, 2169 bp, Toxoplasma gondii
  source 1..2169: mol_type = genomic DNA
tacttgctcagaggtagaatgtttcatacaactcaactgttgtccgtagatatatttcgtgcatttatctgcttatctgcattatctatatttacatatgtatacttatatatatacatatatatatatatcaacatataaatatatatatatattctctgtgtgtatgttttgcatctgcctctgctggtttcttcatgcgcgctgcagtgttctttcggctgtttgtgtgctgtttgcttcttgcctgcagtgatttcagtgtatcccttcgtcgttcagaaccttgttcgcgcagagaagatgatgtttaaaagaataactcgagaggtcatgtctctcctgttctaagggcgtgtgtctgcaacgtcttctctctctctgtcgctgtctcagtgtccatttcgactccctttccctgtgctttcccttgtctttttgcgcatgcgacgaatccctcgcgtgagatttatccgccggctcagttgtttcctcctctccgcgctccttcctttctgcctgtctgcgcgcctggctcgcgctgtggcgcggcaccggagccctctgggtttcagtctcttcgtgaactacacagttaacagaaaacattccgactgggtgccgacacggagaaacacaagaacgagacgctagacaacgaaacagagacgaagaaaagagagatcagagagaaacacaagggaaaaaacgcactgtgggttcgggacgtcgcactcgagcagaagcctgcgaggaactgcacggacggcagggggagacacggcgtggaagcgcagcttttctcgtcgaaaatgcaatttgggagactttcaacacacacagctggtcactatttcgtttagatgaaaggtcaccaggtaggaaagtccttggaggcaatgggcgctgtgcctggaagccggttgcacaaaaaacacagagatcggcacctccccgtttccgctgaagccggcgcgctggaacgcgaaaaacgccttccgcggctgtgacctcgatgtcgccactgcagccatcaagcatgcaaggcagtcaaaaaatgagcatgtgctctggggagaggatctctgtctgtttcgcaaaaaaaaataacgtggaagctgggcgcgcttcagacacagcggctcgagtctcagactttcacatgtcggcattcgccaggcgactcgccgagacgtatgagatattcatcgggaaagaactttgctcttcttcgctttgaaagacttctctcgcgaaacagtccttttttcacccgttccgtacatcgatttcgagatctttacgcgtctttccgtgtctctcccactcggccttcccgtggaatctacctgtacttttcgttccctgtgtgtgcgtatttgcatcgactcataaacttagagagaaataaattcgtattcacggcgaggagcattcaggctgttgctttgacagaagtcacgtcttccagcaggtccccgacacgactttgcgacgcattcacttccacgcttagctggctgcgtgtctaagcgaagacgaagcaaggcaagggcttttttcgctttctctgggcaaacccctcgcggcacatctcagcggactgcctgtttctctccctcctccacacttttgtctgcttctgtgtccaccttggtagctgacgaatcgacgcaactcgccacgcggagagcagcgcctttttctttccttgcgttccgcgcatggtggccgcgtgcctagtggcgtgtgtttttctcgagtctgtttcccgtcggttctcgaagaactttctctcccgttgtgtaatgcgttctcgactttcgatggcagtcacgccgtcgagactctacccctccacgctgccaccgcccgtctcttcttacgcgagccgccgtctagccattggtctggagtctctcgggaaagcggcgccggaagggcgtctggtttcccgctctcgagttgaacacaaagtatctttcgcttcgttcgcagccttcatttccgcggactttgctgacacacacgccgtcgctggggtgtacatacaccccaacaagttcggcactgcggcgacgcaggggtggccgcacgcgggggcaatggcgggtgtctgaagtttttttcttcgtttctccgcggttccctctttcgcttttgccacca

SEQ ID NO: 2743 - DNA, 3671 bp, Toxoplasma gondii
  source 1..3671: mol_type = genomic DNA
tttcgagttccgggaagggagttccatattcgattaccttagcccccatggtcgacactcagttgacattaaagcgtatcattctaaagtgtttcagcgtctgagtagtcgcgttcgcctgccgttaatatgagtgatatgagaaatccctccattacgcctggaatgaaacaaacgtggaatcacttgactgtcgtttctcaccgtggggctctgtcgacgccggggcgaggagacaggaattctcgagactttctgaaatggtgcaggaaaccggttaacttgagctcaaccaagaagcatttgtagaaacgcgaaacagaacttagaagaagattttgcgtattaacgttctgagaaacacttgcagtcaaacaatggtctgctttaggcgctaagacacttagagcagcatctcaacgaagaccaccccgagctctcatattctgaagactcttctctgtgaaatcctcttcgacaaacgacctgtgaagagtcggagattcctctcagcttagaagggagaataatggaaactgaaaagagaggcgctctcgatattgcgatgttgaaacgcattcgtaatcctttttcttgtcggctgggtcgggaccatgtgcggctgtgttcgccctcgtcgccggtgtcttgtggtgcttgcgtttcgttgtgcacggctttcgctatctcgattgtctttggccttcttccactttcttcgacttgcaggtgtctgtgaagagttctgaattcgttgtcgacggcgttttttctcctcggtgtgctgttgtttttcccgtgattctgcaaccgacacatgcggcgtgtaaccacttatttttcacccaaggtcgggcctttggcaactgtagacaaaagcttgcttcacttgatttgccagtccccagcacaatgctcgacagaaaaatccgatgtttctgcgttttcgagagaaccaataaaccttcgtgccgccgcgtaaacgcttgctttgacgcatttgctctaaatgacaagcacgttctttgccgacggcaaagaaggacatccggggatttagaaatcgcatcatgatttcccagatcatgacttttctctcatgtgtaggggtactctgcttccacaagactgggattcgctccttgggccacctagatcgcacataacagtgtcagattctctcagaaaaaagggtgacggatccgtctaccgagtcgtagaaccctttctagcacatgtgtaactcttttttctcgaccattctaaacaattgaattcggtttcgtgtaaagagaaatggcattcgcttcagttcactgtaggtctcgttcaagtatcacataggccagacacgttcaataggaatactctggtggccctgaaaagacacatagcacttgaaactctccggataaatgcatttttcacgtttttcctgatgttcccgtttggcttgagatctccaacccatagccactgtcttgtgttttgcatattttgttatgtcgtgctgtctggacaaaccgagggccccttggttcgctagtgcaggctcatcccacagcgagtctcgatctacaaataggtacatgtcgaaacatccagtatgcctctgaatctattcggggcacactttgtctttagtcagctctggtgttctacggcgcaagggaaattctgcacaccttaaaaattggcagttctgccgttatctcggctgtgcatttgagaaccacccccagaaggagctctcgcgttgcatccgtacagggagaaaactgctgagtgttgagtaaatgcaaaggaaaatgatgacaaaacttgtctcatagccaatcacaatcgcatatctacaatctgtctgagtagcagggatagagctccgcgagttttcgctctcttcgctggtcttaatggtattcgtgacttttcctgtacccatttccacctggccagaagccgtccgttcaataattaacgcgatctctttgtttctagcaccaccagtgaacgcttcttccggtctgactataagtacgcagcctcgatacatttgaaatgtcccgtctagaagaggtttgccagaagtgtcggctcaccgaacggacgtgcctgaagactcaccggtacggctgcttaatcctcttccctctgggttgttattttcgattttacgtggtgagtaccactgccaagacaaacggtttccaacagaatcgcaaggagatccgaacgtagaatatttgaacttgaactaggaaatgcgcggctgcaataagtcgttagagagactcttgtcttcgtgatgccggacctcagagcatacactttatcttcttcctcaaaccatctagtgcaaagcccgtcggagcagaaccaaggggatttaagctacgatctcattcacctccaacaggtagttcagtctttaccatggtcagtgctatcgttctgggagtaatcctctcttagactagattctgtgtaagagttttctgcttctcctgcagttcctttcccacgcatcaggagattcctgctattacacgttttaacggcgagaggaaacgactacgcacatatgctactatgatcagttcggtaccatcgttctgggggcgtacacctgtttgtgagacagaattctttctaagcctgtcctttggagggcgtatgacgaactggaccattgcttagatcttcgaggtctctgtccaccatgcaagttcctatgtcgtttctttgatctttcacaactgcctccggtgctgaatcagaacaggtaaatctattcaggcacgcttcctttcggaagaagctcagccgacaaccacaacaacccggaaatgcgtctcttttctgtgtggaacagtcccgcgatgtttccccattacaaacgaaacatagtggactaagtaaacacgagtatccggcgtaggttccagtcttcataatggcgattgtggcagtaaaaactggcgagtcgccgttgcatgcaagtgcacacgcctgtctctggtctgcgtgttgtcgagcggaaagctctttttctttacccgggcttccagctgttttatcaaaggaagcgtccactggatttctctctgtctcgaagttggaaaggtgctgacagaaaagtctacttgtcactctgcgaatgcactcgaaatccgttctttgctggtgacgtcgtcgaacgagctacagcagaagccagctcgcttttaacgacttttcttggggcagccgaagatgacctcaagcaagaaggcacaaaaatttcagacgacttgaaaagcgtcaaagaaacaatttcacagagtcgatctgtccagtctctgcagtttgcccttttacgtcgctgagcgtctcgctgcagcttgcacgaacaccgcttccgcttgctcgaggttttcctgcatggctgctctctttgctgttttgcttttcaggtcacacgcgccgttaatttcgtgaaccacacagcgaattcaactctcgtcaccattcgttagaccacagggcttttttctcgactgaattccctctgtgacgctcgatttccggctctcgcttcgtttctgcaagtcgttccgtgttcgtgtctccgcgcgactctccgacgcggcctccgttgcagtctcagtttttttcgccgtcaaccgtcacca

SEQ ID NO: 2744 - DNA, 2941 bp, Toxoplasma gondii
  source 1..2941: mol_type = genomic DNA
actcaaacatgcgaatttcgtgttttccatcaaatctatttttgacgaagaggcttgcaggtagtaccgtcaggacatgattcatgcaatctcagcattagaggttaaacggtagaagagctgagcattctccaaatatgccaggcgcaaaaactgttcatcctgttactaaacaggtggtagatgagcaaaaatccggttcgtgcactccgtacgtgtccggcatggatgcaacgacacggcaagtgttcctttcggttatttcacctctacgagagttgagaactgaaggggctctttttgtggaacgttttactccatgcttgcgcttctctttggaggagaccgaacttctggttcaccaccggacctctggagtttattcctgcccgtgcgtcatgagtcgaagtaacgaaagcgttccatggcaatcgaacggactccttatactgtttctcaacgaacattctgcgatataatttcccagttaacatcaatggcacacgacggcctccttcccctcacttttgtctgttcacttatctcaaaatgagagctgggtctgtgtcgagttggagaatctctaaaaagagtttgtactctcaagagcatgactgtgaccgtacctttttctggcgcctgactaatagttccctctcgctcttcacgcacgtgatagcaatcagtaattgtatacagaacataaccgttgagggagaaccataatgtagaatggtgaagtccagcgctgggttcgccgtcagcctctcggataccccctggattctctgagggcggcggtaaagtggatatccactgctgaggtcgcatacatatcgtggagtgaacgaacttccttttttgcgggacttcttacatgaaatgtcttcggaatgctgtatttaaagcaccacatcgaagtaggcacggatgagcgcaggcagcagcgaaggaggcagcgcttcgggcaaacgaaccaccggaaaacgagatattttgtcaacagaaagcctgcatgagggagccacagaacctcgtaggcatgcgtagctgctacgctgccaaaggcgtctgcacagggagcaaggaacactattggcagaagtgtctagctaatcaaagagaatcgaaaaggcttgagactcagaacactctcgagcctctttgtacccatccatagtttgtacattccattggcattcccgttctgagcggtgtatcgaactctgagaactgcaggggcagtgacttgtacctcgtgcctccgcagaaaattaaacgacttgttctcgaccttcttgggaagagatgttaacacaaaccgtgcttttatgtgagagtgtatgtaccagctttcttgttttgtccaggacgcttggcgtttttctgtgagtgtcctgccggcacgagcagtactttatcgcggtgtgctgtgaatctaacttccgttgacggttcggatgctcacgaccacctacacgaactaatggaaaacattccgctcctcccgtttattttcagttcgcgtccttgacgacatcgcggcttcgctggtgatgcctcaacgccacacgcaggaaaaacttgtgtctttgtttcgcggcgagaaaagaaacaggtcgagtgtatcttccccgttttcaactcagcttctccaccgaaatccgcttctgagctaatctggatttttacggaacaacttcaaaggacgcagacttcttttttccatatcgtccatacctcgaggtactcacttggttgtcgacaccggttcgtttcctggctgtctcccataacagcacggctttctcctcgactcaacatacgcacagtttcagagtagaacgcgtttcatttgctctagaaagagtcgatggctgaacttgagcgtcaccccaggcgtttcctgcggaataaacaccccctccccccctgtttctttaagctgcactgagtgtacgcgcgggtgtcggggaaacagaaagccgaatctggaggtggcttggctttgatttcgttgggttctgttttcactggtttcctcagcctctatggaacactgttgtactttgtttcgttcttgtcaacgaagcagctcgcgcactccgaccctctctgggaatgcgtttgccctctcccccctcgaccaccccccttttcttgtctcggctgctttttccgcatttctccgttccgtcgccttgaaacactgtgatttatcgtttgtcaaaggaaattcgccccgaaaaaactcggaatccgtctgtttttcacttttgcggcacagtgtgcgcttgtctcgcccctcgctcccgcctcctccgtctccggacccgcgtaggaatttctcctctcagacaaagacaaatctcgtttgttttgcttcacgtgaaacgtcgtttctttccgtctaagtcgaacttttttcctcgacacgcgtttctcccagctctctggcacccgcgcttttcctcggcaaacaggcgctgaagccccgctgtacgcctcctcgtctgagcacagtgtagagcagtcggtttttcgtgaaacgcgagtggagtgttaaacagaaaacagggacaagacggaagtgcacacgcggcattctttgtcatgcatcttgagtctttccgcgacactcacacaagacgtttcccggtctcagatctgtttcctgtacacgttcctgccctcctctctcggtctttttctgtgaatcccgccaaatagaacgtaactcccgtctcctccttctgaaaacgccccaatttctcctccctcacagttctgtctctcctctagtgttttcctctcccctttgtgtctctccccgtcctcaagtttctctcgtgtgtacggacacagcgtccaggcgagggtttgagttcagggtgtctgtcaaagaggaaatctttcgctttttcactcttcctttcaaaga

SEQ ID NO: 2745 - DNA, 5000 bp, Toxoplasma gondii
  source 1..5000: mol_type = genomic DNA
acgctcacgatatcgacccgaatttttgtttgtaagagtggatcgcatctaaggcgagattcgctggtagtaccttacgggtgatagcgcgccaagcgttgtgcctgggacgtgcccagactcacgagattttccaccacctgtacgctgagtaagcggtcaaaatccgtagggaaacttgcctgtagcgcaaaagtccagtgctagtctagacattccggggagacgcggcgcggatacagtgcatcctgcttaccaagtgggttgggtgcggattgtgccgaaggtgtttgccactgagaatactgcgctgcgttggctccccacgtgtagtctgcagctgcgacagccgccgtcgtgcctgctccatacgcatacccgtagtgactgtaggggtgaatgccgtactgcggaggggccgccatcttgacccgcccgagggttgatggctcctcctctaacgagatccacgaagccaagaacggcggaccgggactggaccgagaacagagaccacgtcccgtcaaagcgaatagacagctcctacaccactgagtggcttgcgcaaaaaaggcgtcgaagactggtttgcaggaaaggggcaaagaatgcagctggactgacccacagtggcgcgcgtgcggggacagaactttggaccggagcagacgtccggaaagacacggagggttattgactaatcaaacagaggaaatgtggaaggaatagacatttagtttgaggcgtcgggaaacagctgtttccagcttttgaatcccgttttgccgaatgagcgttgctcccgtacaccaccgcgacggcaagaaaaaaccgaagcgcagctgcactgtaccgacacgcaaaagttcttgccgtgttgtctgggtcggtgtttcgtttcccccgatacgtcggaaattctggcgaagttgatggtgtcggttcgagtggaatcgtcgcgcgccaaactgctcgaccgcaagaaaaaataggttcggttaccggcgagagtgagacacgcgcaaaatcgtcagcaaggggaggaaagctgccaaagaccgtttcatttatagcagaaatccacgacaacgacgcgtttcccaggggcgatttccaaaacagcatacgggattctttaccagcaaaccctttggtgccaagtcaacggccgtcgcaacaggaacgcctcgtgcaggggaaaagacgaaaaacacgcgggaaaaacgctattgggggggactgccagtgccaggggcgcaatcagaaaacacagcgccgacaacgtttttcgatgcagctaaccggggaaacgaaagaggattggaatgagccacagaagtcaggaaagaagaagacaccaaagtgaagcaccaaaattccataccaccaagaaatgagtgcaaacggagagagagagcttaccccggataaaaaggtgcgcactttacgctgccgcccactctctcgctcttcagcagctcgtcgtcccatgggcatcgaactccgtgaggcatcactgggatgaagcttgttcccagtgtgtggttgttgaccgtctgtcacgtcagttggtgtccgcaaaaggccacctgcaggaaaaatcggaataaaagggaaccctggcacaaaaagcgtacgacaaggaatggagcaccggccttccccaacgagtgggcgcattcgcggtgaaggcctcagcaatccggcggacccaggccctctggcaaggacttctgtacggccgtagctctgtattctgaagtgcatgtttcctgggcgtgaagttagggtttcggcatgcacaagaggttggagatctggctacggttacgttagtacggaaaaacagtggcgcgcgcttgcagttctgatggcgttccgtggcatgaatacatgctggcgactccgacgatgaagagacactccaagctaccagagaccgcgactgactctggcagtgaggtcacgataattctattaatcgttattctgtggaaatgggatgcacaagttgtttggagtcgcggtgcggatcctggaaattagtgcagtacgtcgccgtgaagccacagcaaacaggcgtagacatcacgtcccactcgtggtgaatgtaaggttcccggtttttcctgttgagtgctggaacagtcacgaagttgatggtggatggcaggttgaatgactgtgatccttgggtccctttgtaatttcatctttacacaacgccggtccctgtctcctcgttggcagttagacgaacatttcggaaatatacaaaaacatatattcgctttctgtactggtggcaaccattatgtgaagagagtctctgtttggctcgaaagacgaagtaccctagctgttgtctaacacccgtctactgtctaaacgtgcttcacaatgcatggcaaagaactatttgctaccaagagctcagaggaaaaacttgcggtgacaaacgatgcctgagcatccttgttggggctctgccttaatagttgtgcccccagtggcattcaacaggcgacgttgaagcccgccttacacttgtgatacgtagttgatgcactgcccgctcatccctacccgccaagactggattttcggttgtgcttcccaattgctgcaacaagaacactagcacattcttggttgtcttcggtgagctgctgagataaattttgtcttattgtcgatgacgaaggttctactgcaaaaaaactgagatgaataagttacggtgttgggctcgtgagtgtttatcaataccttgctgagtacaactagtagttgcacgcttgcaagagggaggattttgtctctctccgtgacctcactagtaatagtggtggacagtggtgcagcccggtatattgcaagaacatgatgcatcaaccacctaccttttcttacagagtgattcccgatagatagtgttcaggcgttaggaccgctacgggttgtgtatgcgtaggagcccttctacgtgcccacggaatagattatgaacctgagcaaattccctttccatttcgttattcggtgttcatattttatttacaaagtagagaggcccgctcacgtgccggatgcaacaaatgtcctctcgtcctagtcatcgtcggacagctgtttatcagatccgtgtggcactgtcctggatagcaacagcgggcgttccggtcgcgcagcaaaaactgcgacactaagaagacgccaaaggaaacgcgggacaaaataaatcgaagaactgacacccagaggtgatagggaggacgtggtgttaaaaaggcagcatcattgtgcgctcccaaatcctcgacgagtttgactccagcggcagcacattctgacccaataagcggtgctgaccgcggaagaagttaaacgaagggggtttgtataagttgcttgaggacatcgaagaggagtttgcattaaccactctgctcagattgaagcttttagggttggactcgggagaacgaagcacgcgcgaagcacgtccaagcgggtggtctacccaacatcgcaaaaggtaaagtccattagcaaatcagtcccctgtcggtacgagcagatagaacagggttggtagaggttgcactccattttacggagcctctctccccccgcacagaacacctgaaagaaacgctataacctgcgaggaaagagcatttaaaaccccctaccaaacaaagagtgggctgcgaaatccgtgcggctggacgtcgtagtacggctccaggatcctcccacacaaaacagggcgttctaaccaactgctcaacttacgagaaaactacaaacataagcttgaatgacctgagtgacggatgagctggctcagtgtaatcagctgaatgtgagaacaggaagagatgacagcccttcagaatttggtccgacacctcctttggtttgaaagcatgatccacccccccaaagtttatgagccccccccccctgtcagagttcatttttaaagacaggaagtgcagactagagcgcggcctccggagggtcgcgtgtacattccagcttctttgtgtagtacagcctggatacgaagagaggaagcagacaccatctagcggaacttgccgactcactccccgtacacagagctctcgtttgtgctttctcgaacgatagtttacgcctctgcgctcggccggctgggcatgcgtcgccagaaagaaaatgctggctgctgcaagaattgtctgccttgttttgcccagagaccgcatgctgtttcgggggaatacaggtggacccgcgctgcgctctggttgacttaccgctgcctggcaacagcccacgtggtcgcgggccacacagggaaagactcagtactgcccctcctaggcgtagcgatgatccgtcagcataccagggctgctcgagttttcgcttttcagtaacacctgtcaatacgaacgtgacatttttagtgtgttttcctgtgtctgtgacttctcgtgaagggaaatgctcttgttaaccgttttttgtttagtttagtgtttgcgctaatgccctgggcgacacgggactcggtgactgtggccaggggtgtcttgaatatctttttcgcgagcgcgcttcatacacgacagaacgccagccagttcagagacaagagttcgctggttttgaacaaacaaaacagcctgtcctgcgttgtcttttcgtctctttgcgcgcctttacctgttggatgttgggggggaatctgttttttatgcctcttcccagcgccaagccatgggctagccggaaatccggctagcatccagttgacccgatatgccagaaactggtctgtccaacagtgcttcgtcaaatttgcttcctccaatgcgcacttgagcttggtttctttctgcaacttctccctcttgtggagctataggctcaaacgccgcatggatcgcggcgtgtcttcttagtgtctgtttggagcgactcgttggacaagcggtcaaccaaga

SEQ ID NO: 2746 - DNA, 3230 bp, Toxoplasma gondii
  source 1..3230: mol_type = genomic DNA
gcaaaagacgggaactgggctgagagggcatcttcttcgatttcttctgccgttcgcttctcgaaacccgtgcctccagcttgcagaacccggtagaaactccagagcatactcaagacgaagtgggcaagaagcaactgcactgcgtagaatgcacataacgttgcctcgtacaaagcaaacgaaacttccacttgccgataaacctgtacgggtctggttccactttggtcagataccgtatccgtcatgaccgcgtactgactcagcgttacacgagggaagtcttctctccccgctacagaggcagaactgtgcgtgaccttccatagagaaaccgccgcaagagccatctgaagtgcccacagaaggtagaccataatctgaaggtagaaagaaacgaacgcgataaatgcgttttgttgtcccgctgcacagagcagcagcgtcgctgtgactagccccaggacagctcctgaggtgaaggccgctccccggatgttgaaatccagcacgagaaacacagaaaaagcaatcaaaaacactgcccagagagtcacagctgtgccaagagcacagcaacaacactgacgatacgtggaaggctttttcagagaacctccgagcagcggctgatcctcagccggagcctccgggtcgtccaccgccgtttgcaccgccatgaccagaaaaaagacaagaaaaggagaagctggtaggaaagagggtaaagaaacgatcctttcctacgccgacgtgggactacgaaacctcgggatgcgctctatgacatcgttagagctctgcggagacgtcgacacccgttgtcggttacgatacagaacaaagaacacacgagagaaaaaacagaggcagaaaaagcagtgggaagaacatgtatcgacgaagaccaacagcggtttctacggagagtgcagttgacgaggaaatgcgtgcttcacgtgtcaccaaaagtagacgaattctgaacctgtgtgcataggacaaatactcggaagaacgacggagaaggaaactggaggaaactacagacgcctggcagcatttaaaagccttcctttcgaggtacgagtggtagccacgaacagtagttggaaagacattcccacaagacagaactgactgacggctgtcaacgcagcgaggtagctattatgaggaggacagagtgtttgcaggcacagaaaaccgctctctagtaaatgctacatgcctgagagcacgcggccacactcgcgtggggcatgacaacctcagacctggagaaattccgtggtaagcggccctccgaagccagccatgtttctttcttccgtcgcagagtgccgagtcttagccgcgttcaagatgtggccgaaacaatgcacagctccaaaacacaacaaaccggacaaagaacgtgcaactttcgaggacttacgttcccgcgacaagacatgccacagaaagccacgaaagaggcctagcccaacaaaggaagcgacggagctagctgacccccgatcgtaaggcggctcttggagtgcaatgttttgagtcgatatagcgacggcaaccgtggcacgagcttcttccagtctctctgtatcaggaagtgctgaggattgactaaaaacggccaggtctttgtctcgtgtttctggttcatctggtgtctaaagtgtagcgcgcgaatacaacagcgagggcgtttccgcaaagtcgtcggatgtgtctgcgtagccttgcggagcgagcctcgcgaaaaccgaggaaagcgccgcatggtgcgttgttacgacgaacccaaatacttcaggggagacatcgtccgccaaacgtacggagtgtcatgtctgcttctaggaaacaaccatagaaaatgcacttttccccacgtctctcttatctgataaaggaaatggattttcccacaaaggagccgcctggtcgcagatccctcgaagtaaacgatgacgctccttccctgcgcttcacttttgtgctcagtgtgcactgaatctaggggattgcagttttcaggagacaagattttcactcaaggtgtcaattgtggcgcatgtagcgcgactcaatcttgtcttccatagtctttggttgccggacggcgtcggagtggtgcgtatccagccatttggcactagtgctcagtgtcagtgcgaggtgggtgacactttgactcggtgagaccggactgcgagagcccgttgatcgtttgagaaaaggcgcagtgcatttttctggctgcttgcacttttttgcctttcttacgactaggctgtttcccttcttttcgatatttttccgaggcattgctttccactttttccggccgtatcccgcgagtgctgcggcgacttgcgggtcccagactcctccacaatcctccagttgtcggcctgcttccgcttcccgttcattgaaatggactgaagcagatgcgccacctgtttgcgtgggtcttgaaccagcaaacaccactgagtggcggctgagagacactgccgttcctctgccagcagtcgcagctctgtacatcccatggaccactacaccaccggtgaaactcaattggtttgcacactttctcgcggcgacagcttaaacgatacagttttccggagttgttggagcgtcagaagtcccactctaccgaaagagatgaacaaatggctgctgggaaaaacagtgtcatcaaagcaagcttcagcgagtgttcttgatttgtgcggtctcagggaaatcggtcgtcagtgcacctcagatgctggagtgtatgtacaggcgaactcagttagccaaatcttcatagaaaagataaatgcgtgtcccgtgtacagttttgagccgccgtcgcaatgagagttttcgtcgtgttttggtgagtccctgtgtctgttgactgtgaaaacctccgccacccagtcagtgcctcgtctgtaccatcctgaggtaccgtttcctagttcaggcgcatcagccacggaaaacgcgtgcgcctctcggatgcaaaaacagatatttctcccggttttccccctcggcagaaactttccgtcttccgagtccctcttctgttttttccgttctgtttctcggttcagaaacgtttcttcacctcgttttccccgattttcggcactcgcttgagaacgtcgaggattcgtcccccaaagcggtcctcagtgcccacggaaacgcatgaccga

SEQ ID NO: 2747 - DNA, 4459 bp, Toxoplasma gondii
  source 1..4459: mol_type = genomic DNA
agactgcaagaaaagtgtggacgagaagcgaccggccatccgacagccgggaggagtgcggcagcagtgcagcggtgcagcgcaggggatttcaaatgaaaacatcccttcaccaagctgagatttcgcgtgcaaatttaaacgtgaacagcgctggacacgaagacgtggaccccgaggcaatggaggacgaggcgaggacggaaagcagagggtacacctgctgcagacgagaggcctttcgggggaaagaggttcggtcgcagaaaaatgaatttgaggtcgggcgcgtgcctcttgttgagaaagcaaagtcgacacggagatcgcaggtgctgacacggacaaatgggtctcagaggtggggtgtacgtacacccaaagtggcgggagagcgtctgcgccgttcagcctagtgcgggagtgtccacgtccacgctgtggactggagggagttgtcagttgccctcccttgaaaagaaaggaggaagagagacgaggaagcgcttaccccttgcatggcggccgcagatgattcactccgggcatggactcgctgctgaaccggctccgacacctgaggcgcactggtttggattgactctccgccggcaggcacatagggagtgttttctctgtgcagcgtggctcgtgtccttggttttttgccgaatggaaaatgccgagccgaacagcgcggctgcgggaggtcggggccagccagtcgcgcgcttgaagtgcggcccaggaggctccctggtgccgctcttaacggagaggcagcagcgaaagttcctcaacttccccttcaccctctttgtaggtaacacagagagaaacacagtgagtacggacgaagcaccatgacactcagcgagaccgaatggaacagacaaggtgggaggagatgtgccgctgcatgccgcggttgtggcgaggaaacgagacaacagcgactgctcagagtgtcgaacgcgtgcggatggacagccaggggagagagacggtcggaaacaaccaacaacctgctgagttagccgcgaaagaaaatgtcgggagaattcctcaaacgtggaaagaaagggtaaggaatcgcgaagcgatacaagggttcgggattcctggaaccgaaaggcgggacacctacgctgtttccgcggcggaatgccacatgcagcgacacagtgtcgcaagaagacgttcaccttatattcacccggaaacccgtaaaaaccccaaaaaaagagaagcatgctacggtccacggcaacacacagaaacgcatgcacgaagatcaggaacggggaaagctgctgccgttctcagaccgccgttgcccctgtcgaaggcatcgcgcgaatgctcggtcgggcacccgttcggtctcgccctgcttgtcttgacggcagaagtcagaaagaaagcaagggcgtccggagctcgagaaataccgttgcgatggtctttttaacgcctggaaaaacgcgaaaaaacactgtttcagaacccaacacttagtcgaagacccggcggtcctctgcccctcctggccggccggtcaagaggtctcacactttctccgagcattagacgggccactgcacactgtgcgcaaagcaaatgagggacctgaaggtgacaacgggcttcctcaccgtgttatggaatacaaaagcactgtgctggagtttcactatgatataaaaagatggtcatgcatctggcactctgcgggtccctggcggacgtacgagggttgtgcgctttacggtgaagtgcctcattggcgtcattatggacgtccttatagggtgacgcgacgccgacagcagaaactgaaggtgcagtctatccaattttttccgtgtgaggtcgcgtcaaaacttacctgtacctcctcccgcgctttcagcttggtacacacgcgctcttcaaacttacggacctcccataggttgagaacagccacgtggcgaagcggaaacgccggtgccccagaacagacgaactaaacaggcagaattgatggttgccgcggatatctagttttcgtcttgtactctggtgctgcctattcatgtggaacctatcaggaacggaattttgcttcagagggtcgcccgacagtggtggttttttatcgccaactccccgggtatagatctctcttccaggcggtttggaatgcatctaccacacaattacataacaccacacacgaaatgctgttgctcgacgaatgcagtgctaggatgtgagtagttaggaaggcaagctggaaacatgcagcggttcggcctgtagcgtgcgaacaccacacacgggtatgcacgccgttaaaagaacagatggtaaacaggtattccgctccgctcgtatgttggggaactcagctctgtctcctgaatttgacttttgttctcgaggaactcccgatcccggtgctgacacaagcctgaacatgcgttccggtccgtctttgtgctgccttggaggcgtttctagtaagctacgtcttttcacgctgcattctctctgatcggccaccaaagagtccaaatctccaacccagagccgtacctaagcatcgatgggcagagagggatgccggtgtacggcacaacggctgcccggcacatctaaccttgtaccagtggtctttccttgaagtaacggtgacggagatgagtttcagtcagttcgtttcgcgaatatcttttcagtgacatgcccaggccgtctgttatcaagggctcccaactcaacagctgaacgtcaactgtgtcgtccgactgcaagtgttacacttcaccacagagtgggacgttccgcgtctgcagagttccaccgacgtcggcgaccccccttcttaacaaccttcaggaacgagttcgggccatctccaacggcgagaactagtctgtttaaggtgaacgccgatcccataacgttttgtgtccggcacacttttagggttccgacgctaccactcagaagatatcggtgccactgcactgtagatccactgaacacgcttgctgtttcttttgactgttcttccacgataaattgcgtttcccttgctcagtgtgtcacagtggacacacgctatgcggcgtgcatcgccacaagccacaagcgacggaccgatgcgcggctctacatgtctgcctcgagagatttgtatggcatttgccaagtggtcgctcttggtacggcgcaggagtccaccggaacgccagtcgaagacaaaggattccacattcgaccgtagcacacattttcgagtggcttccgagtccggaatgctcgacagacgccgtacgcgtttgccctaccccgtcgggtatgcatgcatgccgccaatgatttccgaaactggcgacgggacgtttttccgtgctgctgtctagtatgttttccctttgcaggcaaattggaggttcatttctgcgcgtttgtcttgcttttcgcgaagtggaacgcttcgaactgtcgcagcaaaaaccgctgaagcagtcccccgcggtcacagcctttgattcagcggcagctctccacacgccaattctgggagttttgtgctgcagcctgctcagtatccggttggcgctattcagtgtaacttcttggtttcttcttcatcttcgcttccgcagcatttttctccgcgacgcttgcaaaggtcgcaatgaccctttggctgcggtgaaagattccgaaccacgtggaggggtccactccatcaacaaatacccgctctcggtttcttttccccgttgttcctctctgcacaaagattatatgctttctgtctgtttttttgtaccgttttccgaagctgtctgttctccggagctgcagactcttctcaactccgtaggcgccgttttttcaccgaggtagagcctcactttcggcggcgatgcggcagaaagacattgccgctgctgtcccggccatgtagtctgggggcagaccacaggcgctcttgttctctacgcatgttctgccgtcaatacttcacatgtttcgcagctcttgtctgaacgccttcgattttctctgaggcagcttcctcgcggcagatcctcctttttcgccccgtaaactgccaagttcttccctctgaaaaacgttcaccgtctttgtcggttgactttcgcgcaaaagtgccaggcggcgctgtctcgttcgatccttttgtgtacatctcgtcctttcgaattcatccacagctcaatcgcgtcgcaccagtcactctctgcatgtggctctgccgttccggtaggtccctccgcgctccctctctccgtctttgctgtgtcgtctttctcttgcatttcctgcattttcagagttccgtgtggatcgctctgcctccagtcttttcgcctggcgaaatcatttcgcttcctcagctgtcagaagacaaccccttcctcctctggctacaaga

SEQ ID NO: 2748 - DNA, 1856 bp, Toxoplasma gondii
  source 1..1856: mol_type = genomic DNA
tttactgacaaagaacctcatggtaccacgaaataggagattgcgttagttttcgcgcaccctcagacactacttcactccccctggaactatcgtgctcccaccgggagagctgcactggaactccgcaaacgcggtccgttcttcggtcgcctttcgtgtatccgggttctctccctcgcgttccgtttccctgactatcatacgggcaaatcggcgttacgatcagtcatatctggaaaatcagaatccatttgacactgcgtcattggcaacccacctcccgcggctccctctcaatcatgtgagcttacctatcatcgtccttgccctcagtagcgttgcctccgattacacccgtggctgccgctgacgaggtccgggaggacccgcgccgcacaaggagcagaaatagagcagcaaacccagcaaaaagaagcagagccgtcaccagagactccggcgaaggcgatctggagaaaccgaacagcggggtcgcgcgagttacgcgctggtgctgattggcgtaggaggagccgctaccccgactgcggccgcctcgcggatactcagcgaagacgccaggcacattcaagcagagcgcgtagaggaggaagaggaaggtgactctacgacagacgaggacgtactcaccatgacggagcagcgatctcccggagaaagacgctgtcgcttctctggaagcacacttgcttgcggaccccctagaacagactccgagccgcgctgccattctgctgacgtggatgaaggcctcgagaaagagcgcgtgcgcgagggttatcgtagatcgccaagaagtctcactttgcgcattcatacatactgcacggaattacagaaactttggtttaccctgaataggctgttaccaccgtacgtttgtatgaaaacggaactgtgtgtgccgcttcgtttcggcggttgaggctgacgggggaaattaaggaacctcggtttctgcctagactggtgcttctcgcacgtttagtcgacaggggaatggaaaaacataaccaggaaatgactgtaggggggaaacactcttcagcctgaatgagagctctctagacaagaggcgacggaaacctgcggctgtcagcccggcatcaacgtaaatccacgggttgtgcaggaacagaacaagcaaataaggcgagagaattatgagatgttttacatgcaaagtggaatcatgttctgaaagcgaggcagtttcagcctcacgggtaatcacctcgacacgttcacagtttgctcgcccagtgacgctgcacgcgtgctgcacggatgggctctttttccaagcagcagttttaccggagagaagcgaagaacagtgtgaaactgaagcattttttcagcgcgccatccatcggaatgaggagggaactgtatctcctgcatgccccgcttctttcagggcaatttccggtgagtttcactgtgtccagggaagggaatacgaagcgagacggcgaccccagcagtgctgcggaagacagaaaaactagagccacgtcgggaatatgtgtgctggtgtctcgttaaagtcacgtcgacactttttttcaaaggcccctctcgtttatctcatcccgaaaatagtatcgttggttaactgcaagaactctgggaaagtgcgctccgggtgagaacagaatctcccatgggcaggtcgccgagtgtcgcaacaacgtgtcttctgaaaggggagactggcaaaatcccgactacaagctgagagtaacggctccaaatacagaactgattcttccgctactctacagttccacgatgaatgttagaatgcccccttctctgcacacatagca

SEQ ID NO: 2749 - DNA, 2076 bp, Toxoplasma gondii
  source 1..2076: mol_type = genomic DNA
ccgtcgtcttgacatgtgtttaagactcgcgtttttcatggaactggtataggtaccagccgtttcctcgctggtgttaggtttttgctgagcttgagccgtcagcgacagccaacgcccctgtttgtcaaggcaccaagcaactcgggactccataatctcatggccccagcgcaaagcgaagtgtcaccgcttatgaattcacgtgcagtcgctaagagtgcttaaagagatacaaaatggtattgtgcaatacagtatgtatctaggaaggcagtatttccgtacctgcgttacatatagcgacacatgttgcacatgccaccgcagcacagccgtagctggggtgcagtttttaaactgctcctggtaggagcaaatgttgagacaaatgattggtcgtcaaacagtcttgcaggggctgtcttaagcactccattgggtggtcatctacagcagcaatgaagaactcggttgtctgtaacttcttagtggactcatattcagtattctgggtactatagtgcctctattctttttgagttttacacttcaggatagacgatcacttgtacagagactcacttgggccggtggcaacaacagcagtgaaagtggaagagtgtagagcttgcgtgaagaactgaagaacatttttgccaacagatcgcctcgccacagccacaacatacccgcacctaaaaagtggcagcttaattatgtctgaaaaggtgtagtaatcggtggttcgtcgaaaagggtgcttaccgaccatatgctttcgagccgcatgcagccccgcagcctctctcggtgtatgttccatcgtttcgtgtaaccaggcccgatggagatggcgtcctcacagaataaggaaacaggtgcctagaactgatcagccaataaatgtaacaccactgacctcaccgggaagtcaggggcaacgtcggcctttaatacgaattgcagcgaccattatactctagacaactacaactatcactacaacgtccagatttaactcctaggcaccggatgcacttgctggcatttagctggtgggaaaccgaatttcgagcacccaccatggactggtacagagcagttaccgtctccttcggacaacgccggcagaagaccttcacgtagtgctgcagcgggatatgccaaaagccaacaatcaacatgtctgagggaaaatggctcacagcaaaaccgggaaagatacaggggggaaaagaacattgtgtgactcttaaggcagcaagcacgcgtgtgtcagactccctgctggttcccacacatctctggacgggtgcctcaaaaagtcacgtttcgaggtttcgttgatactcagaatcgcacagtcttagtgaagattccgggtggagcagcggttttgtttttttcagaggtgaatcttctttgcgcaaggtatgtgtgctgtcgtctggctgactttgtcgcgtctgtggagtcctgcatctttttgccgtggcacacagttgattcgtcgatgcatgcacgcttcggcggagagacaagtctcacggctgtcgctgctctcacgtggacgctgcgtgaatttcaagcaaagaaacttcgcccaccgaaaaaaacacgatattactgagttgacactgaacgcgcgtgcttcattcaactgtttctgcgcagtaagcggctatggatgacagctggagtttctctttgtcgaatttcggtggcatagttgtttggtcgcgactgagacatagcttcgtcgcttgacaaggcagtgtcctaaggtgtggagttgtaggtgagggactgaggcggactccacatgtggaagactaccgacattttagtcaagtggccctgtgactatgcgagattcaatgaatgccgaacgatgtaggagagacaagaaacgaagaaggctgcctggcgttgtcgcgtgtaccgtgacttcccacaaaaaacctaggtgaagagggtcgacagcgccatcagacctgagaggttgcccagttcagctaaactcgtttcctccaggcaaggagtcttattgccagctgccggctgtatgcgaaa

SEQ ID NO: 2750 - DNA, 1673 bp, Toxoplasma gondii
  source 1..1673: mol_type = genomic DNA
gacgagaggagacccaggttctcccggcaagtccaggagataggtcgccgcgtcgagagccgctggcacgacctcgccaatcgattgaacgagagaggccatgagcacagggcctggcccagtggttcccgggtcagggttcgcaaaattcaagcggggctccagctgcggtcccgtgaggaacgcgctcggattctctaagaggtcggggtagcaggcgacgagctcgtggagaagcttggtgaggagcagcgcctcctcgtggaccgggagaggacgggcgctctcgccatcagtagcaaatggcgggaggggaagcagagcctggagtcgctgcacaataggagtcagcggctgaggaagcggcggggcctccagaggcatgaactggcgcctgcgagacgcgaccgccttgtcccggtccgagcgacgcacacgcagaaggctcgagtgtcgggaggcctggtgaagcgacgaagccgtcggccgagaactcttgatgccttcatggtagcggtggccagaagcagcgcggggctgctgggattgtggagagggaaggaggggggaaggtacagacccgatgccgacgccgacgcgcgggacatcagcgagcccaccggcgctctctctccaactacccccgtgatgaaaggcaaacggagaaggggtgcctgcctcggggcctcccggagagccccctagagggccttctgaaaagagtgtgcgcgcaggcacgaagaacaactggctcggtccagacaccgggtccggtgttgccgaaggggaagcttctgccgcatcagacttctcagcaccgtcacaggaagacggtgggtcgccagcccggtttggatactgagactccatgagcaaaggaagagaggaagaagaacgcacggggcacgcactctccggtgctctgtgacttcgttcagtccgcgaaggcagctctggtcattctggaaaaaagaattggcgacgagcatatataatcgaggctcgttgtgggacggagatgcgcttctcaaagcctagaagctgccatgaagtggcacggcgccgcggctgtcctgggcatgactcaggtgacttttgcggtggtacagaaccggatgcaggttggcggaagagtaacagttgctccctcgcaccggccaccctccgtggaaaagtcgggacaaaaggaaacaacggaaaatccgaaagttacgaccgaatttcggaggtagaagctcctgggcatttagccaacacgagaagtggccgacccaggcttcaccggaaaaatctcagtatcgcgaacgatgcaaggaaaatgtacgccataaaaagggggaggtaacatgtgcaatggttcgcgtcgctttttttctcactcggccgagtggaaacatgtgctgtgatgcgttgggtgactaggcgtgccaatttttttcccctgtttcaccccccggtgaacagcagcgaacagcacaggcagggaggtctagatgtggcgcagcagcgactggtttttcaggggagggaggctcgcagcgtactcgggatgacttcagctctgtctttcgcccaccacttcgcccggagtgagcaggttcggggtacgcggaggagggtggctgaagaccacctcagtcgcctaccccgaacacttgcgcaggaccggccaa

SEQ ID NO: 2751 - DNA, 1883 bp, Toxoplasma gondii
  source 1..1883: mol_type = genomic DNA
tccacctgcgactatcgcagcctctccacatattcatttatgtggatatatatatatatatatatatatatatatatgcatatgaataatacttacatcaagcacatttaggaatgcaaatgtgtatcgtatgtatatatatacatatataaataaatgtatctgagtacatattgacagcatgcttatttcggagtgcacatgtataatatatacatatatatatatatatatatatatatatatgacatacacatttaatggtggagaactgtggagatgaagaggcgagcctcaaccgatgaacgggtgcatttatgtttctctacatgtagagattaaagcaaagttacttgagaaaaggggactgaggctcagcggggctccactgcgcggggcggggtgtaaggccgcccgtctctggtcgtgaaatcggagaagaatgtgtgaaaagggagtcatctcccacggtatatatgttgtcaagtccttcaaagctccaaaaaggtctctattattctggagaaagaagaacatgcaaaggaagagcttcttgtgtctcttgaaagccgtaaacccgaactactttttgcgccacatgaccgagaatctggacctcaagctctcacgactcatcgctacgaagaaaactaatcgcaagacaatagtagaaagaagcatatatatctatatatatgtgtatagatatatgaagaaatgcgtgtttgtgtatgcatatgttctggcaagatgatgcgtacgagagagtgtatacacactgcgtttcagaacacgagaggaagcagacgaattcaggtaatgcggaccttctcaaacaataggagacttccgagacaggcatactcagtgtctcgaaaggcggtaacaacttgcacacccatctttcctttctcctcgctcttttctcatcgctcttcttttcttcttctctcgctcttttcttccaccttcgtgtgtggtcagctggtacctctttgcaaagtgagcaaggtcaagagtgagagagctttagatttccggtgccttcacatgtcaaggatctttgtcgcctttctggggaagatcttttggaaagcgactctggtttccatcgaaacgagctgtcttgtctgcccgtgtgtgttgcatgctgagaaaagcacatcattcttcgctggtggctagtggtgtttctcgggttcgatttcctcctattctcctgcttttctttttcaggggacgacaacctttcttatttcgctcttcttcgtttcagcgtgttaatagaaagacaaagacgcagagaaaagagcctcgtgactcttttcccggctggtacacgaggcccgccctctctcctggtgtcttgcggaaagccggttcgaacactggagaacttttctctcgagcaatttcattccttgtgttgtctctccttctctctagctcttcatttacacgaatccattctcacctgtcactctttcgcgcgacctctctgtttcaagcttcctctgcaccatttagggtctaccactctccttcaatttctccatttctttccccttctgagaccttctgtcgacggtaccctgaatatccctctccattctctctttttctccttcttcttctctgtttctacctgcgtcttactccacctctctgtctatttccccctctctctgtcgcgttgcctctctacctctcccttactccatctcatcccctgtgtacctcaaacacactctctctctttctctctatctctttacctctcgacttcttcctctctctccttttctcgctgcctccaacgcctgtgtatgttgttcttcctgtctggttgctacggctgagatgacgttcgttccaccctcgca

SEQ ID NO: 2752 - DNA, 2204 bp, Toxoplasma gondii
  source 1..2204: mol_type = genomic DNA
cgagcaaagacggcgctcgtcgcatgtttttcctctcgtgagcacggtggaaaaaactccgtgcatgacagatggtcgggaccgaactgaaatccgctgcagttcggcagcagaacgatggtccgtggaagtcgttgatggtaacgaaaaaggaggcgagactggaaaagaagagcgatgaactgtcacttcagagccttttctggacatgtcggatgctctggtccgcatcgataaaagcaaaaatggctccacgcgaatctcactcgaacagccaatacggaaccggcatgcgcagagagacatgcatctggagaaagaatatatgttaaaaaaatgtagatatagagatatttatagcagaaagcactgcctggagcccgagtgtccgtcgcttccgcttgtctgttgagaagagtccgtttcagcagacgttttcggttgcgtgctgtcgagctttcacaatttcgagggatggaggtctgcattgagtcgattagctttacgcgcagtcggcgatcagcgaaacgagacaaaaaaaagggatatgacctcgatacaaagcgtcaaagctcttgccatttccattaacggagctgcaaattagattctctgcgcgcccttgtggagtcataagttgacattctgacgtagccagtgttcagtttaaacgtagcgcaattagctttctatgatgtggtgtgaacgacgttttcgcacatagaaacgactccctcacatgccgcttctctccctcacccggagtgcggaactcactcccctgagaggtcgggcagcagttcaaaggagtgtctgtgtgatgcatggaaaaaacgagcaagggcttcacaaaaggcaacctttcctgaagaagtcgtttaaagaaccccaggaatcgcgaacgcattcgtccttgcttcgtcggaagaacagtcgaaacagtgtctttgttatctgccagctgctacacgtttagccgagactaaaatgggtgctttgtgactcgtgcaatttctacttttccccatcggagaaggtttgtgtgttcagtgctgcattttggggtgccggggtctttgcccggctcgtggcttcgaaaacctactccgcaacggtttgcttgaagaagttgctccttttccaggaatcagcggcttgttcactttcactttgtgttgaaagtagaaaacggaggcgacaaaagtgaacagaaacccaaatttctcctcccgcatttcgcgagagagtcgtttaagagaatggcgcatgctgtcactgggtagcgtagtcggaaccatcgtccttgtggcaagttttaattctccgattgtttcgttcttcttaaaactcttctctattctccacatttagttcatggatcagaatgcgcagatctggagtggctgcaactttgaagagctccaaaagacagtgtacgtcgtgtttgcatgctctgggtgtattttctggaatcggagctgttgtcgggaaaacggctgcaccgtagcaccctgagcaccatcaaatcacctgtattgttgtatcagattcctctgactttgtacagagatccttgattcaatcccttctgtgattgcctttttttactgagcatcgcatgctcacaatgtgctctcctgtcatgtcgcctctgttctttaggtgacatctcagtccttttctgagggctttacaacgttccggttctgtttgtctgacgatttttatatgtttttttgagtcgtgggaagaaccagggggctgctgtcgcctctaaggtgcgctaaaccttctgttcgcgtgtaggtctgttcgcggcggggctggcaaagcaaccccgacggggagaatttctgttaaaagaggcgccgattgttttctctcctgactcctgtgcatgtcacatcttcccaggatccatgctgggcgctttttctgtatttctgtgtcttccctaaattctttctctcgaccccttcacctcccgtcttcgtgtgttgtgtcatatctgcttgggacgaaggggttgtggctgtcgtaggcttctttcgccagtttttttttttgctatttcgaacaaaacagtcgaaagagagaactggcaaagaagccaacgcatgcgatccttgtgcttgcggctggaagttgaagaccaatagcaggaacgctgggtttctcggagggtcgaagtttcctggttgtca

SEQ ID NO: 2753 - DNA, 1504 bp, Toxoplasma gondii
  source 1..1504: mol_type = genomic DNA
ctcttcttcagagctgtcgccctctgaaaacgtggagaagaaaacgcgccgaaacaagggggggacatcttccatctttttgtctgccgtaattcctaacgtaacaaaaccgcagtctcaaagaacagaacctcaggcggcgtacatccactctatccgagccacacacacatatatatctatagctatttacaattgtatttatccctatgtgcgtatctgtgaccatacagcacagaggttgacatataaatacatctgttacatgtatctgagtagagagagagaggatcggaaaacgtctaggagtttccagacagagctgagatatttgggtcgtgtgaggcatcggagaagtctcttccgtcgagggtctctgtgattcagtcctgactgagtggtgtcgagctgctagcctgtcgcttcggcaagaactgacgagatctcgtttcgacgctagtgtggcatctgccattacttggcatgcatgcgtcagtgcaactaaaaagagcagaattctaggattgattcgcctatcaagcttcccgataaaagacaacgagtgcctacagtagctcagctgcgagggtattgcgctgcatgttgtgttgtgatcagtgtcgtttcaaagaagaactcgactcttcagatgctttccgagcgacggggaagggcacgaaaaggcgacaaagacacccgggggtgtctctccggagaaacgaaattccgtaaccattcaggtgaaacaggcatcacaggaattcactttctgtctctctctctgccgttcgatttccctcttgtccattggctctttctcttcgacgcttccaaaggcctgatcgacgttccctcagaaactcaggtgctgtggtcggccaccacgagccttttctatttcctctgtgcagagatatacctgcagaaaaggagaatgaggactcaaacagaaagacagagacgagagaaaggggaagtccgacaacaaacgcctgcagggaagagagataggtgccaatgaggaagagagagaatgaggagagaaagtgagaagagagattgaggcggatagacatcggggaggaaagagattcgggaggagaaagagtgaggagagatgagagcgatagtggaaaaggtcgcgacaaaaaaggagggaaaaagcaagacacggggaaatcccggctggatgcgtgcatcgactcgaaactcgaaaaagactcacacaagcgcaaacggggacccgagagagccgcgggcaatggagagacgagtcggcttatagtcggagaacccatgcaacgccggcaaaaaaaattcgctgtgcgtggcgtggcgaccgcgcactgccgcaagcatgcgcaggagcaagttcacagaggaggaactggggaactggttcgtggatggtagggaccctcgagaaaggtgaagctgtttacttgttttccatgatgcgccgagtcgcccgtccgtagttgtcgtcaaggagcttctgcaaaaa

SEQ ID NO: 2754 - DNA, 2287 bp, Toxoplasma gondii
  source 1..2287: mol_type = genomic DNA
atgtgcagataacagaacacggacagtgtaggcttctgtccagaaaacaagtggcattgtccacggttgctctctcagcttcacggggtatttcgaaccccccactgcctacgcgttgcctttcgcgtggagtgtatattccacgttgttaaagtgatcggttctaggggggaagcgtggtgtgccgggatacgcttttgaagtgctgtctaaatgttaggccatcttgaggcaagataagcaaggtcacataatgaatctaaagatgcatgcactgattttacaaatgtaatgtgtggaacccatgagtcaaagcataattcgccgtgcttcaactgtgatctgtcgagccgaagttataagaatgcgtcgcgggtgctgatgatgcctcccaacacgtttatcaactgtactagagcaagcatgcccagataaaaacgcgttggatgcgtgccccgaggggtatctaataaattgatttagtccgccggaggagagattccgtctcgacagcagcttcacacattggtagcagcgatgggtgtcatttcagtgccccaacacagcagcttttggctcacatgaatggaaaaagggtgtaaggccatactgtttcacgactgcacacttttgtgtgcgaagttgaagcaattttgttggctaaaatgttctcgaaaattcataatatcggatttttgctgtcggaagtcgtatcacggtgacagggctctcgatgtcagtcttctgcaacttgcgtggcatttgtgagagcaagaggtggaacgaaaaccgacacatgttcgggaacggaactgacaaaactcaagacccagtaagctgggagcggggctactcattgtgggggtcaggcttggctcctggttgtacttctctatttcctgcttgtgttgtaacacagtgcgctaagctaactcgcgcccggtatttctgtgtcagtattgtgtcacgaaaatcactgacggaagggcggtctgaattcgtggaccccagttctctgtaactgaacattcccatccggtatccttttgaatcgtggctgctggcaagacgcggagtgtttatggagaagaatgctaaggaggacggcctcgaggaatcacgctcatttccatgttccagccacaagtataagggaatctacagtgtagtagtcgaaaccagtttgggtcaggcctctgtcaaatgcgacggacagcacgcgtacggccatgttttgccgcagggctttagatgcattgtccagagtaaaaaacacagaagttgcaaaggcagctgaatagggcccgtgcgcaccgtttcataagccttgcaaatgaggtacattactggaatgttcttcattctgttctgggcccacgaatcacaacgctaatccattgctaaaaatgttacgcgttgtacagaaggatgtctcttgcgatgccacgattcctccgagtcgtaccttgtgtctgtgctccaaagcactagttctgcatgtacgggactccctcggaggttagtccatcatacgataggcaatgcacgtgccggtttcgggattgatttgcatatgggtttgcttaccgctcggcgacgggttggatgaaggcgccggtacatccagggtcttccgccttcctcatccagacacggtgaattttctacgcagccgtgtcctactgatgaacgcgtaccgtgtggctaaagtattgagcttcgattagcctcgagagaaagcgatcccagaccttgtccaatttgtctccgaagattgcggttgtcaaactgcggcgccatatcttattgccgcttagaaaagatgtccgcttttgtacggtatgccttatcagaagctacttcccccgctatctggcgtccttatttaacgactcctcccttggtaatgcattgatgtaaattatggtacaagcactccgctatttttgagagacactcaggagcccaaaaaaccatcttcgattgtgtctctcttaaaggtcacgtctgggttctccggcaatgtctgacgccgggggggtacaactccccgtctcccaccacccctctttgctcgtctgattgttgcggggtctactgcacacgcttttgacaaagtacgggcgcggcactagctgcaggcgccctttgacagtgacttccttctttcttgttttttgccgctgcacgcaactctcccccactcgcgtcgcttgggaaaacgttctttctctccatttcgcgcgacatacccgtgaaaaccaaaattttcccatcttctgcaaaa

SEQ ID NO: 2755 - DNA, 4626 bp, Toxoplasma gondii
  source 1..4626: mol_type = genomic DNA
atcaaacccatatgcatgtagcgaggttccaaacgatggaaacaaacacctccaagaacagaaacgcaaacatatccaacggtgtagtagacttcctcccgggtttccccttgtacaaaaatttgggtgcagtttgcccagttgaatgtctagcattcagaacggtctctctatctgtttccccccccccgcccgtcaacatccactgtgaaccgtgaaaaacccaaaaatgtactgcttctcgaggaaagaagcgtttggcggcttggcaagaagatctgccagaaacgtagggacgaagcgattgcaggtcgcgaactggaactcagcgggagcgatgtgcgacacggaaacgcaccagttcaccttttctcaatttcagcaatgtgggaagaacgcctttctgtgtcctctgtgctttccgtttgtcgcctgccgcctcacctttaagagcctgggggagtcgacgctgccgcgcaagtcggccaaccgcatttcggcgaagccgccatcctgaaactcgacgacgcaagttgcatctgcgttgctctgcagcgctttttcgccgttcccgtcctttgcgtggatttctgctagacgggcgacagtccacagtttcgttgggtggccaacccaaaaccaggaacctagcaagtcggtacgtcctgcggagtcatcgatggaagagacaccgcggcagtcctgatggatgtttaactcttgcgcgggaaggagaacacatgcctcagatgtctcagaaagggaacaagaggaagccgtttccttcgcagcagaagccaagggggtgccgctgcccgccgccagctccatcgttgcagcacacgccggctagcccgagagtggactccgagccggagttggcggaagaatgtcccgaaaagcaggagttcccccgagaaagcaggggttctacgaggtcaaacgggcgagagatgtgccttgctctgtggagggtcttccggcacacgccaagagcgcaccgagagacagagcagcaaagtcgcgagcagcgaccgatttgtacgttgacggggctgggggcgtcagggtggctctcgatctgcgtaaagagagaatcggaatctcccaaaacaggacagaggaaacagtctgtccagcgtggcaccgcgcgtgtccttccagaacagttccgtgaggaaccaaacacacagcgcgagttgtttgtcaactcacagtgtgagtccgggacggctccagctaatctcggatcgagaaggaagggacgtgcacgtggacggacgaaaccaaaaaacggcaaccgtggaacttgaggaaagagaagatgtttccgcgggtaaaggagacgaaaagcctctctcaaaattccccaacaaatctcctctactctcgggaggcgcttgcgccctctcaactccagcgcactgccgcaattcccggctagccggcaggtgagtgtatattcgcgggtgtagcccgccgcccgaacagagggaaaatgcggaaatacccggcgaaaggaattcacttcttgaagaaggaaatcacaaattgaacggataagaggaatcaaatttgacagccttcccagatccccgttccccacgagctgctctcagacgacgcaagcatgcgctgcacaccggacaagacaaacggcagcgggcgatcctaccaggtctgccggaaaacggtagaaaaacacttcagcctcgatttcgctgccgcggcataaacactgaaaatatcagtaaccaatgaatagtgcaagtctgtagtcttcgcttgggaacgagacaaactgcaccaaggacggggctttgatcgcgttgtcaatgcggtcaacggtccgagcgacttctcagccttgcctcgacctcggaaaaatgaagtcggggacacctgaggaatttaagcgccaatcttctggttaccgtggttatggatttctgtggcctcatggaaatggagaggcggcccgattctcttgctgaagggagtagcgcacgcagaagtcgttcctgtgtgacgggctttaccggccagagttacgttcatcgtgcatcagtggcgtatactaggatgtgaagacctgtcaaccgcgcgtggcatgctgccgccagaagtacacgtgtgcaaatgggctttatggctacttcacccggtaaataattcgtggacaaaagtagaaggcgacagccgcacacccgaacgcagtggatgatggcgaagccacgcatttcgatgtcggaagaagttcaggtgggcatgaatccgtggcaccggcgactgagaactaggggctcaacgctagcaaatgcacaaaatgattctaaagtatatctaaacgatatagcgatactcgttatggcttggaggacaacggtcactgcaactaaaacaccaaagttggaagatgaatccacaccgataaaatacacagtgttcctggaatatagttacaaatatactgtgttctcgaaacagaatctcaagattgcaatgacaataccatggttgaaatgaataccattaagtaagtgtaaatataccatcaacaagtccatcatcgttaactgcggaagagagacgtaattttgccgtacgaactaacataggaaagaagaaaggccgcttacacggggcaattttgagaattgcaaacaaagcattaaacatgcttggccagcgctgggagagtctcgacgcatccttctgcaggcagcgggaagcgtgaccatagtaggtgcgcgtttgatttccgcgagctcgtacgtgttacagagaagttcgaatgtgtcgttttctctaaaaaggatgagatgatgtcaggcttgcagacggcaccccgaagaatacggaagcgacccctctagagacggtcagtcaccgaattcaaggcgtttcgcgtgacttgagagatggccagatgctccgggtagcaatctgccttgcacacatctcagcacgtggtgtagattgccttagaagtcaaagtatctttttctgaagggttatgtccgtacaagatgccggagagtgaaacaggtcctgactggagcaaagaccgccggactcgcactgaatggcatgcgcacgtgatgccgtcgggccagaaatcaggtgtcgatttcaagtctcgataactttgcacagtgactttgctgaagtgttgtttctcgctcaagaacgtgtgttaaacagtgtcacgacctgcattagagagtcagttacatgagccctctgcgacacaacagaggcacctagctcggggcaacactgcacgcagaacacaatttcgactcgcgaaaataagtgcttgtgtgtgatgtaactggcgtgatgtaccatcacgagaacttgtagctggtaatgctcatattcgatccatattacggaatgccgctagtcaacacagagggtcatgaaagttcccaccccgtcgtgaccaacttcagtgagagttgatgatgatctgctctatgccgcttcatgagcgtcaaccgccctggatctatctcagtggaacagagtgtcgtttaagatgataattattgcagaaaaagaaccagttaaaacaccatgtgttagtataacacagacaatgacgttaatatgggatccttcttagcataaagctgtgttgttagatgctgcgtacacattattgtatctggcatgtcctagtccgcagcgactttcaattccgttttccctgtatcccctagccacgcgcgcagacacgtcgaacgttggtgaaagcacagcttgaaaccgggtaatttttgtcagctgtctacttaaggctttatgtcacctttttttaaagctgaggaaaacagcaccgtaaatgcagaagtcgaaaacgtcagatggggcatccggggtcgcttaggtaggaaagcgatctcgactctgggactggcgaaactgccaccgaacggagctcacagaaaactggaattatcctgcgcacgcgttagctttaggagttctttttcacgggagaccgtatgcaccggacaagacaaagttgtttccttaaatctcagacagcactgagcgccgcaagagaacaaagctcaccaacgatgacgtgacgtgcctgagtgcacgaccaagtacatacggaactcaatgagtaaacgagctgagcaagaagcggacgaatttgagaatgggttttccgcacgtgttcactgtcaacagctccatggaaatgactctgcatcccgggaattcccttagctaagcatgggagaggccaactttccctctcatccagcaaaagatgtgaaaaatctctgaattgtctctcggggggttggtcatatccggagccttgtgctcgcgcgactaaggagtgactctacctcttcctgagagtacctctgacaaaaatcattcattttttgtatctctccgcccattttcccccgagaaaccctttctgaattcctgtcatcctttcgttgtgccgcttgctggtgagtaccgcggcttactcgcatgtgcagcacacatgcagagcagttggctttttcacaggctccgactcagcgtcaacgaagtcacgctgggaaaaacgcttttccaccacgttcgcgtcgtccctttgaagtctga

SEQ ID NO: 2756 - DNA, 2216 bp, Toxoplasma gondii
  source 1..2216: mol_type = genomic DNA
gagtagatccggtgttttgggtttgaaaacagcgaacgagagtttttcttatcgtttttttaaaacgctctcgcctgtcgtcagcgacgccgttggtacgcttttttttgagtcgattgtgtcttcggagtggaaagcaaggggaagcaagagggaaacgcgtcgccatcccccccccgtcaccgagacagactgccagccagtgcaccctttccgtgaaggtttttctgcctcttcagacggtccttctgtacgatcaaatgaagcgttctcgtccacacagtcacacggcttccgtgaactcatgtatctttttgaggaactcgacaaccggagtgctccacatcgcgaaagggccgcggatgtgttgagtcacaatgaagttaagaagagtgccagttcctctccgtatcgcgggttttcatcccgttggactgtttcgtcgaatggagtaaaacagtgccacaaggagtcttgtgttgcgtgaatgctgcagtggttgaaggtttctcgaaaaaggcttcgacgcaatccagtcccgctagcactgcggtcccgcctttctctcggaaagcatgcgggagcggagaaacgcagaattctacttcgtttgcgagttcactcttcaattcagtctgcagagagtttcgccgctcctcctgcgctccacggtgtgtctcggtgtttgccactgccgactcgcaacgcagcgttcgagacagtgcgcggttgaaggcagtttctcggttcctttcttttggctcgtttcaacgagagagacagggagttccacaccgagcgagagaggagcgctgacaaatggaaaaaacctctttccgcgggagagctatggaagtcgagaaagtccactgctctacggaacttgtctctcagctagccctctcgctgtgcgagactcgccgtggtcgagcgtcctgcacagaggagagacgcggcgctcttgcagcgagaaacgtacgaagttcgccaggccgcggaaaaaaacgtttggagagccgcgaagcgtttttccaattagaaaaagtgcgttttgtgcctggcgcccctgttgagcctgaagacgaaatcgtgtgaggaggaggcggtgccggaagaatagcaaaatctgcgggggaaaaagagaaaaaccactgaagggaaaagagaaacactgctgagaaaggggaaaggcatttctcaaatgtgcaaagggtgccgtcacaagtctcaacaacgagtccttttttgcatgcaccgccaaccaggcactttttcctctcgggtcttgtcgcttgttcagctctagcgttctttcgagttgaagaagactgaagcttctgtcgagactttgttttctgcatgcgtggaggagaagaaagacctgagagaaaaatccagaggcgggcaaagagcgagaacgggaggccacagctggtacctcccatgtctccaagaaggtgtgtgccgtttcagcggttgtgcgcccagagagggagatttgttcttccttttcgtctctcagatgccttcttcagacctcacctgttcacttcgctgtctcctccccttttcctctctttttccctctctcttctttgcctctctcttttttctccattgttgtctcttcttctgtcgcctctttctcgcgttcctccgctgtgtgtcgcgcgagccgctgccttttaccgcgctcttccccctcgggggctgcgttttctttctcgccaggcgcctgcatcgtcgccgggctttctctctcgctttggaactccttcgtttcctctctctggacttctttgtctccgcgctgcggctgctctccgccttcgttttcctccgccgttgtggaggcagtcgcgagaagagactctgctctcggatttcggaactgagtagagaaaggcagcaacaaacagctgagaaggacgaacggcgagacagcgcgcactgcctgccgctcgcgacaagtcagattaggaaagaacgggaaccgctgcgtcacgctgtctacgagcaaacggtcaacactctgacggacgaaaacaagacaaaagagcgaaaagatagagcagaaagaaagggagaaaggcgcgcagcagatccaccacacagcagcggagcactttgggccaggcgctgccggtagaaatgcagtcttgtgcttgaccgagaagaggaagcgaggaagcagagaaggagcagaaagacgaaga

SEQ ID NO: 2757 - DNA, 1747 bp, Toxoplasma gondii
  source 1..1747: mol_type = genomic DNA
aaccatacacgcggagatactgagagtggaagactcaacagaagaagtctggcgaagtggacgaaggccggcggtcagactgggaggaacgaagcgagggagaagacagacgatagcatcgaaaggcaggcaaggggagagtcgaaaactgaaggggaaatggagacgaaacacacagaggcatgaaaagagaagcagacaaaaaactgcatagaagaaaagagacaaagcgtcgaagaaacgaagagaagcaaatggacggaagcggacgacaacagaaagacccgattggactcgagcgagaggtgaagggaagagttgttctagagagtcagaagtaaacgatggtcgaatagactgctggacgggcagaactgtgtgtttcagagaatcatccgtggagagcaacgcagttgcaggaggacgtcctgctctctgccgaaacaattggcgaagacgaaaaagtcggagaaaagcgaggcagacgaaagagagcacacgagaatggctgcgaaggaagagagagaggacagggtcaagaggaagaggagagaaaaggagcgctcgttttcgagacttttgctgtcctggacagaaaagccttcgtgtggagtcgaagtccactgcaggcggctcaatcgaagacggacctctttcgccgagacaagttccctttgtaatttttgtggaggagaaataaacacaaaccaaagtagacgttggagaatgagttttattaaacaacgaaggcgaactcgagaaatcccgggagaaagttggcagcagaagaaaaggcctgcgatttgacgaggtctcctcttcacacggcacgaggacctggagtggcgaggcagcgagctcgagttttacaaagttcacggccgagaagcaaatttcgaggcgaaaaagaaaagcgtacggaacgccgcacacaccggctggtctgtgaagaaccaagccgagcttgctaaaacagcttcgcgcgcaaagagagcgagaagacatgaaatcctttgttccttggaggcctcgcggagacctacaccggatacacacgtttcttgttcgagagaagccgccgtctgctgcttcagagtggcaaaacaggcaagcaaagatgtgctctgtttccttgtcttgcagcgaaaacctcggagaaaagacagctggcggcgagatgcacaactactctaaacgctaaaaagcgtcgaaggactggcactgcatgcacgtcgcttcactccacacgggaggctttttgataaggaatttctcccttttgctctttctgaaaggcgaaaggcaagcgaggccaagtcgctgtcaacaggcgaagtaaacgctggggcgtccttgtcgaaaacgcaatttccccgagagaggaacgcacatctggcgcagagtcgcgcgcaagtctctcagccccgcgtcgtcaacgggactcccaaagtccctcttcgccaagcgagcatttcatggcgttttttaaagcgtcaggaccgcgtagatacaagactcgacgccggacaggtctatgctggaaaacgcgaaaatgaaagaacttctgcggtaaaaacggccttcctttccttcttgcaggcaggcttgcctctggaaactcgcgacggtgactcgcaacgccccggtctccaggaaaaatgcagcgctcgagaaacgcccagaattcctctccagatcaaacttgcttctgcgaagtcacgaaaaaatcgtaaagccttcctcgcca

SEQ ID NO: 2758 - DNA, 3895 bp, Toxoplasma gondii
  source 1..3895: mol_type = genomic DNA
tctcctgctttgcgctcttcaccctgggtgtcgccagcttgtctcccgtcccctgcagactcagctgcgtctgcgcctcctggagcagccggctcaggcaattcctttggaggaggcacgatgtggaccagcccggctgaaaaccggaattcagcatcctcgagctcttctgcacgctccccgctctgtttacgtccgactcgtctcctcatggcgcagcattcctccttgtccctcactcctgagttcgacgaaggcgccccacacgctgccctccaagctccacaacgagacgtttctgcgcaagaagcatcgccgctagtagggcgactccccactgccgcagcagacgcagagacacaagaagaagaaggagagacaggagaaggagagacagaaggcgaggaaggcataagccgaggggcttccgtaaggtgtgcagccgccgtcagggaacggccttggttcgtgggttgtctttctccagttgcacgatctgagttggacttttgttgcgtttcaaacgcgtggcggtcacctgccttctccggtttgctgtgccgggccttctctcgaaatgtctgcgcgaaagagtccacagggtctttctgagtctccattgtcttcgcgggggttcggaaatcgttcctcggatgagagagacttcttttcactgcccacagttctcagcggccaccatgttgaacaacgggagagtccacccacggacaggctctggagaagtctggaaaccgcggcgtgtgcctaggcgtctgaggcgttagcaaaaggagacaggggcttcgccgaagtcctgtctcttgtgttccaattcatgaggcgctctcccttctaaggcacttccacaccctggcgtttccccgttctcttctcggccttcggtgtcgagcgacagccactccctcgaaaaatatgtctgtgtgttgtcgcgacgtgcagggatcttttccgtctacgcggcatcatcatcactgcaccttctcgccctcctcttcctgacgtctcccatgtctctctctttccttccggtgtcgctcccgtctccttctttgtttcgtatcccttgccaagtgtctccaatgccccgactaactaaaggattctcattttctcgcagctgcgtcgtactgggacttgcgtttcaggcgtctctgggcgttctcttgcgtcgtatcgctcccgccggcggtttctgcgtcctaccgcagttgcttgccaaagcttcttctctcttttggagcgcctgctctggtggctgcttcatatcgagggtcgcatgcgaatgaagggagagaacgctgttcacaactccgagaggaaattcgcgcgcaggaacggccacaggcagattcgctgctccgaagaagtcgcggacgcgagggaagtgaaagagaagagcagagagaagggagacactgagacggaaccaggtgcagtcgactcaagaatcgaggggaaaacaaacgctggaagtgacacaagaggaaaggagacaacggagtcacgcgaacggttggggcttccgcgctggagaaggcagccgacacctctgtggcaatggcctttgtgtgccgcgatgactccgaaccagcaacagagagggagaaaacggaaaatggggaggcgagacgcgagaagaaagaaaaagaaaagaattcatggaggagacgacgctaaaaaagcttcaaggccagaactcaacggggcccactggacgcaccccggcgcgcaaaagtgaatagggcagaaaaaaggagctgagcaaagatctctccaaagtttccccttacgcagatttcctctgtggtcatatggcatttgggagaggaagaaatcaaaaaattaacgagcccaagtcagaagaaggaactaaaaaaactaaaaacgacacaaattcacccgaactgtgagcacttgtaacggctgtccgtgctgctgctgtggccgggcacacgtttttctgtgggggtcacttttctctcttttcgagaaaaagaagagatcctgtcgctgtggcgctcttccgcgtcctgagagagagccttcaatctacacacatggccctttttgcctcaaacaagacacaaaaggaacagtcactctctcccctcgaggcctctacgcagaggccgccggtcctgccatggtcaccgcggctctctctgtgcgtttcctaagctctcgactgtcacggcgtttgaattaaagtcttcatgcactatcattctcatgcatctgctggcagttccatgctgtctgtttcaacttgtgctcggtcgcactgtgtcgagctgtctcgcgtgcgatgggctcctctgctccttccagcttcgacctgtttgcttcttctcctccttcccttcactgtggagaactctcaatccgctcaagtcgtttagctctcttggccactgtctgggttcctatccagcctaccccgccaaaccatcgctttcctcgctacctggaacgcttgggtccttgggctctgttccacttaagcgtaccaccgactgttccagctattgaggtatatacaccgcatctaacgcaaagacgttatgccgagaagagatcccgcacttgcacccctgaacaactttgttatataaaatacacggtgttcggttgttttttcttccacgataatgatcaccgtagctacactcggggctcaggcaacatcatcggcgtgctcaaaaaaaagactcacagactgaaccgtacattacgtgacctgcgttcttacatgcacatatacatgtgtatatattcatagtatgtgacgatctttgtacacatatatgtgtgagcatgtatatatatacatatatatatgggtattgtggaggcctatagagctaaatttttgaggcatgtgcggggatggatctctacatctgcaaggagaagcagccttgcactggacagtgtttctcaaactgtttttccaacaaagtgtggtgtatctcagctccatctaagtgggaagataaaaggcgagacgagccgcgtttgtgtgtatatgtgtaggtgtctcgtggcgcgtttgtgtcgcgacagaggcgcggcagttgtttgagcgcgtatcttcgcagacgaaagggaaacgcctcaacgaaaatgtaaggaagtctttttctgcgtccttatactcttcgccgtcacctctgtcgttttggttctcaaaagcgaatcgcggaaaagaaaacgaagagcgcccaatggcagggctgcactgcggctctcatcagttcagatgctctgcttgcggagcgtttttgcccgctcgagtagaaggtttcttcccggtttttttgcacttgttccgagtcaaactcttgaaaaaagtgttgaaccactcgggatagaggcggacagtcggcgttgtcttcgtcaagcgcaggcttcgaggcgggtgccctttttgtggggctttgacctctcgccctggtagccgcagcctacctgagagtgcatgcacaaaaacacactccgcgaagagacacagcgagatgggagcatgcgcgatcgagtcgctgaagtgaaagagaccaagtggattcatcttcatctagcgtcgatgcgaaattgtctttcttctacgtcttttcctacttcgtcttttgagagttctccttttcggcgcccagccgggccgcgcgcatgcatgttgcgagaaggcgaggcgcgacccttccaggggagttgactttttctgtttgaatcgaggcttctgcctccttcttggtctgcttcctggacctttctcttttgagactcacaggcctcaggagcgacaactttccggtcgaacagcgctgtgcagaccgccactaacgaacttcgcttcattgaaagtcaggagccaaca

SEQ ID NO: 2759 - DNA, 1879 bp, Toxoplasma gondii
  source 1..1879: mol_type = genomic DNA
cgttttggcgacttcaacaggcacaaccgatgagtttgcttcttcagcttttcggaagccggaacgccctagctgcagactcgttggcggctcccatgcatgcgttcgacctgctgtatgagaagttcgcgcatactcagcgggcagcttttgcaagacgccgggcggccgacaagactctggcggaggtggcggaccgccacgggagtgttgaaaccctgctcgatgcgttcagtgtatgtgcccgagcagtgaaactcgaaaacgattgcagtggatgcctagtggtagatatgcattatagtgttccggccggaggaaaagcctcccagtctggaggggggaagtcgccgagtgaaaacgacttcgctgcaggatacggtggtggaagttctggcggaagcgatgccacaaaagatgggctgctgaaagaaaacgcggagaccgctttactccgaggacttcctctaaggattggggcacacttacctgaaacaacagcccgctttgtaggcgagctgattttaggtggtgtggccttgctgcagcatgggcctgaaggagcctacgaaccaccacctcttggctgttctctagatgccgttcagaagcagtttgtcaccgagcggatgattcagcaggaaaaacttcagacgagaaggaagctggaaaaaatgggagaggggagtttgaaagtgctggacttgagacgtacagtggaggaagccggcttaatggttaatttagaagcgccgatgccacgggctagtccgtcagtacagtccgaccctggtgaagccaaggtcgaatgcaagggagatgctgcagagccaaaacggtcccctcgaagaagtgtacggtctgggggaccagatgtccgggatggttacgatgttgacgctttttgtccggtggaaggtctttctgattcagaagatagtgacaagtggatggaggatgacgtgaacatgtttgagattatgtcagccaacacgatgttacgctgcaccgagcagcttcgccaaacgtttatagccgaaggaagaatgcttgagaagatggcgagttcaaaatggaaaggagggaggagggtaaggggggtcaagaaaaagacaacagcttttccagacgatgcaaaaattgcaaaggtagcatcgactcttgggaacttccggaagggtataaagtgacgtttgccgagaaggatggaggggcaatggcccagactgtcacagttgggggaaacaagccggaaacgaaggtgcttaacttggggcaagatacatttgacgagtctatctgtggatttcacagtgtcgtaccctcgtgggaaaaggttttagaacccgttttcgctgtgtttctttggatggaattttccttgcatggttaagatgtatttatccacagcaagcgaatgcgtggcaaagcaggctggcaacggaaaccgatgcttacagtatgaatgaggtataagacggcattcattctggaagaaacgaggctgcagcttccctcgcactcagtgcttccaggtaatccgaacggcacgcaatcgcacaagtgcaccacataaagcacgcaccgatgcacgatgtcggtatccgtttgcatttgcagccccacgtgtctctgaatgctccgttagcggggccatgacgagcctccttagtactttacggtacacagaagtcaaacgtatagttgaacgcggagccgaatgggtaccaagtggttacgaggcactgaagagctgcgacaagttaccggtgattgtgaggagaacacgaatttatacctcttcagacggcacccacctccccgaaagcgctacgtatcggttttttgctgaaatcgagacctgtctacagtgacaaga

SEQ ID NO: 2760 - DNA, 4741 bp, Toxoplasma gondii
  source 1..4741: mol_type = genomic DNA
gtgggaggcatccacaaaaaccacacgcaaaggtgtgtgtgttttctgctgttttgcgaacactgtccagaacgcgttttcagtggggatccgtactgttatgtctgtggggctgggcaaaacgcaggtgcaaggaacccagtttgtggagttgtagagcgaactgcgaactcccagagggtgccctgtgccgacgaggacgaccagtccacaacggctctattttagaaacctcgagtgtttgttggaaaacactgattgaggtttggtgtcaaaagtgtgcctgcgttcgaaactatacagcgtgcgaggaggaaacgacactatcgccaagaatgagacaggcatgtggcagtgcacgtagtttaaaggttggagagtgcaagttgcgtaactcattcccttgcaaggtattcgaactgcacccaaagcgtacatcgcgattgctgttttgtacgtatggcgtttgtcacaccacgagcgcgaagggaagtaccactcatcgaaacgctgttctaagatataattggctgtagcgatggcaagcatacagcacgtctgtcatgcacgtacagacattccagctgagtggcagcaacaggatctgcagagtgtcaaacgcgcgagttgtagttcaatgaacggcacatccagacggcaagcatcgaacgacacgggtgttggatttccgtagagtttccttcatccgagtggaagactgtatctgaagctatagttaattctacctcctggacgcctggattagctttatgcgtggttaagaaagtcactgccttcctatcgtttcccgacggcagcggcactgtgcggaccctatcgagaaaagggtgctgtgtcagttaaactcattgctcacgtatgcacgactgccgtgacgtttgttgaaagagaatctcaacactaactgtgctgcgtcgtttgtgcccatgcctgctaactgcggaaaagggccgaacgcattcacacgtgcttcgcgcacaacctacattcgtccgccgaatattcagagcaaacgtggtggcggtgaaaaaaggtcttttcgggaagtttcatcggagcaaagtccgctgtcagtgtggaacgacggttcccgtaaccctggcatctcaagcgtaagtctgagagttcttcaatccagtgaacttgatagcttcgtgcgataccagcgtcttgttagaagcaacgtgacgagtgcacgcgtaccaagagggagtgtcgcgtctcgcagtgtgcaccattgcttcgtgtagtacccgagcagcgaaacacctctcgacctttttgggtggtttttgtgttttttctgttatttcgcaagactaagcgatgcaacatcacttgcgcacatgcaatgtcataaaacatcgtcccgcccgtgaatccttcgttgagcgaaacgccatttgtggtgcatctttcccggttaaaccgttacgctgtagtatgtctggagagctttcagtcgtcgctccgacttagttcgctcgcggcccgaaaccaaccgacaggtccatcatttgaaaacgtctcgctgtcttctgctgactgttttgggtccactgcggtgtaatgaccgataccgtcactgctacggcgattgtcgccctctgcgtggcaggatagtcatataagcatcagcggctaggtgtgatccgttagacgtcccgcgacctctgtgactgtgttcattacgtgaatggtcacatttggtacaagcatggatccggttcaccagcagaatagccccgccaccgacggggttccggttaacgtcccggcactggggggtttagacggtgatggtgcaaaaccaggatctagtgccggagaggtagatggtgtcctgtgtacggggtggtttggagggacgttgttcattttatttgccttgctccttattggcttgtggttcaggagatctaaagcgtcaactgacgggggtgtggaagtgctgacagacaaaagagaataagcagagacaaggacgtcaaactatgaagtcggaagtacttctctgcctctgttgaacgtgcatgcgtgtttacaattcatcccccccaaatatgttgcgggtgccagtgcgatgcgggaataaatgtctcgtgacaggtgattgcccgtggacaaatggttttgacaagcattgaagccatttcttttggtggtgtggacatgggagtctatcaccgtgttggctgcatggtctctaaatctcggtatgggtgtggtgaatcagttgtgggtaatgtcacttgggtttcttgttgattgcttgaggcacagtcagtccgtagtttgcgcgatcaatggcgagctgtggcacgaaaaatgcaagctgattattgccgtcgtctcgaatcaggtttccatttacggaacagagctggcagcaagttattctagcgcccgtcttcgatacgggcgtaatcttcgcagaccataccgggaatgaggttagcaacaatagtgggaatctgatgaaagtacagggcgacttcggcttgacacgcgtatctacgttgagaccatgcaaaggatgcgttacgagatgctgagagttcattttcgtttatttgggaactttcccctatcaattttcgacttcacgcagtgattacgtcagatgcatgtccgctcagtaatgctcatgggtgtgtgagctcaagggtaacagtttggcctcaggtaaaataacgacggctttttgaacacgaataaagcgtttttggcaatgaagttctattcgtttgcgttgaaggtggggaacaggtagtggggatgagtttattcgttctgcatggtaaaagcctgtcggtcgtatcaccagcctgacatcccttcttccgaaaaattctgaggtaacttttgcacattcagggcccttgccaaaataagatgctgacacatccaactgcagtcacatagtccatttatcggcccacgaccagagatccaagccagacgattagagaggaccttagacgtatcacagcatgacgatgttgttcgtttcgtgctggtgcgtgacctcaccgtcagccaaaatgacctccttctttgctgccgattccggcgttttgtctacctctgcaaggtctgacagctgaaaagagaatggttattgtatttgaagaaaggggaaatctcgaaatagccgtgcctcgtttagcgcttcaacaatgcctctttccgcgtcaatctgttgctggtgccgaggccgtacccgatcagtttgttgaaactatcgtgaaatcctcgtaaatctgtaatagtgtggtgcggcacgtagaacattaccacaggcacattcgacagcgatgtgggtggaacgtcgtttcgtggcttggtttcctgaaaacgctgaataagaggcatgtgcgattttgcctgcttcccctcagcgctagtgctgtttatagctcacagcagcctctctaccgggtagaaaactgtcagaactgtacatcagcgctcttggtccaggcttggcagtattcatgtactgcttctcgacgttatacacctgactatttgctgtcgaaactgtcttagcatgctgcgtaggcgtgggagaatcgaacctgcttcctgatttcatgccgaaggtcaccgatgatgctttgtaggtcacgtttcgcaatcttcatgtgcttgctgggcatcagtttcacggctgaaaggcattcatcgtgaaagcacatccgcataaaacatgccgcctatcgcgaaaattaccaactttgggcggcgcagttgcttgctgtggctgaccgatgttggccccaaggaggccacccgcgagaccgccgacgattccgcccgcaatcccgccagtggccagcccttgagccgctcctgtcagcgctcctgcaacattcgcagcaaacggactgatgaattcgctttctcccttggtctcttctgcaagaacaccacgggatgaaagacacaagacaaataacgccgtcgctgccgtgaccgtccccatgtttgctacgtctaagatacagtgttttctgtggcgcctcgacgcgagttaccgttcatgccggtaaattttggattgcgaagttcgagtagagtcgcgcgacagtattctggtgtatcgacaccttagctgaaatctcgaactatcaacgcagaacgcagcatggatatacttcatcttctgtggcagctgtagatgttttttcctgtaggtttgcccccttttatcaacacccgtacaacaatagtcataatcctggtacatgcactatggaccgggtgggggttgatgtcagtatgcgagcattgaccagcacgggaagtagccgacagttccgaagatgtacgactgcgtcacaggcgacctcatcactgtccatgctctgtgagagccattctctctctacatgttttcaggaagcttcttccggtttcgcaaacttggccgaacttcatttatttcggtcattacgaacattaggagtgcatctgatttggattgtgctggcttcgaagtgaagggtgaatctcctgagtgaacttgggcaaagccaatgtcatgactccactattgaaacggattgccttagatagattcagcgctttacagcaacgacttctgcgtaaaaggctagacctgtgaagcaggcaccctccccctcatgccatcctgccaccgtggcctactgtcacacggtcgcctctttggttgacgccgttttcgttacaagga

SEQ ID NO: 2761 - DNA, 1229 bp, Toxoplasma gondii
  source 1..1229: mol_type = genomic DNA
tctgctctttgttcttcctgtgtaccgacgatgtcaagaccttttctgcgttgcgcctgccgagttctctgcaggtcgcgcatgctctttagcacgagtttcatctcctctgcttcttcatcttcttcgtctgcctgctctcctccactccctgcaggcgaacctttcgcctcctgagcacccgcctctgtctctgcagaagactcgacggcggaggccgatgtctgtcgcgaagcagacgcttctgcagcgttcgcgtacatcgtactctcctctgcatgaacggcttttaaacgcgcgagagaggcatcgaagccccggcgccggaatcccaggaacccagcggaatacgggagagaagatgaagacgaaggcggagaagaagagggcaaggaagattctgacgaagaaaaaggcttcgtgacggcgtcggaggaagaagaacggtcgtgtggatcttcgggagattcgcttctcagccgttgtcgatgaccttcatctttttgtggcggagaacgcgaagacggctcgcgacgggagtcctctggagttctctcctgctcgggtgaagaagcagagcgcgtcctcgctcgcggtttgcggtgtctctcggaagaccgtgatgcggagcgtgagtgactgccttcccttctgcgtcggttcttctctgatttgatccttttagttctggaaggcgaggagaacgttcttcgtccctcacgttcctctccggaagaaggcgatagctcctctcggctgcggcgccggtccgcctcaatccttctatcgcgctcccttcctcgccccatcgttgcggttcgcctgtggcaaacgcaaatttcgcaccgcaccagccaagccgagactccttctgaaacctatgcaaactcctaaaacgggtccgcctccacgctcccttcaggcggcgcgtctccgccccctcgaccgtcagcaaagatgttcagaggaggaggaagaaagtggagagaggcgctttttttcgatgcagatattgtgaacctccggaaccgccgaacgcctcgtcagacgccgacgcgttgtgagaaaaaccggacgcggttcgagcgcaacctcagacgcctgagaagaagaaacgctcaagaacaagaaggtgaaagaaacaagttttagcttcgaggtcgacacagaaaaggcctttgtcctcaacgatttttccgcatgtcaaaatgcatgcgcactgcggtgta

SEQ ID NO: 2762 - DNA, 2323 bp, Toxoplasma gondii
  source 1..2323: mol_type = genomic DNA
ctctgagtccctgtctgctgcaagagaagagagatgtttgaagagcgaggcgaggaggtagggggctcctttgctctcgaagacggacgcttttctctctctctcgggtgttaaactctgccaggcgaaacgaagaagagtgtctccagcggatcacgatattcgcatgaggtctgagttttcaacagcgttcgtttccagtatttgttacacgacctaagcgtgtttccagatcgaaacctcactatgttgcgagaccacctaagagaaaaacgaagaaagaaccggtctcttcagctgtcgaacgcagacttcaacttgcgtaatgcaaaaggactcccgagtctacagaggcgagacgctgaggactttgctgcaaagaactttgagaagaagacaagacggtgagacagacgcgccagcctcgagtcgcgcagcagagcagccttataagcaagaggaggaaagggaagaaagagaggagaagggagacgtaatgaagaggagcacgcatgcgacagagaaaggtagcgaacaacaagagcagacagagagaggatcaaagaaaacgagcaaatggcggagcaaggagagagacaaagagaaagaagtaggtagagtagagagtgcgagaggggggagaagaagactgatgaaagcgagatggcagagttggagggtctgagcgtatcccagagagtgtcgaggaacaaatggatattcctattggaaaacgaaacgctcgagtcacgcgccacagagagaccgtttggagggactcactccggtccaccaggtctccctgtggctagaggagacgcggactcttcctctcacgtcggtgtcaaggaaacgagaaaatgctgacgcaaagattcgatgcgcgatccttgtctcggacaaagaagcgcagattctctctctcctccctgcagccagtcttcgcttttctctctccccaaatatgcgaattgccttctaggcgaggcgcacctcgcgcgcgtccaggcgtcctctcagcagctgcacaacgcggtgtatgtacacccggcacttccagagaaacagcaaagcaagaaatgccgaacgtttttctgctgtgctttgaagaggacgaaagtgcgagtttttcgaagaaaagaagcaacgcgggggaggacccgagagcatgttgttcgttcgcgtatcgactgcatgcatgcgagagcttgtctctgtcggcggtgccgcaggtttcttcctcactttttcttctctccgaggctctgtttttctgtgaagagtcctgagcgagagcggcacaccgactttgttcggaaatacaagagttctgtgatgtcgcagcacacgcacggccgcgacgcgcggtttttctcggttgttgtgttcgtcgaaaggcgcttggtttctctttctgtattgtctgtgaaaggttttctgtttcttttccctcgtaatctcctcggcgcctttcgcttttccgccctccgtcttctctccttccccgcgttctatgcgccctctccgctctgccagcaagagtccgcttcttcgttctcgagagagactgtgcggctcttcacacccgagttctctgtctctgcgtcgttgtcttccgctttgcgttccgctctctccttgaaacgcgctgccctgcgtctccccgcgcttctgctttggttctctgcttgactgcgctcgaggcctcgcggtcctccgcagcctccctcctcacgtccacggtgagccgtgtatcgatccccgcgtcccctcgttttcaaccgcgaagggttgcctgccttccagtctcccctgcgccggtctggctctcgaagctcacgtcgaggccgaccgtctctgagcagagacggtcgcttgatctccacttcccttcgcgcatctccgtttggcggctgtctgcggaccggcgtggattcggctgtacgcacatgtattcatttcttcagtgtacgtccagctggccgcgacggcgtactagatgggtgcttgtcgctcggcgaaggagtctcccataatcggggcctctcagcacaggcgttttccccgcgctctcttgtcctctccctgtctcccttcctgtctccttcttctctgagctgtgtgcttcgcgtcgtctctcccttcgggagtggaacgcgggatctcgctggtttcctcctcttcgaaaaacgtctctctccagcttcggcgtctgcatcgcgaggtcaggcgcgcgtctcccgcccagcaaccgacgaggaggagaacgcggcagccgagagccagaaagacaatatcgcgcgagcagtcgcggcgtccgcca

SEQ ID NO: 2763 - DNA, 1779 bp, Toxoplasma gondii
  source 1..1779: mol_type = genomic DNA
atttgtagatgtgtcgagtacgtatgactctagggcctgtatatccagagatgcaagtgtgcgcgtatatgtatgtatatataaatatataaatatatatatatatatatgtagtatcaagcggacggctaaacgcgagcaggcgtctgagatgtattaacacaggtgttgaactgcagagagcatcgagtcccttttttcgcgtctttccccatgtgtatctttgttcgttcgccgggatccagttcatcacgtacatttgaacgggctgtttgcgaaaggcttgggggatgtttttgagagcgagcatgagagagacagttgcggcgcctgtctcttccaggaggtcttgagttccgcgctcgctggctttcttcatcacgtacgccgtgaggcccgccaaggccttcttgagcagcgcaggtgagacggggcacccaggaatcttctcttctgtctctgcaggcgacgctcgagccgcgccatctgttctctgcttcttcccgaggtgtgtagtctctctgtctcccgcggatctcttgtcgcgggaggaggcggaggcggaggaagaggccgagagcgcaggaggcactctgccaggcttgtcaggcgccggcgctttgcgggaagcagaggaaagagacttgctcttcttgctcgaacccacagaccttaggccagaggacactgcgccctcctctcgccctctcttcttagcggcggcctttgcccccttcggaactccagccatggcggagacgcagaagaacaagaaggaggaggagacggagaaggagaagaaagaaaaagcgtatagcaagggaaggaaaggacaacgcaaggagggctgaagggactctcggctgcgtggagaaaaagctgtaacggggcgctaaaagagttgcgaatgcagtcggagcgagaggcagagaggaaaaagagacgggagaaaatagggagaggaatcgaaagttcacaaggaaaagaaaacgggcttcaaaagaggctcttcaaccttctctctttctcctctcgacgacgccagggccgtggtcgcggcgagaggcgacagaccgtccccgccgaggctccagtaactctcgcttctgtgctgaacacagaagcggttgagaacaggaggaaagaaaaggaagctactttgatttctacaaaaattctcagcgaccagaacaacgcgaaactcgacagggatatatgcctgtggggctgtaccgacagtgagtgtccgctacaagctgccgggggcttctaaggctttgcgccctctttttcgcgcatgcatcgccagccggggcatgcacttttttattcggaacgacaaagaatcctctatacgaaagacgctaaaacaggaagagtctcgccttcgcgcgtttgaagaactctctccgtgttagacatttccggtatcttctcttcggcgctcctccgctgctcaggtgtaggtactctgggagtcttgacccgagtcaggccagcgcgcgcctcgccgtccgagttgctgtgcctttcgtgtagtcttttcactaaagtcgacaactttttgttcgcatcattgaccgttttctcaacgacagtgctcctcctcctcaactcttgctttcggctatcacggagtcaaactgtggagacttcccaggcctctttgttcaacgctgaacaaggctgcggatcgggtgacgcgtgcatgcaaagtcagaatattgcgcatctccttcgcttcagttcctgacgaatcaaaccaacacacagcaacca

SEQ ID NO: 2764 - DNA, 2521 bp, Toxoplasma gondii
  source 1..2521: mol_type = genomic DNA
tatcgatctccatttggcggcatgccgcgactcgaatatggttcgcggccgtcctccatccccattcttccgaaaaaatgagaaaaaaaagtgaggggaagctggcggaaactctcaaatcgggagggagaaggccaagcccagcgaagcggcagaacaggggggggagggtgaaagggagaatatagggggagagagggaaggagagacgaggagagagacgcgttttgttggggagagagacgagaagaaggagccgacagtgcgaagcgcagataggcgtttgctgtgggtttcgagcttcctcgaactgtttgaagaacggagaagacgactgggcagttgcgttgaaactatggcttgcagcttctcgtttccagcgtgaggaccccagagaagagaacggagaggaacaaacacccacagagacaaggccgcgcaaagaaaagtcaaaaaccctgaagacacgcgagacgcaggcgggggcggtgctgaactggacaggggattggtacgtttttggtcggagggacggagagacaaaacgcgagtcacacggaaaagcgtttgaacggagaagagagagagaaaacggaaaacctggacaagaagagagagggaaagaggaacggaaaacggggaggagagcgacaggaaactccccggtcggcggtacgaaaaaccagccaacggtccccgactgcgacgaggagaatgtcctggaggcccacagacggcgacggcggacattaaaagtgcaaaaaatcggagtggaaaacaaaaggaacagttaaaaaagcgaaacagagaagagcacctttcattccagggtctcggggaggacgcgcgcgatgtgcagaacccccgaccgccatgcgcatgcgaaaatgccagaaggacttctctcccgtagcctgcgggcgacgtccctgcctcgattcagcggcatgaaaaagcaaagtcgcgtccaattcacagcgtttcgcagatctctccacctctatgcagattcagagagaaacatgcgatcacacacacacacgcacacagacaaagagagacaaagacaaagagagacaaagacaaagagagaaaaagagagagagacaaagagagagagacaaagagagagacagagagagagagaaggagcaggaacggaaaaagagatccaggcaagcttagctgctgcctcgcgcgtaccgtcgcgtccctgggacgactcctcccggttggcctgacgacgccggattcggcttatatacggagaacccctgaggcctcgccttaaacttggaggcgcgagaaacacccgaccccacaagaatctccacgggggagacagagcacacgagggaagcagtggcaagacagagagaggagactggaaagccttttcctgtaaagcgcgcgagagagacaggagagaaccagaaccagtacgacaaccagtccaagaacaagagagaggaacaaggcgagagggaaaaggcgagagggaaaaggcgagaaggaaaaggcgagaaggtgaaggcgagaaggtaaaggcgtgaggaagaaggcgaaggattgcaggagggtgaggaagggagagagattccaggagagggattgagagaacgaaagttgtgtcttcagctcgtgcgactttcgctgagcggttcgtttttctgtggtggtgcccccctctttgctcctctcatgcgctagagaagcggagttccgttttcttttttcttcatgttcgcctttctcctcggtttccacttccttcatcgtgagaaaaaaacgcatccaaaaaagcgcggaaaggaaggaaaaaaatgccttgaaaaggtttcatcttcctcgaggggggttcctgcctcgcggccggcgccggtgtgtcttccctactcgccatccagtggacgcgcggtggaagactggagagaattcttttttctcgaaagaaacaagtcttatccgacaccgaagacgcatctgtttcctgtgtccagggaaagatattcttggacgaagcaccaagtcgacgagttcttcttttctcgcgtcttccctctccctggaggagcaacgaggagacacacacccagtccgctctctccttctccgctctctccttcttccttttcctcccttgtttctcttcttcttcctgcctttccgccgatccttttcagccgtcgtttttctctccgctctcgtctcccatctccctcggcctccgccctccccgcttccctcatgtcttctctgtcttctctgtcttctctgtcttctctgtcttttctctcttctctctccgtcgttctttctctccacgcattgaacggaactctgcgtctcctctcgtctccttgctctgggttgccaggtgcgcctgcgtgagtccggaagagccgcgcggagaagacgtcgtctgttcaggctcgctaccgtcttcagtctctccctctgacgctcccaaacgtatccccgtctcgccttcctgtgcactcctcaggccaactccgcaaga

SEQ ID NO: 2765 - DNA, 2030 bp, Toxoplasma gondii
  source 1..2030: mol_type = genomic DNA
acgtttctctgcatccgttgctctccgtgaccatccgaaacagagcagtgcaccagagtgcgataatgtatttcttaccgattcagagagaaatgaaaagtgcgttttatctgtatatggggatgtgagaacggaaacgaatacattgaaggagaaatgtaaacatttattctacactgccgcagaacaagacactgaagtaacaaccgaacactcactgccaagtgtcaccgggcctccagtattgacccaggcatgcttattgtttccaatggaaggaaccaacaaacgtaactgctgctgggaacggagtcgaggtgtctttcatttttcgaggagcttgaagcctaggttccagtcagctgacgaaccgtaagattttttttgaacggtggacccgcggatggacccagcttgagcagcccactatcgaatgtatgccgctgaatgcacggtgcggttcggcagttaatgcatcgccgacgtacggcttaaactagagtgtcttcgaatctctaataaggtggtattcatgctactgcagaaggtatgctccacccgtgtttcacagcgcccgaggaagcggggtgtggcgcatgtcccagtgcggagttttcgggggtacgagcatgtatcgctcagcctgcacacgatgcccattgttcagacattagtcatgaacgcgagttacgagctggcacatcatgtgcaaaaggcagattagcaatgttcctgtgcatgcaccgttggtcagaagtaccctgggacacatgaacgcctggcaggtagatctctacagtgtacggttcttggccacaagagctgcttaccgtgatatttagtggatcgaagtacgaaaaaagagcgcactttgcaggcttttgctatgccttcattgaaatatcagttcatatagcctttggcctatgccatctgaatgtgtgcctgagacaatctgcaatactcacgggtggcccgggccgtcgaccgggcagtcgtattactactgcatgtttgcttgggttttcagtgttgccgttccctgacgcaagtcagtagacattcaaaactagagtcatgggcgtcgccaacgcgtctgtttacccctgcgcgggaagccctcttggggacaggtcggcaagtcaacgtatgccgcggcagccagcagcataaagctgcacggcggtcgccaaagcaaacacgtcggaaaacgagtctatggagcgatcaacaaacgcgaaggcagtgggtggtaaaacacataccaaagacttgagacagaggcaacttcggtcaatgggaggaacgaagtggcaagcgacaccattagacacagtcctgtagtcgtccgaatgagggagtacctgacttcaaattttcattgtgtgcaacgtttccacatggaatgagccccttctggaggcgtggacctgaacgatacctgggatgagtccgtcagcgtcattaagcttcaagaaaaaagattttttccaatcttgcgcatgcatgcatagtttttcggtggatagccaccgctgcgattgcagaagctgtggcccggggagagcctttgccaccttgacaagccgtgttgctgtttaagtcatctcagaagatcttcgcttccttggctaggaatcatttaggtaccacaatactgaggaatgaccgcctgtggattgcgcggtcattctgtgttatccctgaggcatgcacattcttctgaccagccgtcccgttggtgtctacaagtcgtcttcggaacgaacactttttctccacttggttgcttttagccgacgaagagtatatttgagacagttgtttctgtcgtggtcgtcctcgaattcttttccgatactgctgtgaatcctgctgcagtctgtccagcacgtcccgtggaaccgttcgccttgccgcgcggtatggagtctcgtaatgcaacgctttgacgggttaccagtgtcaaacgcgttgctattgctggaacaaatcagagactgcatgcctagttgtaccgttagcctcaa

SEQ ID NO: 2766 - DNA, 1629 bp, Toxoplasma gondii
  source 1..1629: mol_type = genomic DNA
ggcgaatccgttattacgaaacacttggacaatgtcgcttccaagacattgctaacagaagccaggacctgtttcgctgcctactcggcaaaccaaaccatgcgagcaagcacagaagaaggatcccttgatgacccggatggacttccagcttttttgccggctctgtctcgccgttaggtcactccttaactcgtagtttgaggacttgtgcgagacacaggagaccggctgtcaacgcctgaggacggaagaataagacgcagagaccgtaattcacatattgtgcctagaacggaaccgagatggaataactctaatgttgtagcaaatcgaaatccaacacttctcgatatcttgcgcagtgcagtggggcggtatcgtacaccgtgtcaggagagaaaagttcaataaacaaaggaaaagtctatcctgaagtctttttgtgctcccgtacggtgattgacgaggggaaacgtggaggcatgtctaggtttccgagagaaacctgtcgtcaaaaagcgaagattggcctccaaagagaaatttcgcgtttgaaaaatggagaccgtttcgttctgcgacaaggccgttgaaacctactggtcgttatagatggatctcactcgggtctaggcaaatcgtgagtgtcgaaggctcgaaataaacgccttttaattcgtcattctgtagatctatcacctttcgaaggaacgtgtgtaatttgcatttcctacgctttgcaaacgcaaaagaaaacgagcttcactcgtaccccctcgacaaagaaaccggcctatttttctgttcttggtcgaaggaatttcacatcggaagacaagcggagcatgtccatcttttttttaaaaaacaggcagacttagaggacgcatggaccttttcgacgacaatggaaacttaataattgacgggaaacggaggattgcctatgagcaacagaactgccgtccggaaattcgattcaaatttcaccggagtcgacctcgggtggaaaaaagcttcgaggaccatctggtttccagaacgtcttaaaactggcctagctttaggttcagttctcttcctctgtgcgaatgttggaagcaaaaaaactgcattttcctcgctttttcgcacagacaagagagaagcaggaacgacgccgccagtgaggcgggagagcgaaggcgctggttgcgctgcatgcagagactcattcagagaaaaattcagcgtgagagaaccggaacgccagcgacttcagtcttctcttcgatgaaagggaagcaaaagcagagtctttaccgaaaggaaagtttttttcttctcgaagaaccgtcttccttcttgtcgaaggcgcccggagaaaacgagaagaacgaagccagggcgctcctgctgcatacgtttccaggtttccagttactgtgtactcgaaactccagctgccgaaagcgagtcgcgttctttccttgttccttctttttccttggcatctcttctcggtccgtttggcttctcctctctggtttttcacttgcttcccggaccttgttcgcttccttgctctgcatgcacaggcaaaggaacagagaccgagacaagaggagacaccacgaagagacaaga

SEQ ID NO: 2767 - DNA, 2065 bp, Toxoplasma gondii
  source 1..2065: mol_type = genomic DNA
ttaacagacgaacaagtgcatgcaccgagctacgatcacgagcaaagacatcgtggctagacaggctctctgtcaactccaaacaggacaccccagacgaaaccggaagagaacttccctgtctctgcgcccctgtctcgctgtctctccacttcatctccccttcgactgggctcgttgccgtcgacgttcttcttcgacgttcttttcccctctacagtcggtgactctgtgtgtgcgattgcgtctctgtcatttgctcgctttcgcctccgacagtcatctctggctgctgaaggcgttacttttgcgcctcagcgacgctgccaagccgaagctctccccgcccagctttactccctgagtctgcgtctgcttcgcgaaactcgcacttacgtcacgaagaatctttctgctcatccaccagtccttcaactccctctcgatgttctgcagctccagcttcaaagacgccgccttcacctccccgcgagaaagcggttctgcaggcgcagcagtgaaggatacggcgacattcgccgaaggcggaggaggcagcgcagtcatcgtggaagagcggaaatcgagagaagaacgcggccggacgcctgttcagggaaggcctcgcgagaggacggaacgaatgcgagaacagcgggatgggaacgggagccgtcgagatagagagaaggaatccgaagaggagaaagagaaagacggaaaacgaaagaaacaggagcggaagagcaggaaagggagagagaaggtagagacaggggggggtctgtgttttacggtgtgtacggggagaggcgcgggagtcttctgaaacgcgagagatattcgcgcgacagaggacgagaaagagagaagaacggaagacggggaagagtgggagatgcggcagatggaaaaaatgcgaggaagctttcaaatccgcgaatttggggcgggaacagtccgccgtgaggtgtatgtacacccgagagacgaagacgagaaagtcacgtttctccagaaagggagacaaccaagaggccgggagacaactaaaacggacagaaaagaactgcagagaaagtctttcacgaagcaccacctcgtcccgccttgactctcttgctcatatttttcaaaaaaactgcatgcgccgcagcctcccaaagccttgcagcgtcaccggccgtgtgtgccgcctggggcgagacagcttgtgttctttctcgtttgctcgacagcgaactcgaggctccgctcgagattatcgaggagacttcgcacccgcgcgttcttctccgtttcgaactcccagcgaaaggttaagcgagacttccagaaggaggcgagggggatgtaggaaggcgagaaaaaggaactgtgagcagggatgagttcgtcgacaaggctctctcgcggtcctcagcgctcagcggcctgtcttctctcgtttctgcgaaaagattctggaaagcgctgtcgtccagaaagcggcagacgcggagcagccgaggagatcctgttgaattgcctctgccctcttctttctgtgttttccgggggaagaatgtgagcgggcaaagagaagcgaaaaacaggcaagaaagacagcgagtccctgcgtttgtggggagagcacaaaacctgggctgtctctctgcgctgcagcggacagggaagaagtttcgagagcaagaaacgcgccttgttcacttggcttctgctgttgttcatcgggggtgtctgtacagggaggctttttccgccttctcctctcgtctcgagacgtattcctctccactttgttcgcccagggcgccttcttatcgcaactctctaatatctggtgtctctctcttattgttttacgccgtgtctggccttagtcgtcttccttgcgcatgtgcagtccttctcttcttccgcgtctctgttcacacaaaagcagttttttctcctctccttcctcttcttttctttcgcttcgtcttcctcttcgctcgcttcgtctcctctctcttcctccctcagtcttcttcgtccttgatttctcgtccgagcgagaaga

SEQ ID NO: 2768 - DNA, 4856 bp, Toxoplasma gondii
  source 1..4856: mol_type = genomic DNA
ctccatcttgaggaatctcttctgttcgtcgaccaactcgaggtagagcgagttctgtcgcttcacctcgttgagtgccgcgttcagccgggcttcgcggacgcggtgtttgtacaccttctcctcgatgagctgttgccaggaaaagcccttgaggtacgtgagacaccagaggtcttctcgccaccggctcttccgcttcgcgcttccgatcggctgaccattcaacagacgagaaacgcgacgtgcgacgcgcttgtcgaggaactcgagccagcctgatgtcggtacacccgaagacgcaggtgttgaggaacgccgattccgacgatgatcccccgcgccgctttcgtcctggatgtgcaggcggccgagctgaccaaatctgtcgaagtagcgacgaagtgccgccctgttcattcgtggcggaatacgcgaaatgtacacgatgcccggctcccgttttcgcttctttgtcaccagcagagacggtccatctccagaagatgaagaggcagagttcttcccattcgtgtccgaacgctgcttcttctccgttttcctcgccgtagcgctctccacggatctcgcctcagaggcatccgactgagaaagacccacaacgaggggctgcgtgtctgtactcattgtgggaaccttttttcgcgaaacgtagaaatggtcattcacatccaccttctccagtcgaggcacagacatgcacgcacagatacacaaagagcacgtgaatgaccgccgcttacatctgtgcctcgccttcccgttatttgtcacgagttcgtttaggtctacagcctttccggtccgaggtcttccaagaagggaagcaaggaaagcggaaaaaacaccgtgaacagcagttgaggcactcgacagaaaagaggaattatggttggactgtgccggtgtggacagtggggaaagactccggggcttagcagagagtagaatgccggtgtacagtcctgcgttgaagcgaaaaaaagatcttttacgtgttcatgtgaaggggagatacgacatgccgctagctccagacggaagagaatcacttgtcagcagccaacggcaaacgaggcaaacaattcggcgaccatgacacaggcagcaccttggggaatgcgacgaatacacacagtaaacaactgagcaaaaggcggagaatgatacgggaaacgtatcgttgtaaggcgtatcacgagaaaatttccgggaagcttggcgcatgcggtagaagtcacagtgctgttacgcgactgctgcatgcgcggtttgttgaactaaaatgggaaaatctgcaaattttgtcataatctttagaataggaaatggctcacgccgccgagaggcggcgttttcgtgctgcagtccgtcgagatctttgtcttttcctgaaggtttcctctctactgcccaacacaagtgtttagggtttccgtgctcttgcgaagtcttcgcgtttggcttccagcatcgtgtataacgcgcttacttctctcccaccaacacacagaggaaaaacttccgttatgtagtgtcgtcttgcaccgatttcacagcggaaggcggtgtcattttccgcacacaagattctgtgtcgaacagcgtatactgacagtgaagcgtaaaaacgtctctgttgcttctacgacctgctgccgaacctcatgtggggatattcttcttgctctatgaaggcgagatctttcatcgcatgggaaaaatcatttgggacctgtacttcactaaaaatactgagggtcgaagatggcatcagtgtgagcggctggactgttgctactagtctccaccgtaagttgaaaccagatttgccaagagtagaagaacgggactgtggctggcaacttctataattcttgcaacggcaaaaagtatgtacccgaggagcgttttctggatatgccagctggcggtgagtcagcatggcgtactagaatggccaacgtcatcttgtgctgtttgcacgcgtggacagtcttaacactgcttgccggataaaagtgtgaatacagaagtctcttgccgaacctgataatcctctctttctccgaatggaactcgccagtgtctgagagactctgattgtcaccgtcaaaatgaagctgttttttgaccaacagtttcatatgcgttataggcaactttgtagttcatatcttgaaacaggctgccaccagtgacgcacaagaacagcaagccactacttccgttatcgctggctactactggtgtgaccgtttgacgatgtgatgtgaaagggagcaaaatacacaatttgaaaaaggggggaaatcgtcttgaattccaagatcccacatgaaacgtggcacgcattcagacgctgtggaaagcctgagcgactcctcggcatgcagagaattggcgcgatactgacggggcaaacgcacgaaagaagggtggatgccatagaatgcatttccgagccttgcccgaagtgtttttcactcatggagcgtaggcttgacaaaacactatcccgggctctctgtgcctctacttcgaatgacgctagaggtgtgcttgtaccaacttcaaatccggaggtgtgcccgaatgcaggtaatgccgacgtcagggcaccccgaaaaagcgttcctcaaaattctgtaggcgcaaattgtggatgaaatgacagtctatagcggatcgtaccacaatcaaactttaagctcgtttggccactgatcgtcaatgaggcaacgttgtgcctttgacgggctgcggcactgcgcttccgcgttagccggagatcaagcggatacacttatgttggttaagcttcccccgagacagctgctccaactctcgcaaacggggcaaccgcaaagcattccagttttctggtgtgtatcatcctagccgcgctaatccgacgcggactacacgcttctggctgcagtcaggaaaaagcaaatgctgaacaaggcacagaagccttcggacaactaggagtagcgttcacacgatgcataaactgccgaaggaagtaccgaaaatggagttgcagtttcgattcgttgtcgggactcatgcgtgtgtcacgcaatcatcgttctccacggtaaatgtcagagctggttgtcgcaaggccgggaccaattaggatgccccccgggggtgagtttttcagtagtagctagatatttgttgtagcattcgatgaacctttcgcactgcacagcgcagcaagcgaacatgataccacgttggagcgtacggaggatgttgaccacgaaaaaatgccaaaaaagtggctcctccatggcagtccagtcactgcagtctttcttttcttgttgcaggataatgcagccccctcaggtagaactgccacagtttaaagcgtgagcggagcctcgcactaacaggcagttcgctcttcttctctgctgtcagtcaagtggctctccacagcagccgtatccgtgaggaaacccgtctgtgacggggcaaagctgcacagttgctcgtcagagcgtcacccactctgcccaccttcgcgcactctcggcgtttctcgtgtggagcgggtcatcgggctggtgactgtttcttttctttgtcacatcagacgcgttttagtgttccatttccaaagttccgcgtggaacatttccagtattcaattgacggtctctgttttctgaattccagagctacaactggcatgagttgtacccgatacgacagcggtgcttcgcgagcgctgtttcactttcggaggcatgcaggtgtgcgtgtctttcggcggcagcggtgttgggcacgcttgttttctggcctagaaacagacgggtgtgcgagcgctgtgacaaaaacggaaatcggcgatgcgtcattcgtactgcggtgacttcaacaagaggtgaagaacagaaactgcggacagctggtcccacaacggtgtaaagacaccccaggtgaccattgagtgagtgcgcgtctctcgtctcagtgtgactggcacactgcaagtcatttcagtccgtccgcggcgcgtcgaaagcgtttcccgactgcggcacacgactggcaacgccttgtttgcgtatgttgtgtgtttttattacctggtgtgcggcgccggttctcgaagcacaggctgcagctggcacccgcgttcaattgatgtgttacaggcaggctgtttattcgtaccagccgtccgcaccacacttttgagagcagctgtcacgcattccgtttttccccttcaactggaaagcgccgagagccatattacacacatttcaagctgttggctggacctcggccgcgtcacgcctttccctggcagttttcccgcccgtttctgcgccagtgacatcttgttgatccgccccggtgaagtcgacagctgctttgatttcgatttcccatcaccgacgcgttgccgtcgcggcttccctatgtcatcttgggtgttcttaagtgaccagatgtgaacattttttcagtttcgtgtgcttgctcagctcgagtgttgtttagcccgccgcggcatccagggcgccggcagtcgtcgagggtaactgaggccaggatctctcggaagactgtcctgcaggcgttcccaagtgaagaattcgtcgcaatcttaatccaccctgcttgcaaactgcaaaagcggaacgtagtctctcgtggcccgtcgacgataatggaaggcaacacaccacagttggatgaacaattagtctcaaccagtgagaagccggattctcccgcctcatgtgaggtgtggtcaggggcttttctttcgtcgccttctctcatttcttcgacattaccaa

SEQ ID NO: 2769 - DNA, 1983 bp, Toxoplasma gondii
  source 1..1983: mol_type = genomic DNA
ccctcgcttctctggctgtcctatctcgtgcggagacgaagggtatagggagacgcagagccgactgcaaacaactgccatgtttttttggattgtttttgcaagcctaactcaatctttttcgataacaaaggagcagacgaccgctgtatcatcttgatatagaatgtacgcatgtggtgaaagagcggacaaccgaaaaaggccgaagtgtgctgcagagaggggaaatgtgacaacgacgcaggctacaaaatagagcagcagaaagtggttggatacaagacgtttcgcacaagtattacgtacaatagtaagtgcatgtacaggtgctgtgttccaggtacatgttgggaattcaaacgagtgtgacgaagcattctgtcaaaattggctttgcctgagtagatcgtcaagctatgacgtgggatttgagaattctttacagctcgctctgtcctcctagaaagaaagggaacacgaccgaggtacaaatttcactgtaagcggcgagatccccacaagcagtctcagcgaactcagcagaacacatgaacacaaaatactaagacagttcatgtggaaccgcttttgagactgtcttttgaaacatgtcacggtggattgtggtttgagtatatttcgccaacatggaggtgctgatacagtcgacagacgattcaaagtatgcggtttctccaccacaaagttcacaattaggcagatgcgtcgcatccctgcgaaaacgcgaagtcaggcggctggacgttcggttataacctgaggggggattcactcgaaataccctgtgctgaaggcggctccaacttgctgcgtttcctttcctgtagatatgcaaccaaacaacctccgctcgatgacgccttgcacttttacattgcaatctccaattcctctttctggccataaagaaaaggaaaagagggtgtttttcatttgtcatgcttactttagtcctgttcattgacaattatgcttaaactgctgagtcactagacatgagtcggcgaagaacttcgtttcctgttccacttccccgtggaaaacacagtcgacgaagtccgtctctggtattgggtcaaaaaggaactttcccgttttcaaccctaacaactgcgcacgtagatgcagttggtttcttccccccgtttgcgttcagcatcggaattaccagtcacctcagtaatcactaacaaaaagagtaagagtcgtatgttcatctcttctcgacgcgcctcgcgacgatgtttagcacaataaaaacggttccgagcagagtcagagcatgctttgtcttcgacggtgtccgtcggaattgagacggaagttattccgtcacacacaaacattatacaattgcgtcggtgtccccgtggtaccacctatacattctcgtgtgtgctgggaaatccggggattttctgtgtccaacgtagtaacggggcgtttcctcttcgtaacacacaataatggacaaattcccatgcagatcctctctctgcttctttgtcacttgatcgtatcacgaaatgcggtctggatcaatgaggacccacttcttctttgccccatttccccgccaaatttcagcaccatacccgttgtttattacctcacatacacatagaaggacgggtgcacatccgggtcgcggacgggttccagggcgaacgtcgtcgcgtaaatcgacgttaccccgtcgatctcattgctctctgcgtcgctgcgtctctgtggactgtgtgcatgacggctcgaaacggtccttgtcggatagaacacatcaaaaattttttctgtttcatctgtcacgtgcgtccttttggtggaagcgacgcgtcgtcgcggccctgttgggggtagtcaatatttcagtaagcgtttctagcgacacccgctacacagaacactcggttgaagcactgtgatgctggcgtttctgtccgctgtctttctgcagaa

SEQ ID NO: 2770 - DNA, 2421 bp, Toxoplasma gondii
  source 1..2421: mol_type = genomic DNA
atcacagggtgtctactccactggactgacatgggttgctgagtggaaacgtgtttcgcttgacgaaactcctgccaaagtgaaacatttctcgagtttcaatggcgcagcacacattgaaaaacaaaagcaagacaggggcgtactgcacgtcaagaaacaacttcccggttaacgggtcagatgagggctctcttgtcgcaggcattgtgaggagagctggattgctaatccaatcgacgtagattctaagtacacgcgtgatatgtggagacttctaaatcctgagcgtatcaacctgagaagcgggggcgagactcacttttctcagacgaaagaagcatacagccagaagaagaaaccgcagctgtgccgcagtctcggtcaaaaggcagtaataggattcggcgaaactgactctataaagtggaaggcttgccgaatacggacatacattcatgtgtgcacatagttacaatttctgcatagagaacgtcgtgatctgtgagtagcgcatccggacaacggaataaccaaatgaataatggtcgcacacaaatttctcctgttttccttcataccgctggaattaaacactggaaggccgttctatgtagctgatgctttttacgttgtacactctcatgaaacgttgttttggtattccttcagatagttcggtgtcttactcgaggatcgacgaagcaacatacgtggcaatgcccgctccaaagaaaacagtcccaaaaccgcatgaattgaccatacggctacccattgttcaagacagtgtattagtgttggactcttgctttgtggtaaatgataactgccgaggtaaaaacctgttcgacggccaagagccgatgttcaatacgtgcacccgagctataatgtatggtcaggcttagttcagcagctctcctcgttagcacaaggacctgtgcgaacttgatgtcggtgaccggcctcccagagacctcctttattctttatgttgtggaaaggccgataaatcgtcgttaaagtccctaccgtttattaaaatgcacgtcatacgtgttctgagaggccacggaggcagcgcagtgacttttgaaaccccacgagaagtagtggcgtgtatttcgaatcgtgaaagacataatatattctcgtacgtcccctttttccctcctgtccacaggaagaagagggctcggtgtctatgaatagaggcaaggcagtacactgattgcgcaagagggatctgcgtgcgcgctgcccttcccctgaatttcgcgagaaaaaactgaggtcgaaaaactgtgtccgatttgcgcagggttgtctttcctgcttttggtatgtctgggtacgctagcgctatgctattctccgaggcattctcctgaaacactgactttttcccctgctctttgaaggcattcacgcgtaaattgcgtctgccaaaatgtccttctgtacatatatatcgctgctgttgattaatggtctaatcgttttgtccagggagaagtgaatatgaaactgaatcagaacaagtatatggctcggtctactcgagttactcttctgtttctcggcgcgtgtgtgttttccatgtacggggaaagtctatgggaaacacgactcctcgtcatttcgtggacattcgttacatgacagtgggactgcctttgtccaggggcattcgctttaccccggcagaaactgatcccattttttggtacatttcggacactcccctttctgttgttatttcttgcgcacaaccagcggagacaaaaggagtgaatgtcacggaagaacactcttctttgtggtagtggaaggcgttgcagcctcaaaagagccattctcatctgtgtagctgcataatgtgtcgtccttctgcacttccctttcgccaaagcgctacatgggtttctccgagaacagtctcctgagatatgtcttgaaacttgcttttaccgagacaacttcacgcaggtctacgttccatattttgtcacagtcgggcacaaggggaaacatgcaggtaaatttgtgtggtagttcctttcattagatttcctctgcgcattacaatcccgtctttacatcaggaacaaaaaggaggaaccatccactccacactcggagtcctgcgaggaacgcgtgttcgaaagtgttatcacctgattccaaacaccacagtctcttccttttccgcttttctatgccgaaggtggttgaaccctggccgacattctgcctctcttagacgcatgagtctacggaactcaccgttccccagtttccaggaaggcccactgcggaacggacgaccttgttgggtttcgacgcagctgctcacttcgactgcttgttaaggcaacacgcattatgagcccgaactgcgaaacgaatgggtgaaga

SEQ ID NO: 2771 - DNA, 2029 bp, Toxoplasma gondii
  source 1..2029: mol_type = genomic DNA
aacgacgagcaactggaatgacacagaaatttccagtatagagccctatgtgcacgcagcctttcgagcgcaacggctgtcattttcctaccacctagatgtttctggacgaagcagccagcaacatggaatatggagtggacggcaagttacaagcaacaaaactggcggagccgacatggagcccagtcaagcgctttcacgaggtggccccttcgttagggccaagtcacaaagtctcttctcgcggaagatattgtgatccctacactctggataacgaaacacttgtcgctgcaaattacacactggttcacgtctctctaaaattgcatggaacttgctttctgcatgtacacccttctgttcgttggctaaaatgattacagcgtctgtgggtccagccttgagtctaggggggcaagtcttgagttcgagccgcttcctggcaactggtattagaatagattcagcctacttccgcatatactgcatctgtgcactacaactaatttttgttgtgtcgtatctcagtgggacaacacagtaaacctactaggaatgatttcgaagcaccgtacacaggacgcctctaggctgtcgggggactggtcactgaagataggtaacataggggcaatgctccgtatgttttgtgatgcgtgttcctcattaccgacgattgcacggaacagcagaaggggagcactgcgcgctaccaagaggaacaagtggacagatgcgcaagaaaccgccgacgagagagaaatacgcatcctgttcatcacggaaacccgaggtgtttctgggacggcagtgtacgagttctttgtgtggttgtcatccgctcagtgcaccgagtttaaaatacgtattgaaaatagttgcttctaacaactgaagccttccgttgatttctgtagacgtatcaccgatgaaggcgaccgcatggcaggtgaaaatggggcatttggtggtgctattgctcgcttttacagcattcgtttctgatctttggagtccttctgttccccatccgatcattccctgggaattacgcagctcagctgcagtttccgaccctgagaatgtgcactcaccgaaaccttccaataagtggaggctaaacaataaagtcattttttttatcagatgacgtgcaactcggtccatgcagacacggcagatggatttcttgccaccgcatgcacagcgagtgaaaacattttaccactgcaagagttgcgcaggaaaagtagagacaaacctctctcacacgtcacttgtcgtttggcgcaggcaccccgccccacagctcattggtcgatctagtttttcgtccagttgcttgttcctgtgtttgttggaaaaatagctgtttatttgagcccagctcgggcaatgttgtttggttcttcgactcgggtgacgacataaacggcgtggggtttcgtgaaaagcattcaacagaggtagaagggaagccttttgtttggttgactgcgatgagccggtgccagattttctcgtgaataggtttttcctcatgtgaattacaaacgttgacgttgttttacttctgcttgtgattcttttgtggtggtgtcgctatttaccatactgttccgtgtactggatggcgaagggcgattcgtgtgcagacggcaggaagtaggcggcaccgttgcctcccataaaacggaaaatattttcttttcaggagaaggcagtgagggctttgcgtgaccttccacccgcgcgttctgtcgaattaccactagctcgtccgtttttcggaaaatacacagaagcgcccccccccctccccgccccggaattcccttctcttcagacaactcgtatgcagcatcgctttccgcttgcagagctcgtggtgcccgtctgctacctctcaaaagcaaccggaaagatctggcgccgggtcctctgggctttttgaaagagggagctgcaaaccgtagtgtgtgttgactcttcgtcgctgcgaactcgaccagcgtaagcaata

SEQ ID NO: 2772 - DNA, 4840 bp, Toxoplasma gondii
  source 1..4840: mol_type = genomic DNA
cggtcggcaactccctcttgtcttaacagacggccgagacaagaggggagacgaccgaagcgaagcagaagaaactgctcgtcgactctttttgtctgaaggagaggtctgaacacgaggacgaagccgagcccagcgcgggatcctccagagacacctgcgacgaaacaacttgtctgcgcaggtgacggcgcggcagttcttcagaatatgcttccttttgtccggtggagatcttgtctcgaggtccgcaagcttcgacggcgcgcattgtctctccggcgctcccgggtgtttcacatgcaactgcagagagacgagagaagcgagagttcgcaggtccttgctctacaggacgagagacgcgtgagggagacagcgagggaaggaacagttggttgcggcactgctgaaggaaggcgacttcaccagcccttgaacgcagaactgcaaaggcgtcagccattgtcgttgtgtcttttccctgtctcgcgcactgacgattgctttctgccgtcccggcgatcgattctgcgcttcttggtgtttctcgacgccaactcttccagcgatgtatgtgacccggttggactcccgaggctgaaaaaatgcacaggaaagagtacgtagcctaagaaatagtttccctccttcacggccagcgatatgagcacccttaagcgcggttcagaaagcgtctggaaaaaattgtttaactgacagacacacacgggggcatgccagggcgaaagacgacacacacacagacagaagcagctgcttatctttttgaagctctggcggctccaaactcaagcaacgacagatgagggctccgcggatctgcggactggagaaagtaaccaggagaaacacgagtcgcgagaaaaaagaaagaggagcacgcactgcattcccttttcacttggtcaacagacgcaaagaaaaccgcgcacagaaacggactccccgcgggagagaagaacggcgtgaaagtgcgataaggcaagatcagtaagcttcagtggtgagaagccgcgcgggaaaggactgcgaaagaaaaagggtgaaggcgtacacagccacgcaaacgaccgcgaaccgtgaaagagtcacatgctcgagtgtacattcagctcgtcacacggcgagctcaagttgcggctacctgagtctgtcgcgtggcaaactgtcggggaagttctcagcttgatttttgtgggaaaacgctcgatctcgacacagaaaaaagcaaagggggaaatgctgaccaccagaaacacaccaggtgagaagcgacggcggaccagcgacaaatcgcgaagcgcgaatgcgacatcaggatccgacgcaacgagacgtgaccggagtgtccacatcaatcgaaatcgcggaccccaaactcccaggctcccaactgcgggatttgcgccgatgaaaactcgtgtgtttgcgtctgctgaacagtggagcttgccgcctaccccaaggttgctccgcgtagagtttttgcggcctgtcgagtccgcctcgcagctttttggtccaagtctgtggcgccgagaagagacggcagcacacgcgtgaaaaggaagcgcaaaacgccgggatgtcgtgataaagtttgcaggcgaagttcacgttgccgtgggcaagcaaaacggcatgtccagggacgaaataccgggctcttcaacaaacgatcttcgaacagaacaccgcaactgacttctaatgggatggaaatcgctgccatcgaaaagccagagacgcctcacccgttctggtacggtagcttatagtcaggcatagtcagtgggcgctgagttgtgcgccactcgatcttgctcgtaccgcgagggctgactgggttttgggtctgttacgggaaggtcgtcagcgacgccagggaatctgcattccgtgtggtgcctttctggggtgcgaaacggaaaaggcgttcagtctgaagaggatgccatgtatcactctcactgctaggggccctgtatactcaagtgtcgcgcctgaggcgaggcgtggcgacagagcagaagctgctcttctgaaggagcagtgcgcgacgctagaaacggggagaaaaatctgctgctgcagcacatcctgtctttcctgcttctagaaaggagagtttttgggtcgctatatctcggccgctgtgtgtgaagttcgtggtgcagcagaaagcgcacttgtcgaagagggtcaccgtgactagagaaaacgatggacgcactgttctatgcccacctacgtacagattcgtgatcaaaaaacgcaggtctgcatacagccctgtgaaacgaggtacaaatgcagaaggcggtttgaaccaaaacgatcggaatcaatgattccttcgaaactgtcgtcatcttgaaacgcatgacacttgcaactttgattcgcatgccacaccctcgtagccactggcgcgggtcccgtccccttgaaacaccctttctcgttcacgctgttgccaatctgttccagccgcatatatatacagatgtatgtataaacgtacttacatatatatatatatatatacgtatatatgaatgtgcacatacatatatatgtgcgtatatatgtatgtacacatatgtatatatatacggtttgtacgattaaggatatgttggggtttgtatttttttcacatggctcaaagaatgtgtagctggagtcatgggtgttaaactgctgttgggatgcctatccgcttggcgtcaatttttcggctaaactcggaattggtcaaccagcgcgggattaggaaagcagtacgagagtgcccgcacgtcagggtataactctataaacaggttacccttgtaaacacagacgcatccgagagggggtaaatgaagaacggcgggctaccgtggtgcaggcgcacaaacgctcctttgttgccagaagcttcacacttcacatcttcagtgattgcgtaacacgactacagacggtcaaggtaccctacgaaccgagttggagttgttcgacagcgtgtaccctcacttttgcgtttcggcagattcttcagaaccatctctgacgcgttctccaagtgagcaactagttgcagagggtgcctggctcgggcactacgaaaagcgagttgtcaatggttttacggggtcggggtggcatcttcgtagctcactgcatcagtcacgagaaggacttgctctacgggagactcgtttgtcagtcatttctcagaatccgacaacctgaacactccagttctcaaaatcgcagatcccaaccacagaagtccaactcgcagtgtacactccccagaaaacctcgcttgttcgcacccttggagtgcacggtgtgacgcgttacccgccgcaacctatcgctgctcctactccgcagctgaggctcgtccacgcatgtgcagctgcttcaaaaggataccgcgagacaggaggaagaactccagagtcttccctgccgaacaaaatccctaaacctgatgattgcctagtctgacacccccccttcctcttgaaagccagctgcaggacacacagtatcgtcgacgcacgcaaattgaaaattcaacgtcgaacactctggaatgcagtgggctgaaactgaaacggaagccgatggcagcgagctttcaattttgtatccgagtataaggcgaattcgcacggcagctcccttggcgctgccggactgttcgtggacgagggatctgttgttctagcagacacaagggtgttttcgatgcaggtgcaggcgtcctgcggctgaaagtcgatctgtctgcgtatcttctttttcgtaagaaaagcagcgtgcatgcaggaaaagaagatcggggaaagcacctgagcgtcgcggatttatttgcggccgacgacatcgagaacgactggcgcggaccagctcaccagttgtgtctcgaactctaaaacgttttcgctagagtttcttctttccttggtttcacgccttttcttgtggaggcagtccgtgcaagttgccactcagtctttcgaaggtggcgccgccagtcgacgcacaaccccagcatagtgtgtccagaggaccattgctctttcgcgttccttgctctttgcccgtctccgagctttccggaaatcgggttttcttccacttaaacaccttcgccaaaacacacggaggagcgggtgttcaggccggcttgtcgcagcgaagtcaaagacagcaagagctaacgtttcagtccgactcccgccgaatcttcgaataggtgaatgcggtcttggctggtttccctcgttcgccttttcgccgctcggcgtcacaggtttctatttcgatgattttcgcctcccgagaaaagagtctttttcccaaccaatgcgtgactgttttttggggcggcgacgtggaccgcttccaagtagggtcaacgcagtcggtcacgagagctccaagcgactctccttttttttaagagggagcggctcaatgcgtcgctccgacacacgccgtttgttttctcttatgtctgcgactgctgattcgtcgacgctgggtggaccgcatgccctgaagctctgtgagttgccaaagattccgatttcctcggttttccttcctcgaatcaaacttgcgttctcttgccgctgtgcccctccacgagacccccgtccctcgggtgtatctccactcgaccgtttgatagttgcatgcttttctaggaggtgacgtcgtcgctctcttcactggctttcttctctccccttcttaaacagtgtgtttgcaggtgggacccttgtactcaggaacatcctgtactcttcga

SEQ ID NO: 2773 - DNA, 1786 bp, Toxoplasma gondii
  source 1..1786: mol_type = genomic DNA
aacacattactacactctatcggagctcaacaaaaactttgtcgtgaggaggcaatactgcgagttcagtacgggacccagcagtcggtaggccgaccccgcaagatacatgccgggagttgccgcactgcgggtgccttcagatggcacctacatacaagaagcgccactgtctatcaattgataaaatgtttccagaaggcacacacagatggtggtaaaacgagttcacagctggccgcaaacagagctgaactgcttaactcaaacacgccatctttgtcatgtgtcatacacataattatttcgtttacgcacatccatcgccgcacgagcgactgtgtactgcccgcctgctggcggtttgtctcagtcccgtgcttcgctcgtctcgagacccgcaagtgctgcagttcatgtcttcagaaactcgaactgttccaaccgcatgttttagaaacacgtacaggccagcaggagtgcactgttacacagaaactccttagtggaccgcaccggtgaggaggaggttgtgcctttcttggtcgattttgccattctggaggagcttgttcaagtgccttttgtacaagaagctgggctttgtaaatcgttccgagtagtccttggttccagccaaacacacaaaagctgtcccccaggcgaaggacgctccaatgtactggaagtagcacctgcatttgtctcgcccgaatgcagggaagagcttccagaagagacccatagacataaacggcaacattttgaccagtcagtgaaaacaattgtccccgaaaagcaaacccgatttcgaagagaaacaagcccagaaggacgaagcaccgacgtgaactgggcacatgaacaggagaaacgtcctgaaaacggaaattgtactgaccgcaaaccaccccgagaggcagggcgtcgttccacgcacgaaatggaaaatctgcactttcaccaccagagagtactccccatacaacagtcaaacaacgagcatccctgaaactgctggctgaaaatgttatggcttttctgagtcggctctgtacgttttcgcctgtcctgcagttcttcactgggagtgccagcgatgaaacgcatgcactcgctcccgtcctttttacgcgcgatggcgacgaacacccaacagcgcgagatcctggcgcgcgctgggtagtcgatttccttgcgtttttcggtcatgtgcagtcacggcgaggactgtgcgacacaaacccctcggttactttgctcctcactagtcgttggcacgactacttcattacctgcaacgcgagttgtgtttcttttggacatcaactgagggcatttcgaaacggctaggaaaaacgttaagcgtagattgctcactctgctgggcaagaagttgccgtctctgaacttacctcactttcagcggcgtcgctctccctcggatctctttacgtttgctaattctttcccctggcttttttcggttgagtaaacgggaacaaaccggttctctcttgctctgtggctgttctcttctggtgcttagtgaattccagtatcgagcctcgtctccaagcgcagttcagcgtgagtcgcggtactctgctaagccgttctagcgtggaatccccctgggttgctgcttttggttctttttttgagacacgtcaaaaaaactccattccgtcatgcgagcttaagtgccaagggctattgagggatgaggacacacgccgtctcagtgttgtttgctgcgtaacgcgtgtctctttccgtgttcaaa

SEQ ID NO: 2774 - DNA, 4607 bp, Toxoplasma gondii
  source 1..4607: mol_type = genomic DNA
cacgatagccgtaaagacgagtgatgcgattcctatcgtggaacattgccgtgttgtgtcttcatgctatggaatggagtgccgtgttggctcagacgacagttttccagcttgaaaagccgccttaggaggcgatgtcaaactgactctgccaggtgaggcagcaaacgttgccacttagttggttcggtgataaggttctgtgaattatgttgccgtacgtgcagatatcgacaagcacaaccgtctcggctccgttgtacaacgccttttttacaagttcctttgttcggacggcatgttcccagaaacgtttcttcctctagcgaagcaggctgctttccggaaactgaaccgcaacgggtgcactatggcttctcgcaagactgaggaacacccgtttaaggagagcactggtgatgctggtggtgaagcacctgtggaagggcctagaggtccaacagcggaatgtgccgatgggccgtcgtcggtgcgtatgcccaggatgcagctcgcccttcctgaggcaatatcgcgacctgtgtctatagtgcacaggcttgacattggaaccagcggcgcactcgtggctgcaaagactgctgctgcagcagaaaatctgaagcttcagtgggcagagaggaaagtcctcaaggggtacatcggactctgcaccccagagatccactcgctccacgaggttgacgccccgctccgaaggcacccaacgcagagggggagaatggaagctttgagtaacgaaagcagatccagtttccatgatgtgtgcgacgaaaccgcacaaaaagatcactctagttatcgcattggtgcgaaacctggggtctctgtgtttgctccgcttggaggcaatggcgcgtatggcatgtttgcagcactggctctgacaggaagaacccaccagatccgagcacacctcgaatacattggccaccctctcctgggagatctagtttatggaaaccaaacagttaacgaggaactgcggaggttcgtaaagaatgttgttgtcaacccacgccatcacagggaagaggctgctacaaggatgacgagaaaagaagtacaggtttcgtgctgcgacgcagggccggatgtgttggcgcccgcgggaaatgtcaaagtgcacatgcgacccttcttacacgcttattttctacgctttgcccaccctcgcactggcgcagcggtcaatattaaagctctgccgcctgctgacatctgccaaatcgcagggaagataggtgtagattgggaattgagggcagatgctgccttcgaaagaattcatttgaacggattttagtatctggaagactggatgaacttctaaggtttttggaggccgctgctcctgaatacctggcttctctggcgaacgctcctgccacggcgggctgccttgtcagtggtattatgtagtcatcttcagtaaagttcctgtgggaaacagcattcctcagtttgtaggcgcctataggttgaaaacgaaggtagggggtacggcagtgtttttcattcgaaagaggcttcgatacaggttgaatgtcttcgttcacgtcttgagcagtgttcagtgagattgcaccgtgtgggctttggacgctggagctattgcagcgagatttcggtaagttgtgtgagcattgctcatggcattttccctggagatcagctagctatagagagcaaaaccttcctagattcggccactgtctacgcagggggtgcgtcccccgtctacttgtagagtcctttcggcgggagcgttgttccgtatagccgagcctatcatcctgagcaaggaactctggaggctcaacatacgatgttgctcgcacgaggcatgactctacaaaatggtactttgtagatttgctgctctgtcggcaaaaagcaatgaattcgaaagcggcactgcggagaaagattggtcgtgaggtgtccatacaccgaagcttagtaacatagctgggcactttattgaagagccggcggatggttcccttcgtcgagcactgctctctctcagacacaactagagatttatgagaagacaaagacacaatgcatatatttattccgccatttcggaaaaggtctcgctcgccacctgataaccctgccatctctgcatctgatggcaacacgagagaaactgcctcttcaactgcattcgtcaaagatgatacgaatagaatgtctatcatgccccacgcaatgcaaccttctgcgatgcacgacaagcggcgagcaacggagactactgtaccgttcgccggtgcgttgtccagtgtcgctgggtcgacagtcgccttcctcggagactttctaggctacgaggtactatatacaaaacgttctatgaagaaacgcaaaaagtacaagtcagctcctgcttcctgtcgttcgtgacttcttggggaaaatatcgtctttttggaattcacagcgatggtgtcctcctggtaaaggaggggagtatagccttgctggatgatgccgtaagagtgtctccataaaatgagagctcttctgcaaaacattctaactttcagggtgcggttgtggctaagtcaactagcagatgtggttggtccacagaaaagggtcccggatctactcttggtaagcaccaaccagcgcgcggctaagcgctttgcaagatgagatatcttgtagttctgggaaactttgaagtggaaatatgtgagcaaatcatggaagaggaatactcgtctgggcgtcatttcatgtgagtggtacatgggttgcggtaggcgcataaaggtgcttaacttcatctgcagtggcaactgttcatcagcatgtgcatcaatactggggacatctgccaatcctctgaggcaggtccaggctcctatggagtccaatgtgctcttccagcaagctgcaacaacatccgcggaaaaagcctgtccgcacggaggtaactacagagaatgagtgcagcactgttagatgaacaaagtttagtcgagcagcgttcgagatcgccgtctctgaaactgctactggcgagcgtcacccaatatggattgacgcattcctgaacaaacacctgaggccgcaccaacgggagggaatatcttggatgtataaccaacttctcgagggtggtggctgcatactagcggacacaatgggtttagggaaaacacttcaggcgataagcctggtgtgggttgccgtttctcaacctgcaggactgcggccacttgcatccaaatgctgcgttgtctgtcccgccagcttggtcggcaattggacacatggtaagtgtgccatccgacatctcagcaataccaccacacatgcgctcgtcagaggtcaaaaagtggctaggaaacaggcttacgtttgtcgtcgcatcaggcgatggcaaaggtacgaaagcggttctgcagcaattcgcctccgtgagcatctgtaaactggtgatcgtttcatacgaccagctgaggtgagcccgaggacagacgtctcaatgtgggaccacatgtaaaaacagctttccgccaggaagctctgtgggactatcacatcttctcttgacattctcatatgcgacgagggacacagattgaagtcatccaagtctcaaacagcgctccatctgcaaaagatccgttgtaaacataggcttattctatcaggtaggaatcaccgtgtgttttggtgcctgaaatagcttaaccttataaaacagggactccactccaaaacgacatggtacggttgacccagggctgactgtctattcttgtgcatgactcattccgctcaaggatgagctgcacgcttgctgctcattcgttcgtccgagcgccatgccaaacaacaggatctttgcgaaggttttcaaagagcctattctcagagctggtctaccgtatgctaccatggcagagaaacaactgggtaaaactctctaggtttcgcacgtatagtcgtaaaccatggctcagacttcaggtgaaaaaagggctgaagaactcacgtctctaatggtgaaccagatatgctagcagatgacaaacatcatagaagtcgcacagtctcgattcatgttaaggaggaccgaagaggtcctgaaatcctttggtgagctgttctgctagggagatctcgagttattgagtgattcgcggataaaaacagtgccaccaaagaaaacagttgctatctacttgaatctctctaaccagcaaagattcgcatacgacactgtctgcaagtttactttgacacgtggtcgaaaagacagcgcgttcatcctagcagcgttgtctgctctacggtactcaaaaaattgccccgtgcttccgatcaggtcataaacgttctgtgtcacagcaaaatcgtgaactgcccgtatgcagttcattgtgacgaactgtgctcgaacgacggaaaatgccctgttgacgtagcctctctcgatgtgaaggacacaactcaactagacgccatcttgaagtctttcattcccacaccactgtaggttgatgaagtactttgtagtgaaatcatcatccgtatattctactccagagacgtacgaa

SEQ ID NO: 2775 - DNA, 1937 bp, Toxoplasma gondii
  source 1..1937: mol_type = genomic DNA
ctctgtcgcgggtgactcgactgtttttctctgtaactgcttctctccactctgaaggtcgagggctgtggaggttggcgccctcggaggacgtcttcttcctcaccgtgtcgctctttgctcagcacaatctgttgcccgcgtcctgttccaactgcacgcatctgagtggtgtcgcatttcttctcgcgagggaacagcagcggcgaggagcagctggaaggcgcgaggactcccggcgcggacgaagcagaggcgagggcaggaacggagggcaaggcgcgaagcaacgaacttccagggagaggaccggggggagaacgcgggagcgcggcatacgcagcagcacccgaggaatcggacagacagagacgcaaacgcatgcgagaggagagacaagaaagagcgcagcgagagagaggaaccagacaagaatgagagagagaagaacgcgggagagaagagagaagagacgtttcgacagagaggcgacgaagaagaccttcaggtttcttgtcgaagtgagaacgtggaggagctgaagagctccagaacatcgcaggtatcctcgccatgtcgtcaaaaaacagagaggcagaagaagaagcggcagaagaggcgcggcaagtccgcgagggagacagacgagacaccgcgggggttcgcccggtgggcgccgagaggcggagagaagaagctagcaaaggggagagagagaacagcgagaagacggcgaaacgccaatgtgcgagaacggggaaagtcaaaaagagaattccaggactctcctcggtgtcaggccggtgagtcggcctgcctcggagaggaagacagggagagcgacccgaggcggggaagcgagagattggagttctctagaaacgaatacgatcgtaataacagacgagcgaattccctcggctttcctggtttttaactaaccacgggggtagacgcggcgactggcaacctgccctcgttcgctgcctgccttgcatgtcgtgcttctcttccagctgcttcgacaccttgcgcgaattcatcccctctagaaagacatgagagtggaggagaaagaaacgaaagaagagaaagacgagaaagaagagaaagaagaagtgaaaggagaggggggaaagggaaagtaactcagtggaaggctcgctgcgcatagctgtccgaaagagaaaaagccgagggtgtgcatgctctgtggcatgaaagacacgtgaaacgaagattgcttcgcggattctctctttgtctctaaggtggcatccacgaaccgccttctgtcctgcttttcttttcccctttcgctccgcttctcttttactcagcctcccgtgcgtttggccgccggtgtagttacacccgacgtacgacgaggggctcgagactcattcctctcaagcgcgccgccgccgcctccggtctggctccgctgattctcctctgctctcttttgtcttggagagaaagggacgcgttcatcctcaaagcaaacgcaaagtgcgtttgaactctcccaagggagctgcaggcctcgagagaacagaggcggatcgccgtgtttcgtagctcgctacatcgaacgcgaatagcaggggcgcagaggggatcatctaccaaggccagagctgatatgcttgttccagagaacttccctttgtggaggcctcttcttgaggactgtacatcgcatctgtgcaggaaacatgctcttctctgcgatacgctggttagggtgacggcaagcaggggaaaggcgaacgtctaaggttcttctgctccccaaatcggaactccacgctcctcctacgccactcttcttctttcttctcttcttctgctctcccgctctagtccctgagaactggaacctttcgcgccgtctcgcagctcgcactcgccgcatctcctttcctcgacacaca

SEQ ID NO: 2776 - DNA, 2041 bp, Toxoplasma gondii
  source 1..2041: mol_type = genomic DNA
tacggatttctctttgcgatgccgatggcacacggtctccgctttcccctccccctccctccgttcctcttcttaaagagtatggccataacgcgtatggtgaacgcaatactttcagcttgaatcgaacagagttgcatgcttggagacggctgtgcagtacgtcactactgtttgtattcactgtaaagccttcatgggggagtggtgatggatcacggaggtgaccgataagaagcaaggcatgcgaatgaccagcgagcggtctgggactgtgaattgttgctcagctggaggaaaaggtgaaggcagcgaaaaagcataatcatcagatggaacagcagaagcacaagcttgaacgtgacatcggggaatacacccggcggctacggaacttacaaagtgacacgagtctgagaacgcaggcaaaaatcatgctctacgaacagaaagtcaggcaaatgctcaagtctctggaacacaagttccgtgaaagggaacagttggttgcatctttgaaactgagtcccgaagcgtcaatgcacattgtagagttgctccggcggagcttctgtgagaagaacgacgagatcgagactttgcgtgctgagcttcagagggtggcaaagagttacaatgatactgtcttagccatgcaaagcaggctgaaacaattggggatcaacagcgacgcttttgattttgaactggttcaggacacagatttcatttccaacgtccccgcgccgtatctcaccacgactgctcccgttgccagaggaaatccaactgtgaaaatatagagtcgtttcttactttctggaagcgagagcgtgtatgcacacggaaactgccgaagcgattttgatcagcacgtcgtgtggcctagtgcctttctgcgtgcgtgtacggctgcgtcgccttcgtgtggccaacaattttcccgtaagccatgcgacatgcaagctcaatgcacgaccacacatagcttggttattatttcgaaagggaaagaagagtcactgtttgagcgcgtgctcgtggtttgtttgcgcctcatctaccagctaatgacatgcatacaagtctaaagtagacagaaactagcgttttgcttctacaggtgtagcataaagtttcgcaaagatgtcctagacggtgccaatttgacttagtaattccttcattctgcttttgccatcagctacgaaagtagctcggacattcctcagcaaattcgagtatctcgaactttgaagacagttggtgtctccccccgccgttccctaaccacccttcgcgcaactgtagacgcgttaggcctcaaaaaaaggtcactctcgctatatcagagtgccacatttacgaagtggaaaaagaagcaattctgacctatctgagcgatctccgacgaggagagcaaaagcggctgcatcggtgaaaagcggtgtctcaaacgacctcccagccaccgtggcaagttgttgacccgaagaatgcgtcgattgtaacgccacatgcgtttcgccttccaaagcacactggacatctcaagttcgtcctatcgagtttctgcccttatgaattgactatatttgacacatggtaacgagaaactgccagtttgtgcaacaagctggttgcttgcctcacaaaaacgagcggcgttttcagtagagctgcatgcgaatgtctgacgtagagggtccggtttagcagtagtcacgagcacccccgcaaatgctaagcggaaccaccgtgaggcagggttctacggatttgagagctgcgacgccatttaccgagcattcattttcagtactctgaactccttttcccgtgagaaatccccttttgttggaagccaggttcttccttacccgtctgatttcgcgtcacgtcaagcgtgtctctataggaagcctcaaacatactgcatctcttgttacgtgggaagcttgcgggtgtttgcccaccacgcggaaactggagtgaatgctttccgccttgtctagctgttgttgacgggccgcgaaaatca

SEQ ID NO: 2777 - DNA, 4164 bp, Toxoplasma gondii
  source 1..4164: mol_type = genomic DNA
caacttactggtcctttgcgcgatgctacattgagactcagctatacgttaggagaggcgacctgagtactccgagcgggatggattctgtcaagcaagtaggccggcagtaaaccaggacagtaccacaagacaagcaattttgctgccgcctcgagggttgagaaaatcgttgggagtgctgctggcattgcgtaacacgacgatcgctacatcggtggttcaacattttgttatcgtgaatgactcgaatgcgtactaaaactgggaaaccgtacactgacagcgttttcagattgctagtcttcacagcttgttgaagtcacggtggtgtgtcatcacgggtacgcacaggaacgcatatactaaagggtttttgcaatagtgccttaatcgtcatgagcgtagtgaacttaagtttagatacaattgacttctcggtggttgttgcaaccacacgatatcgacccttaaaaactgttatttcaaacggtcgattcgaaacatagtcaggctaggaggatgcagtgagcgttattttcctacatggctgcatcgcacgcttcagtagatgggtggtaagatactgatggagcgccgtctctcgacaaggactgtgcagatacgcgggcataacacttgaaaatacacatgttaaatgccgagacacttccggattttttaagggaaaactacatggttgtcgtgacttgaaggttagggtggccttcttgtttagctctacagtgcaaagaacctactgtacagcagcaggtgctagagcatacacgatatcgacgcttttgggcgacactaaatgtctcagtatgggtcaacgatcttgggtaccacaaaacaatgggggaaagtaactcattggtcaggaattagttttttcctacaaaggaaaacgtgtgtcgtaggttcttctcatcgctgttacttgtgggtgcatgtcgatgatttgattagagcaggcttccgcacccagacagcggcgaatgaattttgtgtgaaggggtgttctcactccctagtacttgagtctcacacttgtcattgagtttcagggtgccgatgaagatgactcgtcaaccgagctgttaacagcggtctaatgacgcaacaagtgggtgatggtatggagcaagagctgcgtctgcgatctgttggtcaagagtatgctcagtcgcgctagaaatgcttccttgctccccagcaaacgcttgtttatctaaacctagaatttacattggtatactgtgcaacagagaaggtagcttcagttgttgtctgattggtattacatgccaaagcagagcgcgcacatcctttttgctggcgactagactggcaagcccacctgtgttgttccaaaaccggtgctgttaggcgtggtcgaatctagcaaggcagtgcccatggacaacatatctctccccgcctgtgtgagggtgtaccaatttgacacttcaccgcacggaagagatgtgctgcaaactgggttaaagccagtaaaaggtaccggcggtgagcgaaacttgacctcaggtacaagcacgtacaagaacctgccgtcaatgccgttgctgtgtctgctggctcatcgcttggtggatgtgtagtcggtgcaggtgtccagctgctctccggaacaacgccgagggcgaaaattcaaagcagctggccttgtagccgccgatgagagctaaacccttggtacggaaggaaaaggaaaggttagcctttattttaaacaaagcaagtaccgtagctgtaagtgaatgctaaattatagagtttatctcctttgacactgcataacgtatagatactatccatcttacggcctgtccggcaagatgaccgatcagttcttgagctttagtctttgaaatgaggtcagatcatgcgcgggatattcaaacaaagacgtgcataggggttcgtcttgtaaacaacgcagtgaactaaatagatacaagaaatttgacaagcgttggtatacttatataaaggacaaaacgacatcacgaatttagatcatttggtacataacattaaacctaatacgaaatggcagtaaaataggacaggttttccgtgtacgccatcaactacgtcaacaggggatgatccagtcgaagcagactgccaagatcgctttcacgttttcctaatatttttatcgcattccgtggaagtgtggcgttttcacacgacccaccggacatacctcgcgctttgccatattgggcgatcgctgccgaaacaggcgtccccggcgatacagcacgtatcgcagaaccccgatattctctaggtccccggctcagatgtgcatgcacggcattggttgaagctgccacgtattatgatttgagcacccttctgaatccaaatttcagttcggtcgtcgggtatttcgatgattctacggattatgtgcactggcatctaaatttcggcggcgcttcagcacctcgcaaaggtctggcgttgatcttttcgatcgccactaacttctatgcggttcccatttcttgtttgataaactgtgttagacatttcccacaccctgtctccattgtatacggggtgttgacggatcccgtgcaactgccacctgcagctgctagcccctgacgcagcatgttccctaaggaacgaggcaagtacacctccggaaagaaatgctgcaaccgcatgtgtttcgactgattggcactttctcatggggtcatagttagggcagcttgtcgaattggtatcccgatacacatgtcactgtcggtcgccccgcgtgttcgcgcagtccttgggaggtaggtggacacctccatgcagaaaaatgaggacttcttgtttccaatcgtgtagtgctcacataagcatcctcgaagagaactaggacgggataccttgagataccttgagtttctggccttgagacagaatgaagtatcattacatttttctcgtgagcaaccactttcgagccagtgaacaatacgaaactggagatgctggtagtaagtgttagggtttcacgaggtgatatgcattccttatcggtgttttatgggcgccataaaaagcatcaccgaatcattctgatgctccggaaaatatcgcacctagcagcaccaactgctgaggcgacgaagagcgttctcacgcataatgacaatggtacccggtggacccacaaactcaagcaccctccttatactgcttctcctttcaaaaagcatatcgctcctcaagctgcatgagtttagagtccggccttttcttgctctgtcacacctccaggtgtcttagttcagaacccgctgtattaacaccacctcgctagtgctccgcgacatacgctgcccgagagctcgagtgaatgagactatttgagacgaagacttgtattctgcgtcttgcgctagtcacacagtccgtcttctgcggaccacttcctgaatcaaaatgagatatcttcatcttacaacgtgagttgcttttttcaacattacattttcgcaagtaccaagcatccttgcggctctgacactgccgccagcaatcgatgcaccgtgccgtgacgcacaggaaacatcaggaagacgcaggacacgactgcaagaagccagaccctaatttttcctggttcttcgttgcattctgccgtttcctatgcaacgtacaatgctaccatcgtgttcttccttccactagggggaccactcggcttgtgtggtttctgttctgttttaaggcctagtcgttccatgagacgagtgtctagacgcgacaaggccgtccgaagtatgtggtgtttcttctcacggtctcgtcacaagcatcatctctttcgcgttcgtctctgaagatgcactcttggctcattgctgtgcattgtggaagatttgtttttcgttgtggctaaggaggttgtgcttgcggcgctggtgtatcgattcaacgatcgaaacaacagtgtgtggcttcccgttttgtgggcatattcagtggctctggtgatgacagaaaagaggtccgtaatctcctgtaaagttatgacgggccggattcttggatgtcgagctgtggatcttctgccttacccacacgacaacaaccccgccgacgagctgtgaaacttgcccatca

SEQ ID NO: 2778 - DNA, 2275 bp, Toxoplasma gondii
  source 1..2275: mol_type = genomic DNA
aatgtgttccgagcagataagaaccgaagcggaactccctgatacaaataatccggtcgcagaaacgactccgagggcctctcagtgcgagggccgttgcttactcgccattggatgagaagccgcagcagggagagaaagcagccgacaatgcctccacgaagtttctttcccgaagaactcaacttgtctttttcgtcgaactcaggagctttatcgccgtcggcggccagacccccatcgcgcatcagagggatggtcaccccccagagaatgcctaccgccaagagccctaaaatacgagcgcagaagggagataaagtgtgaacgtcgtttactggatcattgttgcaccggtcttctcccggccaccgtgttatacgtgcactaagtttagctcttggaggtccgctttaccggatctccaagacttggtgcgttgttcatgaccacagacactgggttctccccgtggcttgttcgaggtttcgggtgccgcgaaaactttccaaaagctctggtcttccccgtgaacgtcttgttccggtcgtcacaccagtggggaagcaggcgatccagtgctttctacgtccgggaaagcctctccgcttgcacgagagattcttcactagaatggcaacactagtagacacttcagtcatcttattgtcagtgctttcttaaattcccttgaaccctttgattagggtgtgcacagctctcgagataccagtgaaccgtgtaacctgagtaaatgctgaaccgcatcacgtaaggtccgaacgcatatgtggagcatctcctcggaaccgctcagatggataccagcaagtacaaccagaccgcattcggggttcagcaagtgttcaatgtatcgacagggtgaatccgcggtagaagttctacaaacgcgtcgccgggatccgccattccgcaaaaactacaaagtttcgcccgttttttaatccgatttacaggagctaaaacgacgtactcgagtcccgatagcgctgtgtctgtcactagtccagatgtgaactgacgattcaggttctctttctgcaagcagccaacatcagaacttgagagtctcacctagaatcatacttcctcgtgggcgcgtgttgtcttctggaaaggtcttgtccaggaggcgtgacctaataaaactcgaaggcttttcctgaaggacgcccttcttcatgtcacaccgtcgacgcagagagagtccagcgacaaaaacaccgagaaaaaaccattcacgtggctgtttgtgtcttgcaatcgtgtcagagctgttacccctaaaccgtaatatcgacatcaagtcgcaaagaggtgaaaaatcggggcaaacatcctccaccacagatcccagagttccttcagagcctatataagctgttcttcacgtgcatttttctgtctgggctgtacttaaaagcacgagcagcgagagaacccttccgtgccggcacattgagcagctgagcatttcctgacagcagccgagacggccgttttctcaaccatgtttaacggccacctttcgtgaggattcagacgcgagcgaggaaggaaagtgctgacaagtttctcgggttatttgtttcccaacgggtgagatgctcgcgaatttcccctgttgccctcttcagggcaggcgatttttgcatgcaccactctgaaaaaccaactcacaccccggtcctccttctccagtttctccgacgccagcggttccggtggaaagctcgcgcgtttttgtcgcgtgtcttcgttccacttcttcctgcttcgttgtctcccgcttcgaacattccttttcccgggacagcggaggaaagtcccgcgagttcagacgtctttgtcctgcagccacagagtcgtcgctgcccttctccgccttctcgtttgtgtaattggcagcgctcccgtggcaattggtggacttctacgcggcagttcttcgactttcttcgccacgtttcttctctctcagccaaaccgaaagaagttaccgctcctttgcccgtttctcgcgtttgaccgcgtgtgtcacgcgtccctccatgtgtgtgtagcgtcttgtgtctcttgtactccccccaacatcttaactcgtcgactggccacttgttcttttttcctcgggttcccccgttttgtttcactctttagcgtggagacgactccacgaggatacagtccctggcggaagagacatcccccgtttccaagctctcttccctcgtttccaagttcgcagacgcca

SEQ ID NO: 2779 - DNA, 1343 bp, Toxoplasma gondii
  source 1..1343: mol_type = genomic DNA
ccatatcggtgtggatgtgtttgtttcgcactgtcgatgatcggagatcgttcgcagctgtctcttcccgtctctccacatcatgcctctcgctgttctcattacatgctgaagtggcaacgcctggttctctcttcgtcattctatatctctattgctactctacctccctcttgccattgtcaactccttgttggtgtcgctctctggagaattggaatctggtcgaacaacggttcctggtgtagttaaagcgggaatgctggaatcatcagtcggtttttgactgatttcaagggtcaagactcacggatctattgagacgtttatacttaatgcaagtacacacacagttctccagtctcatcagctttcgccatgcaaacagcccgggaaaggccagccacggtcaggatcacatctaggaatatacatgtatgcagacacggtcgttgttctccactcagagaggcataacgtgtttttcggctagctatacaatggtcttacgtatttattcatttgcacataggtattaaagcttcgtcctttcagttgatgcacatgtccttgattctctccagatgcttttccgcgtatttctgccactttgctcctctttcgtcgattcacgcaacggccttcacgacgtttggaagaaaaccttcttaggacgcacgccgtgcctttttgaagtgatgactctggccctctcctttttcccctcccagtatactcacaacgtcttctcccctgaccatcgaacggtgacacacgcgaagcgggagatgctggctttttttctgccttttcagaagaaggctgtctgcatcccggcaagggtgtgtacacgtctggtacgcgcccatcccttttctttgattttcacactgagtttcttgatgttgtagacggaatagaagcggctgttgaagcagctgtaacataataggaagcagcacccgtactggggagaaactgggcgccgccagtaccgtagtagaagttctgcattacgccggcggctgacgggtcccagtaagaatatgcctcatacccgttctgaggcggttgttgaagactcatttgctgatacgcagaggcctacacggaaccgacagagagcagagaacagaaaaaagcaagagacaaagacagggaacttttgcttgaaaatggcaaagaacacacacacacacacacacacgcattggtgtgcgcatgcacatatttgtgacgaagaactggcaatcggaatggaaatcagatacaacaggaaagagctgcgtgactgaagaggcttctctcttcatggcatcccaacagtgaagaaagaagggaca

SEQ ID NO: 2780 - DNA, 3686 bp, Toxoplasma gondii
  source 1..3686: mol_type = genomic DNA
aacgaaactaaacacgtcaataggtttcttggctgacgaaaggcgtatcaacgtcgccttaacaaggggacggacaaatctatggtaagggggcgcgggaggccactgctgccagcagctaaaaacgtgcatggtttaacgctaaacctgcattgggttcgacccgttcgaactgcgttgaactcactgatcctttcaatatcagaaacaatttcgcttgtggtgtgctaaagggtagttcagccgtcgttcatccataccccagtctgatagcaacaggcatcaaacaatcggcacggcggcagtggggatttctggagatggtcatgcaaggattcaacagtgatactaacgccagggcacacggagagtgtcggcttatcaaagtagcaaactgtgtcgagtgaaacttgttcttacaggatcgtaggcaacgggcgctttttgatgagcaaccaccattggcggtgcctgtggaagtacacgaaggagctgggcaccttgatttccattgaagaaaaattcatgaagacagagcttctgcttgccaagtggctactaaagttcaccaataagcacccggtgaggatttctgcaccactggaaagatatttccggggggctagtgcctgacactgactggtgtagtcccgcgtttgtgccaagggtacaaaccgctcgtggcaggccagatgtgattggctatcccccgtctcatctgaatgtgccggttgaaaacgctacttttgtgttgcagccggagaaaagcatgctggacgaacaggtgccgtctttcttaccggctctggagaaggacgtcaaggagtgcgcggcagccagaaaggcaagaaaagtttccaccgaggatgtggctatagtctctccagggaaagagtgaccaacttcgcttcaaagctctctaaaagcagttttagtttttattgcgtgtggcgaacaatccaacgtaaaaggcttgtcgaagcgttgcaagttcgtggtgttgtgtctcttccctctccacgcttgccattcaccgtttaccgatcggaaagagcaaaggaccatgaagtgacagtcctccgagcaatcttacctgttgaaagaggggagaaatccgagatcgggccttgttatgggcacattacaattggcggttccattctgacatccgactactcatcatgagctgtctggtagcagaaacactttttgtgggcaggcacgtaactgaaagcgttaactgcttgtgaaagtctttgttgcgctgatactgtcagaaatccaccttgagtaaccttgaggaaatatagccctgtatcatatcgtttcctgccccgctcaaagcctttcactgtgcaaggaacactactacctgcttgcaataaaatggtaggtaaccgcagtgccttccgtatactgacgtcccaacagttgtagtgtccaaatattaagcattttttaccgttccgccgaccctgccaagggacttccgacgtgctgcattcccgtaaacgcgcctcacacgggctcggtaacatggctggcaaaacgcggaatccgactggacagtttggggctaacatcattgcgcaacgctttagcagagaatcgtattcagctgccgcatgtgcgtcaagaaccaggttactcagtaccatcaaaatgcaaacatgctccacctgtgcaactagaacaatcaaaccgaagtcactggtgggaatcggctctccccgttgtacgcacttgattaacacattcagtcggtacgcatgaaaatggggtagcatggagagggatgggcgtgagaagcacttgtctgccataacagtggaacgacttgttcactttagaggattcaacatagataaaggcggcctctaatggaacgcactaatacccagcgagtgactcagcagactatcgtattaccgggatgctgagggacacttcgacgtggtgataaccgatttctccgtttcgaaaatatgctgacaaaccttgtgatgatcgaaacacgagtttgctgctttggcacgaaaaaacgttgattcgtcacagcactgctgtgtgcatccccccccgtttctgtcaacaaaatgttactgcaaaactggttagatatctcaaaaccagtcttcttgcggaacagttgccctcagtcgatggcagataaacctctgacggattctggattcagctacgagaaaatcaagaaagtgtggcacccgtttttgaatttcttccgttcgtctgcgagactcggagagacacagatctgtgcagaccgtgtccgcatgggctcggattaagaagttgcgcggacccctaagggggagttggttgtgctcatgatgttttttctcttctcttttacatggaatacttggcttctttgcaaaagactgacctcctctgcagtcacagagaggttcagaggccggtgcggcctctactgtgctagacttctgggaatccgttggggtcgaccagaagcacaactaaccaagtaagcgagggccatgtttagtcgcatgcagaaggttagccgttccgcagtcaaacggcggtccagccgctccgtgagatacatcctgcacacactcccacaaggttgtgaggagcgcgagcggccctctttcacccggaacacatttaccctgtttacttggctgtttggcaaaacacaggaattcacggatatctttaacaaatcggagttttcgttctgacaaacccgtctgtggggtccgtgctcgagacgtgtcagagaggtcgcgtgtcgccgcgcgcgttgtctattggtcgatgcgggaaggggggctcgtgtgattccccccgaaaacggcgaagatatcagtcgatgcgttcttcccaaacggaaatatctgtttccagcccgtttgaaaaaaaatgctgtcgcaagcctgtctgcgttgagggtcgagtcggcactccccttccatctgacgtatatttcgcctggagcaaccaagttcggggcctcgttgcgctttccaacgttgcgcaaacgcatcgggcacccggaccgcctcccttcccctcccaaagcggattcaccgcgctaaacaagcagaggaccctggcgatgcggagacacgttgcgcggggcgtccgcaacgctgctgttctgaggttcccgttacggaggaatccggagctctgcttcaactgtttttccatgaaattctcgtcacacctttttgctccctccgagtgaacgtgcagcctgaacacgctgtgtttgacgtctcaacttcgaagttgccacgacttcgtcgccaccgtccgaggcgtggcaaatctgctcaacgtgggccggaaccctgtaggcgtttgcccgtgcacgtcgcaggaagccgagagtgtgacaagtttttcagcttcgtcggctgatttgtttgcgtctgctaagccggaacggtaaatgagttagtccccttacaagaaagtgaatgcccaactttcgccgtctgctactgtcccgggggtctccgtgcgtctcccgtcttcagatgaaccagagagcccatacgtcgagtgctgcgccacactcgtgcgttggcgccggtgcacgcgctctacctgtctaaccatccgtgtatattggttgcagcaggcaagcacttgacagggaaaaaagaaacgtatatccttcggaaacccca

SEQ ID NO: 2781 - DNA, 3896 bp, Toxoplasma gondii
  source 1..3896: mol_type = genomic DNA
cagtttacagaacagagttacgcttagctttcaagcagatcagaaatcgtctcaaaacagtttctggctacgaaattgcaccgcaacgacacacaaggtggaagcgaggtgtcggtgccacttgtcgatccctatacaattcctgtcgacacaattttgaggtccggatgatgcctctgccgaacttcacagaaggaaccagccgagctgcctcacctgcgctgtacgcacaccctgctccgcagacgaagaagaagaggcgaggccgacggcgaaagagagcgaggcgccaagggagcagcaggcgcccgcgcggcatgagcgccatgtggacgcgtgttaaaggacattagagccgcgcacccatggatccagattagagaaacacacagaaaaaacgcgtgagtcggcaaagaggccctgtgaagtgcggagatgggaaaagagctctcaagaaggctgctgtctgccactgcagccgcacacgaagacggcgggtttggagctacggatgaaagacagagaaacgcgcaagttcacgttcgcgtaacggaacaggagaagcgaaacgcggattgctgtcctatgggctacgcatttgtggaccacacgaggacggcggagatgacacagtcttcatgggagtcttcgacgaggaatggcaactctagtcaccaagcttcagcttgtcgggatgctcacaacgggataggtggcaggaaaagttcggaccgcttcgtgtggaaacaccgtgggcaggtcccgaagtggcacatccatcggagcacatcaaacacgagaggtaagcagacgttcaatatgacaacggtttcaggctgcacgaaacttggagtctggaaatgaactgaagaacactctgtctttcaatgcacagcgcaacaaaaaaagctgacggtgtggacggaggcttttgagtttcgaaaagcgttgggagcgcagggggctccgcctgtacactggagtcgatcttctgaacgggagtttgacctggggaagaatcggaaattgaaaagacgacctctcgaaaaagctgtccatgcagtacgaacagcaaccaggaaggtgaaagaacaattcatgggttgatttttgtgacctgcacaagactcggggaagtgtcgcgttgcgtatagtggtcagctcgatttttaaagcaaggaggcagaaacactgacacaggaaagcaagaacagccggaagttccaccgtacgaatgtcgccatgacagtgaagcatcaagcaaaaaagggaaaaaaccgactcgaaagtcgagcgatcgcaagcgttgaaatttgaccgggtttcccccgggtgcgcgagagaaacatcgcgaacagggcggtatgccgcgatccttcttcccatgcgaatagcggtactgaggcgggggaaacagctggcaagaagggaaatccagcgcacagaagaaaccaaacgaccaaaaacaaaaggtaacctcggaacatgttcctcgacgagataggcagcgggaaggaatccagtatctcgctcaggtcaccctccggttgctcccgctgacataaaagacacctaggcagacttttacacgcctcagtctcacgaagaggatatgaggcgtcagaggagtgaaacgaaactagcggactctcccctcccctggaggtggcaacataaatgagttcggggagcagcagcacatgtttgaaagaagagtgagcattaatctttttccgtgacgacattttttccaagagagccagctgcaagcacaacacgaatttcaggtcgattcagctgtggtggcgcgctctaatgatgcagaagaatacgcggtagttttatttaaaaaaagataagcggttgcaaatgttaagaagcctttagtatcgaaacaaactgaaccagcaaagccagtgggttggcgaagtgattacgtcacagactgcagtcagtcgcgtggtggtggcctgtacacgtttgtcaattcttctttctttgacttttccaagtatgcttttctcgctgcagagcaaatacaattattccagccgcccgtccgtcgcttctctagtgccgagccgctgccttccacgcacacgtactaccacgggtacaaccatttttctaaggagctcatttcataaatacagtcagtggatgatttaccaattttcacggggacgcatacgggagtaccttcgctccccatggtctgttgccagttgacatggcaatgtatccattgtaaagcgtaaacatattgcactttattcttttatgttttcatactcatcaaataggtttaatatgctaaacgtttttgagaagtatgtttcatgatcgcacttcctcaccccatctgatattgcgcgtgacggctgtcctgtaacagcgtcgtaagcgcagttggtatcggtcctttggtggtacctaaatcttccccgtgaatcaccatgtttcactggccccttagcagggtgtcaaaaagtagaatttggatttgatattgacgtgcacatcttagaactggatatgcacaaccacgaacatttgcgtctgtcacgtaaaaataacactggacctttgagaagacgacgacgcaacttcgccagcaacaaagacgatggaggtttgcttcgcagtgctcaagagtagaagaggcgcacttgtgaagggatgaacctgagtgtgtctctgctccatacgcgatgtatcccgttaacgaaggttaactcttggaaggctccgaagtgagtacggcttttatttgtctactgaacgctggagaaccggcgatacgagcaagtcaggtgatgtgtgcattttatgtcgacggcttgaagaagttgtcctttatctaccgcaggcgcgagccttgcgctcgccgttaaggttgcgtagaagttgttactgtacacttcatgacgacgcagccgagactatagtgatgtaatgcatactgcagcagtgcgaaagacttcataaaccacactttatcaaaacgcgaatactcctttcaaacacaggaacatcgacaagacaatgaaagcgtatgatcagtcaaagaaaggagtatcttgtgtcatccctcaatgcaggggctaagggaagaatgaagaaaggagagattcccatacgcagtgccttcggcagtagcaaaagcacagacaatgagtgtggttgctaaagacagacgcggtgctgccagtagggacgtcgtgggtgacccggcagctctgcgctgctgtacagctgcattcgtctctgcacatcacgagaagtacgttgaatccgcacatacactcaagaggcccaagataacccaccaagttgaccactcgccggagtagtgtcatacacggtcagccctgtcaccagaatgttcaaaatactagttcgcgatgcgaatgaaatttgaatggtgtcaatatggattttttccattcatcagaggccacattcaccagtataaattatacgtagcttctcgagcgttgcttaagtcgacgtcgttccgagatttgctgtaaaagcctatgttgtcccttcgagcgttgttataaaggcccgtgtcctcacttcaagtgtcgctgtaaaaccggatatcttcccacgattttcactgagtaacgaaagactgcatcgaagttgttcggtcagttgcacaaagtgtatttacaataactgtcgtttccaatccgcactgtgaatgcactcgagcggtctaagtggctggcaagaacagcgtccaacagtatgttgaaagaggggagcttcgatagatcgtaacataattttctcgtgcacgaggtgtattagtgtattaaccctgtcaatcaaacaagttggttggtgtcagcgtgcaaatgcgtgtggtggccagaccgacggaa

SEQ ID NO: 2782 - DNA, 2013 bp, Toxoplasma gondii
  source 1..2013: mol_type = genomic DNA
ctctgaatccactcaggaaaagtagtccagagggctcatttgcggtgccggatccccgcgtcttttgtagagtcagctgctagccacattgccgccccccaggcttcccttccagcaccggcagactcactttcgtgagtcgaacaatgtgtcgcgctaccgttttccacatgatatccgcgccgttcaaattcaactctcggcatgagacagcaagggcctggagctgagcaggagacaggtctttggcatttgcgtggatgtcgcgcaggagacggaggaatctctcatccaggctcagttggctgaacgtcatgctggtttgagcgagctcttggaggtgaaacaccttgagtgacagcttcgtgtcgtcgtcgtattgttggacagcatgcaaagtcatcagcaccttcttctcctcttcgcgagacgcaaagggtactgtgaatggcggacagattcgcgcgtacgctccgggggtggacgccgacgctggcgaaaacagtggcgttcgcagctgcgaataggaccgcgtcctcacagcagcgtagcgcgagggaaggcaggctgaggagtcagtacactccggcgtcaacgactggccggcaccgccagccacacacgatggtctactctctaaatggcttttccatctttcgagtctgtgtgcgggtcctgttgtctgagctgacgaagaacacggccgtgggggcagatgtggagatgcgctgcaaccaagtctacgagttcgagagacgacgagggaatcccgacgactcacaatcgcggtcggctgctgctcaccactctctgcagctcttgcagcttcggactgcgttcgaagaaactggactcggcggcgcatcagcgtttcccgcatcgagagagcgtcgcgagtcagctcaggcgaaagaggccctcgaccccgacagcccgagaggaagcattccttcgagcaccctttcaagttcaccattctggaagagaaggaaaacaaaggggacgcgcttcccccgaagcctacacaggcaacgaccatccacaataaagtcggacgaccagaaccaaaggaggaagtcggggaaagcacctgtcagaacagggaagggactgtacggagcatttttcaaaagaaaagaaggcgtttttcgtcgtgttgcgtcgaaaggaacggctagttctcttgcgtgccacaaacgcaagagatgctcgccactgtcgctgcgattcgattactttgcattgtttttcggcagcacaaggaatggcgcggcggcagctgctcgaaagatatttcctgagaactaagcggagtttgaatctctaggaaatcaacggtatgcgtccatcgtggagagtttcactggctgcgatggggctgtcgattcaaagcgcatgcacaaaaaagttgagaaactcactccgcttggccgccacgcctgtcgagtggcaacgacgtcgattcatccgactttttgcctcgcaatcgtgcagctaggcttccgcgttcccaattttttctcactctacaacgacataatccatgtggctcgggctgaaggaaacggaggtttccagggaacgcagccaacagttaaagcagcggtatagcgatcagcgaagggctcccgcctcgcctttgtgtgtcttgtaacccagacacgacatgcgattttcggtaaatgccgcctagttgtgagcgacctttgcggttatagatcacccctgggttgaaacactctttgttgtctatcctgttgtccacacgaacgaaactggccagttagaaacaatcgactgattccgagttcggtgttctccccttacgctgcccttctcagagagttgccgctcaccttgaaaggcgcattcgagatttctgcggagagtcacatgtcacgtgtggacagtgtcgcttctttttggaaaatggaagcttcgtgcgattcttggtggagacgtggtatgcatcaaagaaggcgaaggacggcgtgcgagagggttacttgttga

SEQ ID NO: 2783 - DNA, 1294 bp, Toxoplasma gondii
  source 1..1294: mol_type = genomic DNA
agactccgcggtgccttgtaggttggatgcgtgcagatgacatctggggtcggtgtggtcgtaccgatggcaccacacgcctgtggtgatctacccaggctttcagcaaaagattcgcgtagcttttcggatgctgttcctttgggtttttgtgactcttgtgtagggacgacgccgaccacaattcggcgatcaaacggaacttcgccaccatgctacaagtctgtatcgccatttacacacacaggctgaaataaatcaaagccgaatcaacaacctacagtcaaaaatgaagatcttgtacatgcagacaaagtcggagatgatgaaacaccaacaggacccaagagtgggtttgtgaattcacaaaccaaaaccgtaatagattgtttttaacaggcctcacgctacccttctgcagagggagcgagggagctccagtgggttgcatcagtcactttttgtagtagtagagagtttttacaagccaacatcgaacattcagtcctccttcccccccaactgttgttccaaggagcaacgttgagtgggagcagcgttgagtgggagcaccgtttattgtgtgcaccgctccgaacatcggtgacgcgtgcggcaaaggtgtggaacgaaaagcggtcacaaacagatacagtcgggcaggtcaacccacgagatttggcagtaaactgtttgggagtgttggtttggaaatacgggcagtccctttattttgcgtgtgcagagctggactgctggttttgtatttcacttgttcgccctaagcccattacttttctgtacaggagaattactggtggaacccgcaaatatattttgggctggtgaaagcgtcgagtgcgaacagccaaacataaaagatacaatgcacactatcgcttctctgttgcacagatcatggcggtgtggggcgccggaaatgagacacgaaacagcggctccattctctgttcgacacaactcaaaggctctcgtatgatgtagattaatagtgctgcagacactacgagcaatgctaacccgtttccatcggggtatctgtgacaacagttatgtgtatactacgcctagaaagcaacccatgtggagcaaccgtagtgctgtaggatgctgaaatccgacacttttaggacctaccggtacgcctccgcgcacgttccctccccccaaatggtagaaattaacttcctgtcggaaataccgtcagctgtgggtctgcatacactacaaaccaggacatcttcaggaacggacgataactgcaacacttgta

SEQ ID NO: 2784 - DNA, 3193 bp, Toxoplasma gondii
  source 1..3193: mol_type = genomic DNA
gtgaggatccacgtactgtagcagaataacattagcatcgccgatgctggaggaaaatacctcttgaccagcgctataactcaagagctgattaagaaatttatgccttccatcttttccatatatatatctatctacatcaatacgaattccaaatatatctatacacatacacatacatacacttaccccccatgcaaatatgcacgcgtacacaaatacggatttcccaacaggcacataaatttacatgaatacgcagctctaatgtctacaaaaatgccgaatttcgtatctattggtcagtacacgcatgtgtgtacatctgaacaatctgcaggaatgggaagccatttgcgcgtttgaagatttctctggcagaaagcccagactctttcacgtactttggagagggctggacgttcgtagggcagcacaccctcggcagagaccatgaggaagcggatttttctgccttgttcttgctgcgtcaatttcggcagactcctagcgcgtgagctcagcgtcctgtgagatgccggagggtagggtgcgacccgtacagcggtttccttgtgtgcacctggcatattcgtaccgcctttcttcgtttttctcccaggtcctgtgggctctgttggcggcctctcagctccccatgtgtgtgactttgcctctgattccccgacttccattttagctcgatcacaagtgccttctgtggttttgtcaagggacagggagcctatgttctgggattctggatccccgggagcccccatagagcaactggcctcgggagacacgttaccaagggcatttttataaaagccaccggccatgtcctctccagagatcgtcgttccgcttttttcacctgattgtagcgggagaggctcagcaaaataatggaaaaagtaccctgcagcgacacccccgccaacgaccaggtactggacttggaccgagtctccttcggggggaagcaactgccgctctagagcctcttccccgttcaaagttccagaaagagagaccattttggcgggcgagacgctcatccagagaaaaagaaggaaaatggggacgcgttgacagagcgggacagaaaaagccgcttgtgcacgacggcagcgaggcacaggtgaacgggttcgttgatgaaccccgacagaatccagcgcggaaaaaggggaaacccagggtggaaactcagaagcagtcgtggaagagaaaattcggtctatcattccaaaaagaggggagaaaaaagggtcgttttctgtcaaacaagtcggggggttcgactcgctgtcgtgccactggtagtgtccggatagagtgagttgcgagttgcggaagcagggaaacgcgaaacaagtgaccacgcagacacatgtaagttggaaagttagaaaaatcgggctttgtagagaaaagtaaagagcgtttcgtcaccggacaaaggaatgagaccgtaacaatgggtcggatatatcggcagcggttggcaggcttgaacccggtagcacggagtacccggacttgagtcggaacgttcacgagtgtcgaaggagtgttgtgtacatgttggaaagtcccttcagacccggaaaatagaagtccttcgcacactataaacacgataagctttttatagatcttgaaagtgccaatggcgtttatcgatgccagtcaagtttccgcgtggcactcaagacaagcggactcagcatatccgagttcataggccgcgtaaaacgcacccctgttctccgagaaacatgcaatttttagaagtgagaaaacgttttccgtgaaccacgcaagagaaagcaacacctttagatcttcccatgcttttccggtcgcttcccgcctcgcgagtggcaacaaaggcgttgtgtgtgtgtgtgtctcgaagagtgttttcggtcccttgcacgaatataagccgacgtgacctagcagcaagccaaccgagaatgtgagttcttctgtcctggaaagcgtggcaggcgtgtagaaaaagtggatctggagtctgtacagagtctgcatcgcggatttgctgataggttctttgttggctcatcgttgtctcgcacaccgaaaggcataattgcctctctccaaggggaacatcatgcccctttgcggagaaaagaggtgtcggctgttttcgcctttctcctgcatgtctctcgacagtaagacaacactcgaggagacctgcaaagaaggccttttccttgaagcacagagaatccttgttgagtgcgttcattaaaagaaatttcggcttcgatcgtggtaccgcaaaccctctctccagcacgaaggctacgacctctcgtcacctctcagaatcgagagtgtatagacatcttcgacactaccggaagtccgaccaacttttccctttcactattgtctccggtgcttcttcctggtcctcattcggtttctcgtgttcctgtgtcagactcgtcgttgacgaccgtcttaatccagtttcttgtgcaggcggccaggtcacttctgcctgtttttccgactacttctttccacgacccttttagactttgagtctacttttcactctacatatgaggattttatcgcaccgaaacacacaaccttcgtgctccaatttcgcctcttccgtggcgcctctgctgaagccatcgatcgggctgccaaccttccgtattgtcttctttccacgttttcgctttgacgacacagaacaaattctcccacgcaaggaattttgtttcccttcgtcctttttcttctagagaaacagtgctctctgctcgccaaggtggtgtgctttttcccctacttatcagcgaagcctgtcccgaactcgagccgcgttctgacacgacctgacctcaaacggcgttttctagagtagaattttggtattttctgcgtttttcgcccctaactttcgaggctgaatccacaacctgcgacgttcttcctccccacatcgagagaacagcttctggtacgcgaagaaaaaccgagaactccgagaaagtcccgagacgcttcgaatcgcctggtcgcgtggatgaggtgtacttacagctcgggacactgaagaggatgaagcgaaggaggcggcggaaggggaaaacattgtgaggttgctttttcccctccttaccccgcttcaaga

SEQ ID NO: 2785 - DNA, 2346 bp, Toxoplasma gondii
  source 1..2346: mol_type = genomic DNA
tccacatgtttagagtttgtcagcagaagctgggttccaactttaacgcttcgttttcctatggcgcgacggtaaacaagacctacgctgccaccggaggcgccactgtgccttcaacttaccatatgcgattgacagaaggtaggtgaaaaagacaagagaggacttgatgagagtaagcgtgctgatgggaatcaaatgatacgagaagttagttagcgcaacgtcggctgccgctagaatggccatcggtgcgaccacagaaaggagcgccgacagaggtaaagaaggcatgggtggaagaagactaggaaaggcgcaaaagcagaggcgcagaatgagcgaggtgaacgagaagtgaaggaaggtgacggataaaggaagcggcatctgcagagtatcgaacatgaatttatttgccgccgtgaggatcaggctggaagtataccacacgcaaacggtaaaactgatgcataccatatgcatgcaagatactctgtctatggcacgacttccccccgttttggtaacatttcgtgccgtggctcgccctcggctatcttccactccgctcaattcaaggacaggcagtcgatgagcaattcgggcggccgatagcgggaggaaggttcggtgacctcgagagcctttaaggagtcccattttgccagacaggactgtctaccaacgtttctcctgagtttacacgatcacatgtcatgctgaaagtccgatcctaactgtaaaaagagtatgatcttgcggacctgagaactgcgcttccccctaacgggcaaaacgtgtcaggctcaggtttccgcgtagagaggaaactatgcgtttggcctgccatttctccatccggatccggcaggccgcaacatacacgggcgaatatgctacagcctttttcattcccagcctagacagggagccggccgtagcaaacgcgtcgacctatcgcagggtcactcgtcgaatccgaaagcgtaatagcgcttgaagatgaaagcagcgaacacgaaaaacctcatgtaattggaactgtacaaaacacggttgtatctgtagtaagacagagagccgatgtcgacgtccagctttgcagttcgctggctcggcacaaaggaaggcctggagcagctcataccaaaagcagaagagcagtgcgcacagaattgcgaacacgcgcagttgcaagactgattgtcacgcggccgatacacaggaaaatgatattggatatttccgaagagacgcactacgcactgatttcattcagcttatccttttacctaatggctacgctgcttgcctggccacatcgttggatgacatgaagtggctccgcgcatgcgaccttccccgtcagcttacaccagcgtgccggaacggcccgtcaatttcgctttttcatggaatgagaatacccatcatagaatattgttcttttcgaatgccgcacagtgcgcgggctaatcagtcattcaaagtggttgcgtggtcgtgttctaccttgcatgcctatccgtgattgtctgcggtagcgagaaattcagttttggtgtgcctgttgcaaacgcgtgcagtagtggcgggaatctcgaaccacagtctcgacaaggctatttcttgttaatgggttagaagtgtatttagtccctgactggttttcctgacgttgtaaagcttcaaaaatctgtctttgtgctttagattgtgtccgatggaccgttctagtgcgacacctcaggcgcttgtgcgcatgtaacaggcgatctcggcaattccggccaccgtttcacgtttctgaattatctgcttctctgcttcttctttcgtgcatgcctttcaaaggaaccccctaaatgaagtgccacggagggcgtacgcttcggtatgagctaggacgtcgtgtggccacagtaccttaaccaaatttcctgtgttctcatggagctttttcctgtctgtgcttgattttttatcgcacttcaacagagtgccggtgtctccttctcttcactacattcgcctctgagtccagcaacaagaactgccttacggcgttcgacaccgccgctgtggcactgcttcctcttcatgacgccgactgtaatgtgaggctgatgccagccacctgaacatttctcttttctggctacgttctagcgtggtgactgaaagcaatttacacgtctcctcgtacagcgtgcgcccccattgcaagtgggcatccatagcacgactccgccgccggtggtccgaaagagcccgacattcaaacagcagtcttcagttcaggagccggcgcggtccgcacatgaaagccggcagcttctgcta

SEQ ID NO: 2786 - DNA, 3923 bp, Toxoplasma gondii
  source 1..3923: mol_type = genomic DNA
tttccttttgagcctcttctccgctcttccaaactgcgagcaacaggctgcgaggaacgctggggaagcgcgctgtcttgctcagtggagtcctcatccctgttctccccccttcgctctctctcgttctcccccttcgtctctctctcgttctccgttcccctggtctgcgatgtcacagaggctgcgagaggcgtatgcttggaagaaggctttacatcgggatctgagtctccagaaaagagcgaagccacagtagactccgcgaaaccttggaattctgctccttcgctcaggtgtagctccagcgcgatgtcttgagagctttggagagacaggaaggcttcgagtgtcacacacggattctcgactgttccttcctccacttcgcttccctccacgttttccacctggtccgccccgcgtctctcagacgcttgtttttcatgttttggcgacttcgcccacctggcgtctcctcctgcttctccctgtctctccggacggagcgcgagccaagtgacaggcacatcgtctggcagcaggtagcagccgttctgcgcgctggggaacgggcgcccggttcgggtgtatatacaccgcgcgcggaggagtgcaatgtactcgcgggaagcctcgccgaggctgctgcaggcctgctcgctcggcagactctgcagaaggttgatttccttcaacaccgccgcccagcaactcttgagcgcgccgcttctgctcccgcccaatatctcctctgcatctttccagagagcctcgaactctgcgcggcccttcgcagcagccgccggtggaagaacgggagcggctgcgagaggcgcagcaaaagacggaggagcagagccttgagccgaaggcgagaaagcagagaaagacgacgaaacacggaaggaagacgaaggagaggaggaagcggcggaagaggcgaaaggagagccagagatggccgaaaaggaagcgtcggaaatcgtgcgcttcagagatggagaagaagggaaggaagcggcgagagcaagcaagggcgcgcagaccaagagggagagacaggcgcgacgacagaggcaaggccggaggattggagaagaccgggaaagcgcaggtcgtgtcagaggagaaggcgaggtccccaggaatagcagatgtgacagcagtggaaagagagtgagagagaaagcgagacgagaacgagaagctgccattctcgcagagagcgtggcacatcgttacttcgaggggaaagtcgaagacgtttttcctttaaaccagaaagctgcgtgcttttcatgttgtccagtaatcttacatgaagtgtatgcatgtgccgtggatacgaatcggtgtctgatttcctctgttgtgtgtcagtgtcggtctctgccttcctccatctaagagaggacactgcggcctcacgtctggtacggctgtcacgacatctcccggctatccttcgctctgacttccttcccgtccattttcgtctttcgcgaatgcgctgctttccagcgtccggttccccgaccttctttttccctcttttcctggccccctgtctctttccattcattacacacagtgagaagagtcgcgggttgtgttctgagcgttgcagtgcggtgagcatgcgcgcgagctagagaaaattcagagactctcgagcggcaggcgaggccttctgctgtcgagccaccgcagtgcagagaggcgaggaagggcgccggcctcgaacggaggatgcaacaacttgtttgcggcagtccccgttgggtggaaggtcgtttttccaggaagcaacgcgtccgcctgtttgccccagggccagtagtgaactccggtggtgtggtcctaagtgcggagcgaacgagaaagctacaaggaactttgacaagcaggacgagatttatgtaaacgacagagaggacgaagagaatgtgacagacacgcaggaagagagtctagcggagcttaacaactagcgggaagagcaagagcgggcaggggaaaacgcagaaaccaggggcatctccagactctccgggagccccaagggaagcggaaactcgagacctgtctgcaagagagcgagaaaaaatttataagatatagaaccttggaagcgagaacaacggggtagggacaggagacacgtggtgcttgttcgtcggtcagagaaagaatgacttgcaaagagggaagcgaagggtctgcgaaaaaaagaagcggcacggacttttgactttcaccctgacactgcgagaatccgcaagttctgattttcctttgttctttctccaacagactaccaaaagtgtttctccgttcgcgcagaaaagcctggagacaaacttggaaacaggaaacaatttccagctttcttccttgtcacttgctgtctcaacttacgccctcctgcattccgaccaccacgactctccccgcgggcagagaggcgccgcatgaaaaaaaccatttcttctgcgagaggaagaaggctttcaccgcagagagtcacgaagacacttgtggacatctaaagcctatctttgcgctgtttcgaggtgaatctgtttgagtgtggcagtacaaacgttttaacttgacgctgctctcactcgtgtgtctgtgcacacctagacaagatgcttcttccgcgaacacgaggatgggtgtcgggaaatagttgattcaattctcataagccacaccgtgtatgcagcgcaaacgcgtttccgtctactactgggacgtctgtaacaaagggctctctcttcagattaaccggcaacacaccttgaccgagcttcagcactgccgctggatcgtgtcgcctcgcgcaggcggtccttcctttggtcacttgcgaaggagggcaaagccgcgtcaggaactttttctcgaattagcatccaacagacgtttttctcttttctctttgcgtgaatgcttggttccacaatacacaccagagcgactagaaacgcgacgaaaacgcgtcgccggaaacggcgagacaagcgaacgccgcgtcgagtggaccggggccgtgcctgcaatcctgaaatccgctgttctcggggagctgcacgcgggaaagaattttctcgcttcaccagttgagagagattcccacttgcttcacaaatgccgggaaagaagtgaaaaatccaccgtggagacggagtgagtcggcccgtgtgtgcctgtggctcacactggggcgggtgtgcggaggggaagtgtgtgaacccacgcggcgtgcaaatacacacttgagaaatcgagcgtgtcggcgactccggagcttcctcaaaaccggagggaagacactgaaaagggggtccccttcttcgctttttcggtgatttccttcttccttctgtcttctttcgctggcgttcctcgaaagttttgagggagctccgcgtccgtttcgccgcacacccagccacctgtgctgcgctcttctcttcggccgtgctgtcgcgaggtctcgaggagaccttgccgggtgtacatacaccgcagaaacgcaccgaaaagctcgcaaacgggaacgtgtgtgactttcgagagaagtgacgaaagaactttcgttttttcgagagttccacatcctctttttctccagcggtttctccaccgtcgtgtctttgggatctccccgacactcagcgtccactgtttcgtcgtttcacgtgcgttttgcttgctccggcctcccgtctcctccctttgtcactcagcctctctagccttcttccgcttctcaactccctccactctgtccacgctcgttctcctcccgatttgccgcctttgtattcttccccttcgctcctgtttgctcaatcgttctcgcctctcttccagccttttgctgctgcgtccctggttcgtcggcgcca

SEQ ID NO: 2787 - DNA, 1174 bp, Toxoplasma gondii
  source 1..1174: mol_type = genomic DNA
tgctgcgcgtctactgttttgtttcatgtatttaagaccgtgttcatccaggtgctgccaattggaagatttaacattttttgccgtggttcgtttgagagtcttcaggtggcacgatattccgtgggtggagctctcgaggcacgagaaacttccgtatctgacaccgaatttgtttagtttctggtggattggctttttggggtggggaactccggtcgcgttcaccgggatttcatgcagtggaaactgaatcagcagcggttgggctcatctttgaacttgcgcgagttgtgtaacgttcgaataccgaagaaacctccgtgcgtactgatgatcttcggagagcctgataactgtcttgggccaacagcactgtactgttacgtattctgagtctcatgtcaaggacttccctggttttgaagacttgtgctaaaattttctttcttccccagacgtaacggcacgcacgtcttcttctcggcccgctgtgctggtagccactatgagagtcgcctcaactgtcattaagacgttcatctcataaactcttgtcccgaaggatcgaatatcgctccatagcgcatactctaggccacctcagggaagcacagtagcaatgacgaaaatgaacggatttcaagtccctcaccgcacaatagtccataaattcgagctgtacgtactgccggaatatggtgagccacaaggtagtcaattcattgctgagtttttggctgtggcaacactagggggtcacatgtccagacatctttggcctaatggtgttgcaataaggaaggcagtggtatggattcattccaggagaacagttggaccagaaatcggtttttttcgctcagcagacttctatttggtgcttgagttaacgatgcaactccgcgttgcaggcgcagcctgttttctaggtattgcgctttctgctcagatgtctgcaagcgcaaacgttggaggttccacgatttacgaggaacgacaatttgacgcacgacccgtcttctactatggatatataaataatgaccactacgagcattttctgcccgggctccgcggatcgaaaaatcggcttgttagtctcacgcactacctcacgaggtgacacccctttgcaaatatgcgtttctagggcaacaatatcgtgctggaa

SEQ ID NO: 2788 - DNA, 2488 bp, Toxoplasma gondii
  source 1..2488: mol_type = genomic DNA
aatttgtctcgtacgatgctgcttcgttaaattaccagacgggcgtaagcaacgtcatcagttggcgtgccttgtctcttgcaaagaatcatgcgcttcaacggtgtatcggtgattctgctgagggtcatgccgtcttcccgcgtcgaatgctgggattatctgtttttgtggttggattgtcctctctttttgtatggccatagcgcagtgctgctggactcaccctgaacgtttccagtggtggtacttgctttctgtgtgccaagttactttgccataggttcttgaccatttgctattgtgtattatgaaggttaaactgagttgtacttctgcggtatgaatttctgctgacaagcgacttgctcattgttgtcctccaaccacagactcaccactcgagcacgcaggcaaacgcaggaagactcccgcaccaacgaaggttcgagacgagacacgcccggctgtggggcccacttatggggagcggcggctgaggaaagtaagcagttgctacatgcagtaatatggtggtagttaggaagtcaacactgtcgacggaacagttgtatgtgtgcacgttgatttgagcggcagcactccgtcgcggtcctgacgtagtacgctttcacccgcagctgttgtcgcgtcgcagcagcgaatgtttgagactaaacagccgaagcatatcacaaccttaaattctcgggggctgaaaatgctgaggcttacgctggatgtgggtgtggtggccccaacatttcgtttgatacaactcacgaaagaaggcttcatgcagcttgccttctcggtaacacatggaacggacgtagacgtcattgacaagcttcgcagcacacttgattatctgcactatcaccgcagcaacacaagctctactttctacgatacgcgttgcaagttggaacaagcatgtgatacttgccaaatagtttttaccgtggcgagtgacctcctcaatctactggtgtcctgtcggggagacacgatactatcgaatccccacgcgctgaacatgctcatgtggccagcagtgatggattaggttttcgttgtagcatgaaaaaacctcccccttgtaagctcaatcacaacaagcaatcaaagcggcgacacttagtaagacatcaagaaactgtgctccgcactagtgtagaacccagtgagtctttctctaaccaagacttagattgaattgcattcttattatgaacctgatctcacaaaacgtggacattcggacacggtgctgcttcaccgtcccttcgctttatcacagcgtccaaccggtacgatcctcaagggccacaccgcctccatgtgttgatcccttcaaacaatttgcctcccccctaatttcgggtactccaaggaggccgttcactgcttttcctgatcaggaaaataaaagttggcagcagggtgtttctgctcttgttatctctaatctcacctatgttcctctcacttcccactgaaattaaccgactcgaccgcagcggatcaagtgatccggtggtgccacctccggagctgctttaccagtttggcagggagatcttacagtttcctaggggactgcacggttgtacgacacactagcctggaccgcttgtcggtcctttatccgggcaccaagtacctgggatcgtttactggtccattggtaagccaaatgattccggtgaccagcagtttgacagcggtgcgtgaacgagtgtatatcatgagggtgtcctggcttcaacaattactggtttccatgtatcgggtcgcatattttccgccgtgctaacgtcaaaatcaatcgaaccgtacaggcgttggaggcagctgccacccagttgcagcttccacgggtgcgtcgctggccttttctggttctgttctcatttttttacgtcgcggtagcgaccggccgcaaacagtcgatgagttttccatgacgttctgtggttcctagttgttttaggaccacaggtccgatagactggatacgcaaaaagaagtagcttgttgatgcttctctcgcgacaaccgagaccttgaccgcactggttttagtgaatgagcgtgaaagtgactcacacgagtgttgtcttgacttttggtcctcggtggcgaaccacttggtgatgactccaacgcgaagctaatacgagctgtgcataactttgttctggctgtgtcacccggtgacgactagggattttagtagttttctaactgatttcacgttcttttccagtccgtgctccccgtccccgtgtaaccattgtggaacttcagcttgtgaacacgcgaaagttcgtgcgaatgccgatttaaagggaagaaattggcttcgataacgccccgcagcgtctggcgtgtcagaagtcggtcgtggcgatccgtgggcgtactcgctcttccacggctcagaaaagacttctttccgctgtgatttccgtgtagatcatca

SEQ ID NO: 2789 - DNA, 2025 bp, Toxoplasma gondii
  source 1..2025: mol_type = genomic DNA
cctataaactcaatgaagctgattcacgctctggcagatatgcaggtgaaggataatcacccctgactgttgataagactgtcagcccctccaaccacatccccagccctttttgcttgagattggagtgtgatacggtgattgcttttgctatggtgcttccttgtcatgtttaggatgtcatggtaaagcggatgaagatgacagttgaagaagagcgagccaggaaggagctgttggaacgttatatccagcaggagaaggccgcctcctcgcggcggaccgaactcgaaaagcaactaacacttcttcgaacggagagagagaaagcctcaaacagatcgtgcgaaacggttgtcaagctgaaggcagacttacaggatgtccatgatttcacagaacaacgtctggcacagttgcatgagcagtatagaaagcgggaagcggaacatacacgaaattttgatgtacgggcatcggaacttgtagcacggatgaaccagcaacaaaagcataattccatggtgttctctcgagggaaacaggaaacagacacattgaagagcaagacgaagattgcagagaaagatctggagcgaatcatcgaaacctacgatcgtgaaatgatggagaaaaacgccagtaagcaccttcacattctagttctttctgaggggctatttgaagaattgcctacaaaacagaggccgatacacttctctaattgtgcggggtgaatgtgctgcagaagcgagagaagtcgcggaagcgaacgcaacgaaggaagagttagtggttaatctgcagaagcagttgcaagttgtcaatgaagagaatgaccggatacgtcaggaatacgaaatagagaaggttcgccaatcaatcatcgataggcagctacagaggctggctgcagcggctacgcttcttcaagcgtactggcgaggaataaggcaacgcgaagagtatgtagcaatgaaaaagaacgctcgcaacaaaagaggatggaaaggcaagaagaattagggtgtatttgaagggtgcatgcgtctttcggttcgcgactttcgatttacgacggctcgagatcgtgtggcttcctttaaacatgggaagttatcacgtgcctacgcgcacaagcacccgcttgcgactgagactagtgcaacaaatatacaccccaggttttgactgccataaaaagccaatcatatgcttcttctattcgcaaaacccagtgattgagcactaacatttgttcccatcaggtatatatgtggtagttgccgctaggttgagcgacgccactgcgatattctgtcgtttcatttgttcgtgtcgtgcctgtcgttcatcccgatgcggcaggcggcttacacagtgttcgtgatgctgtctagtaaccatcctggttgctaatgggcttgacgaacgctcttcagaaagtcccggattcgtcttgaaatcaacgagcatcctgacacttaaaaggggacacttcaccaccatcaccgagtggtagcccatcacgcgaacagcgaggcggacaggatggatacaatcgactacaggcgtatattgaacacgacagttgacaaatgtctgctggtatactgtctcaaaaccaaacacccggtcacgtgtcagaaaggaagaaacattggcatgaaaagggtagatgactcgtgttcctctgctacttaattacctgacgcgttgtcgacatgatattcgtagatcgtgatgccacttcgttgagttacgtcgcacagtgtattacattacaacagacaggttatttggcgctggcaggatggtgtgagacaaattatgcacgttcataattgcggcaatgagaaactcgcatagcctttgcatgcactgcaactgacagctctttttgatatgcagaccccacgtcacgagtgtccgtacacccaactagtttacagcctgagacggggggcatctgtgccagaaaatggaccgagccgtgccaaaattggctgtgattctgataaagga

SEQ ID NO: 2790 - DNA, 2108 bp, Toxoplasma gondii
  source 1..2108: mol_type = genomic DNA
accgagggtcatttaacctctccttcttgtctgagacttattagatctcctggcgtttctccgtgtaaatctacaagaagcagatcgttgtagagaaactccaccgctgcagcagacacctcgtccacggctctcggagtcaagagctcagccatgggtctgtctctgttctggaaagaagaagcgcccttgagtcggagccagaaaacgagacagaaggcgtcaccgcagttgagacgcgcgaatcgaagaagccaggcaggaagacagcagacaagaagagcagccggtataccgtgtcgttatttcactgtcaaaggagtgcaaagaagaggagacaaagggcaaactgaaggcgacagaaaaacgcaagaaaagagagcctacgttgagtggaagtgccggacggcctggttgttgtcaactccttcctgtcagacttctgtgaactccgcatattcctcagcgcccgaggtcggcctttgccttccgatggactctgagaagacaccgtcgaccgagaagaagagacacctggggagagagcggagacatctggggagagagcggagacatctggggagagagacgcagaaggagcgctttcatcagagggctcggcgccgcgttgagaggtgcggggacgagagcgcacagaagccatggagaggaaacgagagaaaaaaagcgagaaaggagagggaaaagcgagaaggcgggagaagacgacgagagaagcggcagagccgaagacctttcagagaagcagggagggagagtcgaatccgaaaaccgagacacggagacacggcgagaagaagcgaggaagaatgaaggagacagattgcttctcatctattcagcgggaaggaaagaaggtcgggaggagaaggattgccgcgaaaacgtcagcgttgtccactgcgaggcgcaaggctccgcgaatatctgcggacccgaaggtgtacatacacccagtgagaggtggcggccgcgaggattcgccttcgttgactggaggcaatttcacgaagaaagaaaaagaaaaaaaggccaaggacaggccgacggacgacagctagctctcccagagaaacaaggagcaattgcccacgaagcagcaagaaaaaaaaaggcctttcttgagtagtctgctcgagggacaaactgccgttccccccgagacaactctctccgcgttgatcggcagaaatcgaattctttgaaaacgagtgactgtcagactctcttcgtctcttctctccacgcttgaatttctctctctgtttctatctgctgcatcgtgcctgcttttccggggcttgcgcttttttggtgcatgcgtttgacatgctctcaaaacagctagacggcaggagatgagcctggtaggattttctggaccattactgcgtctttgtctgcattctcagctggcggtgtttcgcttttttctgctccttcccagagatcccctgctttcgcgtcaaactgggacccagagcaaccccacagatgcggcgacgctctccttgagttcggcagacagcggcggcgactcatcagcagaagcggaaagaagcctgaggacgacgaaaaaaggatctcttgaagcgaagacgtcgctggcgatcagcggagaagagaaaaaagagcgagaactagtgagagaagtcgttgtcaagaaagtgatcttgtgacgtgaggcgaaccgccgaagtaaagcgagagcttcgaaacagcgcgtgcatctggacagcttttcttttcagttttggaatattttttacttttctctgcagtcttggattttttacagtttgttcattttcggacctctctctctcaccttgtcgcgtcggccggctctctctgctggtcctgtctccatttctgtgttctgtgccctcatcgagaagcagcactctgaaaaccgaacagcgggaggaccttctgattcgcttccccgccgcttcgttcttgccgtccgcgtccaccagatcgcttgctctctctgctctgggcttcgctcgtcctccgcttggaaccgcagcgacttctgtgtcgtcttcgcgtctctctctctctctccccgcctctcgccacca

SEQ ID NO: 2791 - DNA, 2141 bp, Toxoplasma gondii
  source 1..2141: mol_type = genomic DNA
tgcttcttccagtgttcctgaaggactttgcgctctgccaggcaccgcgcccgttctgcctctgcgtcgactttctcgagagtgaaggtctggccacaggtgcttttccacttccacacttctctctcttttcctgtcgctccctcgcctcctttccacgcggtgctgtacacctcgacagcgtccgcaaccagaaatgcggagtagaagcccacgccgaactggccgatgagagaagaggcttgcgtcgaggcgccggcgccagcggcctgttgttccttcagctgctggagaaagcgatatgtccccgactgagcaatggttcccaagttgttgatcagttccgttttgctcatgccgatcccgtcgtcttcaatggtgagcgtgttcttctcgcggtcagcccgcacccgaatgctcccgcgaaatttccggccttccttctccatcaacatgcgtttcttgtcgctggcgtcagctgcattggaaatcaactcgcgcaaaaagacgtctcggtcggtgtacagcgagttcacaatgatgtcgagcacccgctttacctcggcctggaacgggaaaatctccggcgccggcgcggcacccttttctccagcttgcacacccgcggcgagagtggaggacgatgtgcttggtaaaacattttcggaatttaccccgtttcgtaagcaactcgcctgtggcgacgcccacaccctaggagcgcgagagccgacaccggcgcgatgcgaaggtggagcaacgaacgcacgcagcgccttaggcgagccggacacactgttggtttgtggagggagatctctggaaacaaacgagttctggagttctaggacagagagcggaaaggacaaagaagcagcggacgactgggtgggcaactgggtgccccggtgggacgtaggcaggagagagggtgacaaacttcgagcagagaaagagttgcatgcagacacaggagaccgtccgccggagacggtgccacctagaaccgacacacgaggactggaaggcgcgaatgtaaagccggaaacacggagtagcgaggacgacgtcgagagcaggaacagaactactacgcgcgtgacagaggacagtggcacacgcgcgcttcgggcattttgcctctgcaaatgcggcgatacctcagccacggactcagacggcctaggaccgcagcaactggaaaatgccaagcaaacgtctgtgcaagaagccccgtctctacccgttggaatcgaacgcgaggagacggcgctcgggacgccgtccctattcgcggccatgtacggagatgtgtgcatggtttccgagatgtaatgctagagatcgcagatctctcgcgggagggttagagtccctccaaatttttcattctgacgcatcctctttgttggtgaaggcgttctccgtgtttcccagccccccaaagggcagaaaaacaccagaaagagtccgcgcaaaccaacgcgtttcaccttcttttctcgcgtcctccaccagctgccacgctcttgcttcttccacttggtcgcacaagcaacagcattatgctcttaagcttcgacaccacgtcaactcagaaggtgttttccattgcgaagggccgaaggttcccgcacgcctcccgttcaggaactacactcgttacagacactctcgtttcggcatggggatgcaggctcacgaggacccaccacggaagaggtaagtcactcgagagaccacgggtgatttcgcttcacgtcggatcctgtcgagacaacatggggggctcgggctgccgcgtttcgcagcgcgaccgcaggcgcgtgcactgagctgttccgcgatgacgccgcgccatcgcgagcgagctacatgtgctcactagcttcgagctgctccgctgtgtgggcctaggaattgagagcgcgggattccgcggcgttcttgcgctacccgattgaaaagcgcagtgggattcatttccagaggcgcgtgcgctcgtgtcgacagttacccctactttgcgtggcggttatttttgagaaagtccaagaggcgcggtcctctgcagcgagatttgcttacgtttttttgtttgacttttccgcggccctgccgctagagcttgagagtcatca

SEQ ID NO: 2792 - DNA, 4554 bp, Toxoplasma gondii
  source 1..4554: mol_type = genomic DNA
aagatccactgtatctccgcgaccaattttgtcttttgtgctggtgtttcagcaactctagcgacgggtggaaagtgaataccgtggatcttggcgtcagcgttagtccggatttggcattcggactcactgcagatggggtcaaggtgaagaagttgtacgcaagcagcggcctgacagcgatcaacgacgatccttccttggggtgcaaggctcctccccattctccgccggccggagaggaaccgagtttgccgtcgcctgaaaacagcgggtctgcaacaccagcggaagaaagtccgtctgagtctgaatctgtcccgtctttgcctttgtctcaaattccctcagaagtgcccctgtcccaagagtcgccagtaccgcctcaggatggtgagaacccagattcgccacaaaatgaagacaattcgatgcaggaagtcgagaatagcgcttcgcagtcggatatcgaggctcagcggcaggccgagaacggccgtctgccgagtgacgatgaggcgtaaagattcacgacgcacctgtttttggatatacagtgtaaagagccagggcaacagacaacactattttgtggtatatgtcgcatctgtcgcgcggactggagtttcgtgcatgtccaggttagtcgggaacggtcgagcgtgaactcagttttcccggttcgtgagaacaggggccggaagtttggtagtcccagccattagagggatggagtgtttttgtctgaaagtaacaagtgcgttcggcgtccggccccaggccatcggcacgcctgtagaggtggatttattaccggaggcaccggtcttgtattctgtaggatgaactctgcaggagagtagtgacgtgttacgtggagggtttgagcgaagtacgctcgtgatacgtcggctgcagtgcacctgactatcgacaaaagcggaaactcacggccgaaatgtgtgacgcaacgcagtccttgatatttcaaaaatatgttgcaattttggagttgaaatgtttggatctgtttcctgccgacgtgtaccaagtatcaacttctcaggtaatcagcgatggctggaaaattcaggctgcaggaagctgtctctacaggggggatgggtagagcggagacttgagcagtcatcattcagaaagacgccaccatgcacatcagctattctcactgtggagcaccagacggcggtaactcctgtcaagcgggaatattcaaccctaaatgttttttcacttaaggcacgcagctgttctggcacgccggtagaaacgtaaatgcccggcttcgcacgtactatcgtcagtttacgtgtattgtggttccaccggtagcagtagtgtagtggtatgcggcagtcggagttttcagctgtgttctccaccgtaaggcagtggacgaattaattcgtgcgctgcagcaccatgtgtgtacatctagctaaagtcccacccgtccggaagaaacctgcggtatttcagagattcgtcgcatcgtgttacaaactccccttctgaactagtttggagggtgcgaattgtgctacgagagagagagactggttccgggccatcccgccgttcctgactgcaaaaaatgatacgcagacagagaagagcgacttaacactggagttctccctgcgagaggactctcaaataaccacagaatagagttctgcgacgtcgattgttgggattcggagttattctcacgatagccgagagatctacctcctttcgagaagtgatatgtgagggggcgcacgttcattttagccgcgtgcgttggtatcccatggccccacatcacgtcgaaatttatgaagtcatcgatgtggtctatcgtgtacgtccattctagaacgacggtatgaccaccaccttcgcagcatcattgctgctctgggacaccaccctctctaattctccattctccgacgcagtcgcaaactctacaactcatgttacgtgcgcttcagcactcaaacagagacggtttaccagagcgtcatgtagaccgaggtcgattgcgaagtcagcagctctggaacctgccctcgacgccgtggcatcccagtcgtcatgtaatgtgggcacaagtgcgctgtccgttgcattccatgtgcaatatccaactccaaaaagactgtcatagttctaccatatgctaagaagattgatacgatagaatcctatcgaaaagacttctattaagggtgcagaaagccaagaaactgcctgccctttttgccgagtattcgtgtatgaaatgaaggactttcggggagcgtggcataacataagcagactagtggcacttcagaaatacactccatttgttgcagttgcggcgtactagtgctttgaggcacgtttctgtcaaagtggagggtttatctgtaccccgatcacggctgcactgcctctgtccaaatggtacacatgggggtgtctcataacgagtgtcaattcatgcgtgcctcatgactcgtctccgtgctgttctgtctacagtgcgactacgtcggccacctccgaacgttacacaggtagcttacagatgagttcagtacgaagaagtccgtgtgcgacacacaaccggataaagaagtggctcagatttcctttttgtgtccggatcggaaccggcgttcctgaatactgccaaaattatccgctgatcgtccggcaacgtaaatacgcggctgtccagcgactcgtcctgcagactgcgtgcgggtcgcaactcgaatccttcacacaacgaaatttcggtaaccactccctgcgccacagaacacacgtactccagtcgagacgaaaatatctctaagcgacgctgctcacgagcacgaggccggcacctgccgtcccagtgaaggtagtctatattgagtaatcaagccttcgtcatagggggcgtgtcgttgtccaagaaagtggatcgtgcagtgcgctgggaaggtggagtgtgcactaccaacggtatcgtgaactaggaacacttgtgttgctaatctacgttcgcagataccaaacgcccagagttgtgcttggcgcgttgtcgccgtagcacaatcccactgcaaccgcctctttgccttgtccgcggaatctgagtctggcagaatcgcagcatcgtagaatacacacatgtagaattctgcagcgttttttttctcattcggtgctaccgtcgcactttgccgttctcagccgacacaacggtgtcgagatctcctctcgtttcggatcaacccgacttcctgaatgcgctcgcgttccaccgactctgtaggggaagagctgtggccacacaaccaccggtatacaagcgttccgttggcacaccgtgaaggcgtttcctaggcccaagcaagaagaagatgcggaaggtgtggacgaagtgcacgtgcgtgcaaagctttcagtttgccgagagctttctcacgtttccttttcacacagggggagcggcgcacgtcgcgcccaggtggttgtgccgagcttgcttccttttctgcgaagagtaggagccgggaccgagagacaggcgcgttgtcgggttaagtttttctacgatttcgctagaagaaacacttcccccttttctcagaaagctcaggtccatctggatgcttggatcacttgacaagctgcgcaaacacgacaggtttcggcgtctcgcagcctcgtttcccggctggtgtccgggtgtagcgcgctctggggtgcggacatttcctgctcgtaactttccctgccggtctcgagagacggctgatctcaactcaaaatcttcttttcagtcatcttcactcgccaaaacaagataattttggggcgacgactcccttcagtcgcttcaacttgaagaagttcgcttcgcgttaggggacagaaaggagcggttcctcgtccggtgccgtttcacgccaacgttcgcccttcgcttgagggttgcggtccgtcagtttgctttgctgtgtggtggaatgtgttctttttagcctttgtcatttccctttccagcaggctgctgttatccacaggacttcctctgtacgcaggcggttgtgccacgaacacggactgcatcgcgattcctgcctgttctgggaacggcccgtcttcacagtttttcagctctccgagaaacgatagtatcagctccgattctctaatagtagttttgcgggataacggcatcactctgggcggatttattcaggttttgcgccccaagtttggtcatcatcatcgtaccaaaaacagtgggcatcttctttctccagtctctcaaatccacgctcgactacagtttctttcgagtgctaagctcccatgttcaattctttctagcgttttcgaagggccctctgctgtcttaacctttctcgacacccttggctgtttctgacaaaacgttcatctcatcttgggaagtctgttgaagggtgaccctgtcgtaaaagtgggtgagagcaactttccttggttttctgccggattagttcccatcttctcccacaa

SEQ ID NO: 2793 - DNA, 2535 bp, Toxoplasma gondii
  source 1..2535: mol_type = genomic DNA
gcgtctgctctcgcctcactgtgcattctgtctcctcaccttctgaggcagcaggagctgaagagacggcggccatgcggcctgcgacagctgcggtcacctcgccgaggttcctccagttcgcgttttccgctgcctcttctcttccgcgagacaggtgctctgtcactgcagctgttacgctgttcaaccgcgtccacgcgctctgagagttctctcgctcgccttcagaatacctctctgcatgcgcaccgagccatctgccagcccccgccgcgagacgcccgaatcgaaatccgccgtccgcgaatggggaagcagaggaaggagaatcagaagcaggagaagaagagggagggagatgagaagaaggcagagaatgacatgtgagttgagccggggaactcggagcatttttcatctgagggaaagggggaagggggtcatcgccgtcgtcgtcctccatgaggaattcatcgacttcgttaaagatgtccgtcatggtcgagagtggaaacaactcgaatctggaaaccgagaaacgtggaagctctgctctggagacagatcggtcagacactacgacgtggtgaccctcagagtgggcaaagggcgttctttccacgcacaggagagaatcgcgacagcaaacgttcgtctgtcacacaacaggatgcagccgagttgaacctcgacaagaaggagtgaaaaacgaacccaatcctctgcaacagagaaacacgagcgtcgaaaacgacttgcacccgcgaaggcagttcggttttttcgggactgcatgcgttagcggaccaaagtcgcctcgcgaagtcctttctaaggcgactggcctctctcccgtaagtgtcggttctctttgtgatttacttttgcttctgcgccgtctgggtcagttctccgcagtacccagcttctgtctcctcggtctgtattcaccaccggggccgctcggaaagtcgtcgagtttgagtccccccgttttccagaaagcgtaggatgtagtcacaaatatgtcgcgggacttctcgtctgctgcctcctgctctgtgtgagcgtacatgtaccacctcgaatgggggaagggaggaagccggtaaacgaggacgcagaggatcgtcctcagataagaagcgcccggcgctgcagcgacgttaacgcagagcgcgggaaaaacacctcagagtccagaatggggaagcccaactgctggtttctcgagcgcaaaaagaatcgcgaattcgagtagctgaggtccacacacgtccacacgctatcgacggaggggggtactacttgtctgggagggcggctggccgcggtgaacgcaaaacgcgccgcttcgtgacaaacaaaaccctcgtttagagaaaaacacgcacagaaaaaatgcctctgaggcaaatcagaaaaaaagatgcacgacatgctcgttctggccgccctactcctccgccgaaaatccacagccgatcacgcatactgtctcaggagcgggaaaacgacatcgtttctaggcagcagcaccagtgcgacatcgcggcaacaatgttctgaaaaggtaccgtgcccgtacgtcttgcttgcgaaaaaaccttcgcagaattcacaactttgaaggcgcaacggtttttttaagggcgaaaattcgctgactcgaaacgcagcttctgccgagggagtcgggtaagcaaacccagaagtggtcggccaggggaaaagttgcagggggtttcgcgctgtgttccgcaagacgtgtgctcactgcattccctgcttcctctctttcctccgtcgtttttgatgtccgaattctcctccagtgtcagagaaaaaacagagaaggttgtgtgtcgagtgtcgcagaaaaagacgcttgtctgtgcccggcgtagacgatctcttcggcctctcggacgaaccgagttttcacggtgaaccttttgtgcttacttttcgtctcagactgtgttgttgttccctgcttctcaaaagccgcccttctctcacttcttgttcgccgattgccttcaagaagtgtggagttcccttccttttttctgggttctccggaagcctcctgtagcaaaatgcgctgaaattttggacacttctcgacggtgtctcgctttaggacggacctcatggtctttagggcaccgttttctttcactttttctgggaacatcacagttttctccatttcagggaacgaacaatctgcaagcgtccacttgtcctgtggctgctgggctcggatgccgcctctgtttagcaagtgtagcagggaccggatggcaagctaggtccacttcactgcagtttcaagttccaaaccaaggcatctcaatttgtatcgtgttctctgtcaacaagctgttgaacctgtcgacggagtgtcgtcccggctcctatcccgcgttcgcaagccgcaccgttttcagaacagtgttccccgtggtgttgaaagcgggctgcgaagcgcgagcgtttcgttttgtggttttttctgggaaacga

SEQ ID NO: 2794 - DNA, 4259 bp, Toxoplasma gondii
  source 1..4259: mol_type = genomic DNA
ggtgtgctctgaatctgaattcattctatcattttggtgttttagttgcagcgtatatctggaaaaccaacacttgcataccacctgtagacatatcacgattttcactttggtagtctccttaataatacagtaggctatttctgaacgctgtgattcgtagggtcgctcttcaggctcctcaaagggtgctgctgcttcttcggggaacatttgtgctcttctataaagaatttgcacagtagcggctggggaagcaaagtggtacagtggctcttggggcctctcaggagtgtaacaagcagcgatgaaggaagagtgttgaaagaggcatttgtccttccgtaagattttgccacgtgggtttgtagaaagcgtctacaaatgtcttcagcagttatcttagctcaggcgaaaacgagaaatcgattcagagcaccagattgagtcctccctatcgagactgggcgggttgtcccattgaaaacgacagatcccattagggcaacacaagaagtgagaaatggtgcagtagttcaaatactgtccctggtggccctcgtaattagcacccgtcatccaccggaaacgcaatctaccaagtgtgcactgcgcagaaaacggatatgataatagacattggttcaaacagtcgctgtgagtacgcaggaacaacggaaaaaatcaagattttactatgtacccaaagaataacccattcgctcactacattccgaaaaactctgtagagctacttttcgaagttcttcgccgcgtcgtccatgaatttcgcaagagcgaaatccttttctgtcaacccagctgcatcgtgtgttgacagctccacatcgacagtattgtagacgttataccaatttgggtggtgatctactttgtctgcgtagagggcaactcgggacatgaatccccacgcctgcaaagtccaaaaacaggcggggttaggcatggatgaatgattgcacggagaaaaacagccagaacacaagtagagtctcagtctctaatcctcggagtcattcggttcctccatcctctacacctcaggaaaacaaaactgccacgggtcactcgtggcaggtactgtctggaaacaaacgctactcccacctttggttgacgcgttggctgatgtatatcactacttgcgagagaccctcgtgtcagcaggtttagcggtcgcttacttcgttgaaatccgaaaactgaaatttcctcttgatggacaagtggccgtcggttaaatgccactgcggcactgttttgtgaagttgaagcaggcgagcggaattcgccgccaggcgggcaagtggtgccatcgtcgagatgtgtcaactcaagaaaaagagagagcctttcacatcggccaatcactaccagaacaaaaagaccttttaccaagccataggaaatcacgaaggggagagacgagcacactttcgcaaacagggcctgtagtgcgaccagagtgacgttcttctgttccgcgcggccgggcacgcaaatgccaccgtatcttttggacgctttgttttcaaaaaaggaatgacaaaacagcgaacattcaaggcatactcagaaaaatccacgcaccacatgacatgcttggtttttttttcaccgtcgatttactccaacagcttactctttcctgtgaaacgtgtgttcggttgtggttgcagccgcatgtggatgtgatcatccaggacgggacgcacaagacgaaaatgacatacaggatcttaaactcagttcattctggaaatatcatccctcttcaactgtcaggcgtctccctcctgtcctcgggaacaaacattcagtgaaatggtgccggatgtaggtgggagggctgtgtatgtgaaattgttactttcagtgtggtagccgaggcagactgcacggcggccaaataccacctctggtgaatctggatgagttttgagaccagcataatgtagcgtggcgactctgatacaacgtacttctccatgcacagatttagtattctttgcgtgccagtccatgaaacgtcctcacccatcagtaataagccacacaacgggaacgtagtcgagaagaaaacgggaaaaacggcaacatgcatcgtgcttgctgtgcagacttcccttggtgtaacgggttgcagggcgaacatgaggcgatcgacggagtcaggccatgtgttatttgcatgaaacagtgaaacagtaggactctgggttaccaatacaaacgctgaccgcttacacgttattccactaggacgttgttctttgcagtctgagaagatctcaaaaatgtgtaacagaaatgacaccaactgttgagccatgctacttcctcggtctcgtaagaagatgcgtctgttctgtgctttttggaagcgtctcatccgagctgacaaaaacgcatgacaaagctacatcaagcgatatggtgctacctcgtggattccgtgggtcgaaagaagactcatgatgctcaaaaccgagccggtgtgtgtggcgagacctcggaaattcggttcggcacctcaccacactactaatgctcccccgtcgtatcagacatattatgatatctccaaaatgtggcgcccccttgagtttggcattcgaaacgagcttgtgaatgtggtgggggggccgttttttcagagacgcatgaggcaaactacttcctcgacttcggtttgcacaacagcctttatccgactaagcagcagagccggcgcaattcagatctcttgactgtgaagggttcaatttcggtatacgatgcagctgatcgacaagtcgtatatcgtggattggtatctaccccggcgtacagagtgtttagagctgcctgtgggctgccgttccggaccgtctgttctacagaacgctagtcgcgtttcttgaggtgcgtggaaatgccattattggaatttgcatcacccccacatgtattgagaacccaaagtttcgcagcccggggcacccaggttggtcgtccacaggaagtccagctgttccccagcgtcgctggtatctctaccagccgctcgtttctaacggggagtgtgccggtttctgtcgatcagttcacactgaaactacagttgaccacacgcaatagacaaacgaagttctcactccggcgatccagttatctaatcaacgcacaacgactctatcattctgcctgccgtaaatttcagtcgttcagcataatcaccatcctcgtcacacccacatttcccgatcaccagctgtcgagacccgaccacacacttgcgtctgcctttccagctcctcccacagtcagctagtgcctacagccgaaacgtttttatttgggaaggtaaggaacacactgagagctgaaaacacacagtaactcgtgctggcagcacggcatcagatgtcgggtcggctctgggtctgcatttcctctgcgtgattttgcatgacttctcggtacagtggctaacggaggccagcgtgacaagcgagcggcgagctcgagactgcacaggggagttgatgcgatgctcatccatgggaggtggcgtgtctctcgggaccgttcttgttcaaggatcaagcgccaaacatagcagacggaatcggtaaaagtatgcagtgtcgtttgtgacggatatagaagtcaacgtaataaaagcagtttttccccgaatcgtggcggtctggaagcgactgccagtccggggtggctggtaggtagttaactgccgagagagtcttcgattagaggtacggatcacaggaggtgtccgaaatggttttatctgcgacgagtaacattttacggcggttatgcatgtggcatccccctgcagttatttcccgctttgggctctgatgtttttctcccttcaccttcctgaccgtgcgacgaatctccacccggaccacccgagcgtccgttctctccccggttagcgatttcaagcccgttggtcgaaaatttgaacatttccgccatctcacaagcgaagggaagtaaaatgaccccaaccctggctgtgttacagctaaaactccagcgcttcgcgttcctgtggacgaagtagttccccgagttcttgttctttccttccgtattacctcctctctaagtccgtatagcgcggtgcatccccgactaggccaggtataacaaggtccattttggatctttcttctagaagaaatacggcggtcgccacccgtgctttctcatctgagccacca

SEQ ID NO: 2795 - DNA, 3822 bp, Toxoplasma gondii
  source 1..3822: mol_type = genomic DNA
tttttgtatctactcggcttcagtttcgttttacatttgacggtttgggtggggctgacagttggcgtctggattttgccgcttcctttagtgaccgtgagtattctctatcattagaatgtagatacgtccgactcgcttggaagcattggcaggtaatacgagttttcttctcatctctagcagctggctgcgacaggggccgattcttgtttggccaatggcaccgcggagttacgggaattcggtaggcactgaaattgcacatcaacgtcggtctccctctggtggaagtatgtcgtggcgtctcgtgcgccgcctgcgtcggtatctctttcatgtcgaggattgctggatgttcgcagacgttccgaaatcttcgggcgtgaaaggcggtgtgtctttgccagtcttccaaagtatacagcggcttcgcctcggctaatttccggtaggtaaatttgttgttataggcaatccgttcttcctcatcctttcgattcttccagttaagactggcaggacctctgggctctgaaagcgccgcagtgcacggagaccgtaccattatcttgcacaatttatccagaagcagcttgttgtctctatcgatctcctggaatctctcatgactctgagtctcatatttgagatttcggccagttcggggagtacgacatggagggctggtccgtacgactggcttaacagccttcagtcgttcctcgtgtaagcgctgctccagctccacacgtcgtttgtaacacacgcggttaccttccactattgcacgatacatcctgaaagaccaaacagcaagcgtgggaccttcataagtttcgttgaggcgagtcacacagaactcttgttgaaaagttgagggtcaaatacctgcttgattctggcgaacttctgtgtacgctggatcacagtaagagacacggtacagagcgtctcgttcgagcatagctcatgtgtctctgtttgccgtcagcgatcatgtccaacatgttttctagaagcatgagcgtccctgcagtggaatggggctaatcggttgccctgattccaccgatgcaagctggtggcccgtgaaggaaattacgtattcggaaaatttgccccgaaacgagagtgtccctcaacaaggctctaaggagtccattctccggtaaatggcgtgtgtgtatggcatcttgtttagaacaagcactcagcaatgacgcgaggtgtgcggcacagatgcaatttcatcactagcggtccgcttgatggttcatacacggtccaactctcgaggatgatcggacagcacgagttaccagaaagacgctcaaatgttagagccggatgtattgttagcttgcaataaacaccatcgcacctgtactctatttgttgtaggtgccaccgacagttcgtcctgtgttttatgacggccgctggtcgtataacagcacacattccccaacgtggcacatgcaagcccccttatgaaagccccgaagtcgtcagacctgcagactatgtgaaaagaagcctccgatggcgacgacacaaatccatgcaactgggatatttcgtagaagcttccctttcgtgggacctaaaaatgatcttatgcgcaaaaacagcagcaaacagtaccgtgtatctatgttcgtcccgcgagagacataattcagattgattgcatatatttgtagagatggtcatacaagttttaccttataactcgtgcctcaagtatcacaatgaaggaggcaaccgactgtgcgtctctattcgagaaacactatcaattcttctctttaagtcttgccgggtgacagcacagcctggcgagagggggcaaagtgagggaaagacaacagacggcagctgccgtcctttatgattttatgctccgtgtactcgaaaatgaaagacagggcactagagtactcaacatacctcgtagcccccgtcactatgccccaccatgcggttcaattggactgtgctaagttggcgatatggaggaaaactaacgcgtgcagtgaaagacatactatgttacaggtgtttacctcgttgcatccaagtacacaaacgtttatatgtacatcttaacttgtagatttttcactcaccgctcctctgtgctcgttgtggctattgtggaatctcggcgacaaaactagtcttcagggctttcagttacaagacgtcgttcggtgtttctgcggcagattcacccgaaatcagccgaatgctttagtccctgcgagctgcctttgagatggaggcttgcaaaggatgcagcttccgttgggtggccgtcctccatccttttgtgaatggagtgcgttcagagcgaaaacgtatttccgctcaagtccaccactggttctccctgaccatccgatttccgtgcctattttgttttttcgtggctcaggcttattgtatgtgccagcaaccgctgtgagtgagcagctgtttatctgttcaacgacgggcacgtctttagaagttgccagtatgggtgagcatcataaaactcgccgttcgtacagtagcctcgccaaaaaatatcaaggtctccttgaatgtcgagacagaatatactcaaacattttctgccgtaggagtggacaacaagggtgtctgatttgttgatgctctcaggcctgaaatcagaatttgggaggacccgcagcgtcgaaagtagttcacactggctttcttgaaacaaccaagtatgttcaaaagatactccaagactgcttcttttccggaagatctccttccgcttcccattttgcctggatctggcgacagcgtttcctttttggcccccttttggcccagcgaaaattccccgccgcacgcgcatacaagcaagggaggagagaccaacaaatgacagaatgcttgggatcgacgcggcagcggagcaatccagtcgctgtttccgaaaaaacagcagttgctgctatattttagtctgcccttaactcgatttcttctgctgcgattctctcctgttgaagcctgcgctgttccataaaggtgtctgctgggcagaacttggcacactgtccagcacatctctatcgaatgcccgagtcttttttgcggcgcaccgtcacatgccactgagtgagtgacacaggttaatatagactcaaatatctactataggttacgaccgatgcatgcaagcgcgtgtagtcctctgatataaagcttgaaatgaagcgtcttccgttttcgatcaacgcctccatcgtttctcatgaccactttgttcagccggaagaacttgtctccagcgttgtggtgtgcacgcatgtacgcgtatatacatgatgcgtacgtgctgtggaccatctgaacggcgggtaaacttcttgcgtagcatcttgtttcgctgccgcttattctgtcaacatgattttgccgtctatgattttcccggatgagatcaaaagtgtctataaagcagacgcataggggacagtttcgagattattctgtatttgatactgtagattacactggtagaataacaaaaaccgtagcgaaacaaggtctttcttctacgcaggttttgacttcctctgtgcgcttcgttacaatttttctgctatggttgataatggcagttccactcctgtctttgagaccatttcgtcttctagctcgacctcctccagtgatgttccaccaagtcctaaaaaacactctggcggtgtgaaaacgcgaaaacgtttcttccttgttcatgcaagattttcagtggcttgaaccatatctacgctctgaggattccacaca

SEQ ID NO: 2796 - DNA, 1949 bp, Toxoplasma gondii
  source 1..1949: mol_type = genomic DNA
actccggttgagggtgtcgaactgtctgtccagttttggattccccttctccagcggcgcaacgcagggaggcggatcgaggaggctcttccgaggcgcgcggagcggattcggttgtcgctgctccacggaaaggttcagaatcgccctcactttggcgctacgaggcttcacgattcctcgcggaaaaggcgccatggcgaaagccgcacaagaagaagtgagaggaacagacggagacgtaagaagaggagaagaaagaggcaacacaagtggagaaaaggaggaagcggaggagaagagcgcgaggcgaaggcgaaaaaacaagaagagaagaagtcgccgagttctcttcactctctgacgatcgggcgcattgccgtcagcgattggagcacaagaatcattgcgtacaatttttaaaaaacggggaataagttcaacagtaagcggcagagaggctgtctgtttccctgtctgtgtgcggcttcgacgtcctcagacggcgacctcacaaatgaaacaagaggagaaaaacagactcccctttcttagcgcggttctctctgttcctctcgctttccttctcttctcgccatgagaggagagcagcgaggaggctcaccgctgctctctccggggcaacgggcgagaaagagaaatggacagctgagcattcagacggcagagacaaggagagaagaaaaaggagtcgaatgcgacagggatctctgccagcgtggtggcaagcgttgtgaagcaaagtccggaaccaaagcaaatagacatgcgcgtaagtgcctgtacaggtgaagagttgtgtgcagattcacgaggtgtaggtacacccggctggggttttcgagggcggccgaactggaggggaagcttgtttttccttgtttttcctctctttctctgtgtgtcgatggttcaggacgcttgcagactggcatgggagacgagaaaaagttgtgcttcgccttagacaaagaaaaaagacttttgcaggtgcgagaaagcagatggaacttgaagtgtgtcgcctgtctagctctagctccgtccccgacggaagcggagacagagagagaggaaggagacaggagacctacagaccatggtccacagaaagaaagaggtttttcacgcgtcaaagcgaaagagaagaagagattgaaagagaaaggaagagaaaggcgcgacccgtttaaagggaagtcgcggaaacgttcattccccatgcccatccagtgcatgcgagctcttcgcagaaaaaaattctacttccagcgcgcggcggtcgctgctgcgaacaagcgaacgatttgcttctctctgttctcggtccctgtgccttctcttgttgtcacctcttcgttttcgagtattcctcgactcgacaaaaaggcgaacacaacgggggagacgtctcctgaagtcgtgcgttttttctaaagatccacctcgagagcgagcgagcgagagcgacgggagctggagaagaaagcctgttttctctctctcgcttcacagtttctctgttccggctgtcctttcgttggcgaaaactggaggagttttccatgttttcagaaaccaaaggctttttctgtcttttgcatgcgtgtcatctctcggctagtagcttcgcaacgtcctcgcggtcggggagcaggtctcttctgctccagtgttcctcttcgtctctgcggtttctgggcgtccctttttccccggtccgtcttctcttcttctctcgcgctacgccgagctatccacgtctgaactgcactcctgtgctgcagcgttgcctgtcgacgagtcagtgctacgcatttcttgaagtcagtgtgacgcccagaacgacctgcgagcggcaccttccgcctgtggtgactctctctcttcgctcctgcgcgtttctctccactctctgctgcgtataa

SEQ ID NO: 2797 - DNA, 3221 bp, Toxoplasma gondii
  source 1..3221: mol_type = genomic DNA
cctgaaaaagccattttacagaacgaattcccgggctcctgcaagaagtgaggaggcaccgatgcgaaatgttctcttcgtgacaaaatcagcaccgagtgcatccgagaccagattcaaatactgtgcacaaacgtcgagagacttcactcctcccgctattttgatgccaacaatcctgctatctttatgcacctcctggtactcctttatggcacgacacatatctctgacggcgggcagggtcgcatttacggtgacctttcctgttgatgtcttgagcatatctgctccactttccaacgcagccttgctcgcgcggacgaccagatcaggcacatcactggagagcattcccgtctcaagaatcactttcagcactgctgagcctgagacctagaggtagagcaggaaaaaacatcaacacaaaagggcaccatcttgcgaatgaagcgtagacagttttacacggtatttgcgtgacttccttgtgtaaatgggatgctgccgtaggcgatgtccccggagagttttgatctgcagatgcagtctggggacaccgtggagcagagattcctatgaacttgccgccgtgtatcgaattagagcccacccacgacgtcggaatatctcacggtttcgccaccactatggggacttaagtccacactaggtcaagcaaggctgcgctgcatatccagaaactcgacccacaacggaaacaatccctccagatcagggggaagaaagcacttggaatcttcagaggtaagggcccgtggggaacacgtcagtagacgcagcatttactcgggtaccacagtttaccacaggcacacatttgagttgaactctactgacagtagaccagcgttgcgcatccggtgtgatgctagagcaaagtccgctttcgctgggattcgctgtacatgtaccttccggactgcagaaacgagagttcgaagtgccgcctcgccagcgttagcgtcgcggtttagcagctcccagtccactacaagatccaattcgtcggccccgtcactgagagcacggagagcctcagaggtcaccacttcgacactacctttgccagaggggaaattcaggaccgtagcaaccgtgagctctgcagcctctggcagacgactgggaagcacctttttgataaacttgactgccgaaggccatacacacacagccgcggcgcgagggattttcagagcatcctcacaaagtttagtaaccgactgttcggttgacccttcagaaaggtctgtcgcatcaatgagggaaatgacacgccgggcaacgtaagcccgacaagcctgttgttctgcatccatcctctacaccaagttaaagcaggactcccgtgttctgtgcacaaacattaaagcgcggcgcaaaacgccgcatttacagcgtacggatacctttgaggaacaatgatgtaagtatgagtgtatcatcgactagttgggtcgttgcccagtgaatcgcaggcactgccgttgttgaagggttgtccgttaaaacgattcacacagactccgaaaagcaattagctttccggcaaacgaaaatgcagcaacacgtcagtcgcccttccccccccccgtcgtacccaggagcagttagctcgccagcgtactgtcatgctgaatttgcaaacatgatcgtcaactcgagctgccacagaatcgccgctcgaccatccaggtgtggcattcgtgtaggaaaagatgcctctgaacagataaggtggcagatgacgcatcttggcgtccttcaacagattatcgccgacaagagtagacatatgctttctgcgggtcgcacggtgaccctgggaatcgggccagctattccggggtcgctgagaaaaattgcacgcgatggagaggcaagactaaatttcaagcctctgtctcgggtctgaagggtgcgctttccgtttggagcgtgaaaccccacaaaggtcttccctgcatgttgtagaggactcaactttcaccatttctgcctctctgtgctttcgtggacgagaactgtactaaacaagaccttggagggcggcaacatgaccccgggttgtacgtgaataggagcctcggcttatcaccaaagaacgaggcggcaacgccttctagggacggaacggcggaatggtgagaaccgcacagacaacagtccgtattagctggtcctgtctgaaatagactcagagactttccactgatgtctgactttacggtaattttgcgcttggtggatgatggtctggggagcttttcttgcgtccaaaactgtagattccattttttcctgtctgttcgcgagttcgcttctcgctgctactgctggtcgacgagggtagacgaccgtccgctttcccgtgtatctcgtaaaggaacactcatcccgttttttctcccaggtttgcacacgcctcttgcattttcctgggcttgaattttggggcacccattgttttttgcctgcatgtttgaagctcctcttcgaccaaactcgattacttctgacggcggtcggccgatttgccgctgccgccacagaaactgccgtcaagtttttcaagcccaagagggcggacgattcccccgggttccacaggagctgcttcaaatctggaaaagcgagtccagctgcagaaaacggtttgtaccgatttgtgcagctagcgttacaggctcttccccacgactaccacttcttccccatcaccggagaacagtcaccgacgaaggtcgctgtgaagcaaattcggcggtcatttcctgtggcgacattctgcagtgctgtgaatgtgtgttgggaactaaattgtttcgatttcgtcgaatacgctccctccatgactcgaggcgccgctcgtgcaaacttctccctgtgcattgcctggcttgggtccacgacggagttaaacccctcgctggtgtgatgtgtcgtcgtttgcctaccttggcattttaaacgtgaacctaccaaggcgacgtcctgctgtggcagctcgtggaattcctggaagccgccccagcttcgctgtcccgggctccgcgacggcaccaagtggaactggtgaaaagcaccttgtgctggacagctggaacagcgtgacaacgcgagatttgagggccgtgctgaagtggtttctgctctgtgcgaagaggacagcttttccgagaggaaaggagccgaaa

SEQ ID NO: 2798 - DNA, 2842 bp, Toxoplasma gondii
  source 1..2842: mol_type = genomic DNA
gagcagacagatgtggacatacaggtccggacaaagagtcgcagacaggcaacgccacctgaaaacacacagtgaagactgaaaacacgtgttggtttgggtggggaactcggaagccgctggacagagtccctgtcgtcggacattcaccaagaagtatcacaggcgagaggggggcctcgcgggggacggggagtccatcaggcgaagcccagcagatgggagagaggcgcgtgggtagatatccctgccgtacgaaccgtctgatgagcacagaaaaagtgaggcaacacctgtacagccttttgcgcgggatagtttccagcgggaaaacgtactctcttagggagaagctgatcgtggtcgaccatcaagcgatctcgaacagcggcgatgacatagtctgaaacagaaggatggaggttgagcgacgcctcgacgccgagaaaagaaaagggccaggacagggcagaccgtgcggtcggggaactcgcagaaattttggggtcgcgagaaacataaacaatggacaacgaaggcgtagagaataccgaggcgcaaagaggggaccgaaaagcaacatagagtgaagacagagattggaaaaggagcgcgagggcagtcaagccggaaagcagactgcggcgtcgcggccgccgcatgcagacggtggtggcaggcggaggaaccccttccggggaagaaccacatggaaaactccccatggttccggaaatctcttgaaaaagacgcgacagacggacaggcaaacacacgaacagacttaacggaccccgcctccgtttcgtccgtcctttctgcctgccatgcagctgcttgggctgcgcgtacccgggagcgcttccgtgttttctcccgaattctgcgagacagactgggaaaaaagttccgggaggtggcaacagtggaaaagaatcaatcgaaagagagaaaaacgacagaaagttcggcgccgctgccacagtgtggtgaccacgtcacagacccgcacagcgagccggcaaccagaatctgaaacagctacgtatcccaattgcctaccccgataacttcaaggtataaaagtgagaaaatcaccgattcatgtggatctcgcattttaggatgcttcagagttctccaccatcgggaaaaccaacaggaggatgctcacggaacctgtcttttgacggcgggctccgcgcggcttcaagggagacttgtcaactggaagcagatgcatatctcgaccttttttttaaacgctccgagtctcgaagaagggtgcagagaaacaggtgaccgatgtcgtatctttctcatctgcgaccacgctgggtgcccaagcgcatgcgccgacggcacggcaaacgaaacggtgaaaacccacccgtgcttcagctgcttttgctcacaactttgcctgagaaggtgaagcaaaaatggaaggcaagacagtgacaggcgaaagtctccacagagcgtcgctatcggcggtaatgttcaactccgagactgatacggagctgcctgtcagagggctgcatgcacacggaaggatgaggtcatgtcaagcacaactgcaacgtggatttctcggatgcagccgaaacgctaacttctttcgataaacactgtctcgctgaaggttactctttgccgttttaagaaacaggagttcctattcgagcaggagcgtctctccagcactgtcgtcttctatatgatcagttcgggagtcttagtccacttcatacaggaggaaaacatctccgcgccgatacttttcacttccatgatgcagggaagattaaacagacagacgccgctttctctttctgcgaacaggattccggtgttcttgcgacatagtccaccggcgaataggcggagaactgagggtctaatcgaacagagtttagcagcagagctgtaaaagcggctgaggtacactatcgacttgccgcattcttggacgaaaacacatcgaccttaggaggtacagggaagcactgtccgcagggtcaaaatatagctcggcagggcaatgcctgagagtcgatatccgctgtagtctaggtggttaggatacgcggctctcacccgcgcgacccgggttcaagtcccggcggcggaatatacgtttgtttccgttgttgcgttcccctcactatcatttttgcattatgtcaagtccaatgcggatcagctccattctctcttcgcatctcaggaatacttgtatgggcctcaccggttggtgatcctcagtctgtcatggctgcaggtgccccctgtgtgtcccatattcggtacgcaagccgccagtggattcgtgtgcctcatgtattcccgaaccgaatgtttggccataggcattgcgaatatggcgatttctgtgcgcggaaccgtgtacagcatccagagatgggatcacatcattgttttccgtcctttctgttgctgcagggctatcgatgcttcggtggctcctggaccacttttgtccgataatggagctgctgtggaggaaatggaacttgagagaaaacgcaagcgatttcagaattggtcactgtggaaaatatggataaactggatgagaacgtaaatcgtttgaggaaaagtggatgggtcaatccatccgctgtagtataggtagttaggatacgcggctctcacccgcgtgacccgggttcaatttctacattatatgaaacacggatactttttcttcaaaaggctcttgcagattattgagtgacttgtgtaccaggcgcagctgtgtttgttaggtgcgtgttcgtgcctctctggtggtaatccaccaatcagaaaacat

SEQ ID NO: 2799 - DNA, 1730 bp, Toxoplasma gondii
  source 1..1730: mol_type = genomic DNA
aattcgacaaggctacgggcgatatattgatttacagaatgcttcgtcttgaaggaaatggccaaaaatgcgacatcgcaaacctctatggaacaatgcttagtgtctggaatcccctaggcagcaaaaaatatggatacgactgagctgggcctttatctcagtagcctatacctttctctaggctaggacacgcaaacattctataggttcaaataagtcagtcccgagatcactccttaaatggtggctcccaccttgcagtactcacctgtgtgttccctccgctaacatacaggacgacagggttcgcgcaacccgttaccagtcggcccatctcgatatgtgccacgcagtggtttacagccactagaggaatattccagagcagtgacaaggttcgtgctgtgatggcaccgactgccagtggaccacccatgcctggcccgcaagtataggcgatgcaactcagctgcttcggctccacacgcgcctcggtgagggctcttctgactagtcccacaattttcccttgatgatgtgctgccgtttctcgaggcaggaagcccgtgccggggggagtgataaaggtctcccgagggtttgataagatatcgccatctgatgaaacaattccgacgccgaccttgtttgcgctgctctcaattcccaggcacaacaaagagccagacggcagacaccgaccgcttgaatgtggcgaggaacacctttccaggaggggttcaacaactcctggagcagtcatcttgagttcccgtgatcgttagagcctttcgccacaatcccaggctcgttctccctccagtgcttcaccagcctgggtgccaagcttctacagtgcctcctttgttcctcacgtcgcctcccaaagagttgctcgcgtcaaaggcaaaagccgagtcaactcagctgaccccaggtgctcggcgttggataacacgtaccaccaccacggggaaaattgagtgcaccggctacgatactttctggtaccgatcctcaatattaacgggcagagggaacatgcccattaaagaatgcccaaaccacgccgtcctcgagagttgctgcaaaaacccacaaaatgggaaaatgtgtaaacggttcgctttcgataactaggttggaagacaaacccactatttttcgccaacgctgacgaaaacactgtcaggtgtataagcgttgatcgtaatccggcagcagctcattggtgttgagagtatgtcagaaccgacccacataaaattactgcgacgcaacccgaaggcaagcgggattttacccaagcaaattaccttacgcatgcagcgtgccgcccttgcgtctcagtagcatgcatcttaaacgattaaggacctctgggactctacaaaatatacctatgggtgctatcatgtctgactgagttttaatagatcccatattagacaacactcgtttatcaggaaaaaaaatcattcgctggtgtgattttgcggcaacgacagaggcgcgtccgccacggcatgcttggcaaaaatgttaccacgtgcatgcagatatgacttctaatgtatctgttctcttgaggatcgagttctctgatcctctcgacgtttccatgtcaccattctacagtacacgttgtgatttggttctttcgcctcgccagtccatagtagcagcctccataaagctaatggaaagccggtcaagctaaacatcat

SEQ ID NO: 2800 - DNA, 3711 bp, Toxoplasma gondii
  source 1..3711: mol_type = genomic DNA
cagagcgcggactgtgcccatttcatgtttagccatacgcttttgtagttgtatgtaaatactttcgtatcgattgaacaaaagaaggtgcgtgcccttattcttcagtgactgacgcagagtggaacacttttgagcagtttgtttcaaatcaagtctcctttcttcttttcaaaacgtcatttgtgtggaagcctgtaatggaaaaatgatgaaagccccaatgtctggccaattcatctggcgttcaaacggctctctccgcgatgaattgcacgctggattgcgaactgcacgacagcgactgattgccggcgaattcgcctgtaactccgaacgccgcagcctttcccgctatgacaatacgaaggagaggctggtggaaaacaacgagtaaaaactattcggtcagttttaacaatgccgccagtcgtgacgacacgcttcttgcgtatcccggccactattttggatactgtgagggttagtggggctggacttttgtgatcattcacagtgccaccgacctacggcacgccgctgtgaaaacttgatcattcacggccagggcaccgaaagtctttgaggtgtactgcgttttgctgacgcataatatgtacccgctacgatcggggtatttgaaccttttccgtaggaactaacaagtacaccaggacactgttgcacttgattcccgatattctcagtgcaaaagcataagcaaataaagaatgatatccaatcattacgaagcaacgtgcatttttgcgagaaagggactacaacggattggtgaaaacatggaatctcttcagaacccgcggactcccgatgtgtgatttcgactttctgtacactttcgtctgacttctgtattgacttatgaactgagggaatcacatcattcagcaacgcaaaaataataggttaactgtgcagaaacatctcctgcatgaagagcgaaacgacgagagcttcattgggtcaatatgtcccacgaagggaatccaacatgagggtggtgaacagaaagcattacgcggcagaaggtccgaattgatagatccagaacttctggtaccaagtctttatatggtttcgtaagtactcttggaaagatgaaaaatccagggaatttgagatctattcagtaggttcgcccacgtagaaaagaccacggtgtgcaaacatttgtttttgcgatctggccccgattttcgtcgacccagttacatggttctgtgaaaccttggaccattatctcagcgtatgccccgacatctgtggaaaagtctaaacagatccgcgtttccctttcataagccgagcagtctaacagcgctgagtcggtccactatgccccatgcatcaataagccactgacacccatgtcgtcgtctgttcttttgtttctgaagcgtaattcttgccctcggatccgttcgacaaagcacaatgtcaggacgagttgttacagacgaggtcatcgcaaaacatgaagtatgaagctgccgttatgcgcccacaatttctgtggtccttttttcacgaactgaaatagcggcactcgcatgcgttgcgggaaacaaagttggctgaaaacacaccagcgaatgtaccagggtaccaaaaatttccgtactagctgggaatgatgaatagccacaacaaaatcgatcacaagagcaccactccgtaaacaccgcatagcacagcgcccaactgacttctcactgtggtacaaaatttctgtaagcgcttttaagcaagttgattacatccgtatcaagagccagatgcggatctgtgtaccctacgttgctgccatgtcaacacactttttccaagaagatacgccaacacgaagaaggtttcgcagcgttgtcatccctctttttctctcgctccttctacgcatgtgctgcagaagagactccgacgatgtgaggccactgcacagctggaaagagcggcagttcggaaagctgaagcagctgtaagcgtttgagtgagaaaacatggggaagcgacaacacaagcagctcatcatccgatcaaacattattcatttgttacataaaggagatacggagtgaacggtcctgctgaaaagcacacgtcagggacctcgaaccaccattcactgaatggaaacttttgaggcatacaaacttctgttcgtgaaacgggatcattgctcgcggatgatccccggaagcctaatgctcaagaacagctgtttctcaaaatgagtacatcatcgcggagtacaacgagtcgcctggaaagaaaccgttcccgtttacctctaggcccacaacttcacccttgtgtttctgtcaaactgttcgttcaggcagaagatgccgcagagagggcgagacaagtgaagcaggatattcaggagatgatacggatgaaagagagagagttccggaaacagtgtacagtaatgtgaacgattcatatgcatgaagtgattctgactctgtctttttcgtcagcgacgttctgattgcatatcttgactcacggcaatatctgcaaatttggcatcttgtttatgtgccgcctttatagtagaaaccttgcgttccggcttcagcagttcagtgtggcagtggtgtacaaccatcatgaggaaattggtcgcctgcgcctcataacgggtgtcttgctccgacatgtgctaccacagtgccatatggagcagcagcagcgatgcgatctataagcatgctagacgttctgttacaccttgtggaatggaattcctaggatttttggaagtgcatataccacgaggtggactattggtgtagttaagcgtgaacaggcggcatcatgtctacacaacttgttccccaacgacgattcctcaagggtctgccgccaggaagatatgctttccccgcatcctcactgaccccccaaaataatcactgcttcagaagggttccttctagaggctcctccacgtacatcttattgggcgagtgctgccatcaaacacgagggcgcaaatatttccgtattgccgacacggtcctgctggacggttgccaataaaccttgctgtgcatcttcaaaacaaataaatgagcttgagtttcgtctagtgactagtattcgaataacccgcgtcgaagaagaatttccaccaggctgcttaactcttcagagacattttgaaggcgctacagagtttcaggcatctgcgctcacattgacgggactgctctcagtgtcattgttaccatccatcgctcgcacttgctttaaataggacttatgcacgaacggaagactcggaaaaaccagaacgcgtgtcaaaagaggtaccggcttgccattttgttcgcctatccgtaccgacgggaggaatcacacctgaaattcgataagcatatcgtactagaacagcctttcctagccggtttccatcgtaattggccgtgataatattcaacacatgatggtctagtaggttctgttcgatgactgattctctaaatcccgcacatctgacactttcccctcacgagtcattcgaacacggcaaagatggtaacgtgagaaagtttgcctccaatagtggcatgagataggtctttttatctgagaatcctgtttgctccatcgtaccgaagctgctgccctgtgtggaaacatgatgtcgcttttcgcgactacccgttgaagagtcaaata

SEQ ID NO: 2801 - DNA, 2049 bp, Toxoplasma gondii
  source 1..2049: mol_type = genomic DNA
atgaagaggtgaagagatgcaaatcgagatacgcaacgttggtgtatcgacgaaatagatcgagataggtatatgcatatatgcatatatacactgagacggagttaagaaggttcatatgcggatagagggataggtatttatgtatgtatgaatatatatatatatatatatatatatatatatatatatgcatattgcgaatagagagataacagatgcatgtatatttgcgtaggtggagttaggtatacatttgtgtgtgtggattgatgcatgtagatgtctacggatggtaaaaggaggagagtggagagagatgcagaaacggataaaggcggccaaaggaattaacagatatcacatggtaaatgtagaagcctttatacctcgttggtgtggagacaaatgagtgaaagacaagtgaaggatgtatcctttttgaggcagtgggatagcaagagagaaaaccacaaatgattaagtcactctgcccgaggcttcttgagaacaccccagagccagcgtgaggcctcaacccccccccctccccgctgcccaccgaccgccatatactcgagcgcgaagtgttgcttccgtttgtagatgtcagttaaaagtagtctaaacgaacacaggaactctgacattcacaggctgtccatccgcgattcgacaagcgacaaagccgctctcctcgttctccaccgtcaacgctccctcgccttgaaggcgctcccccgccgtccagcggacagacaactaccgccgccttcaagacaaaaacgctgaagggaggaggagaacgactacgcctgccgttttcgtttttggagagcgtaaaacttcggtggttcttcttcttggccgtctccttctctgtcggctttccaggtttttttcgtttcttctatcgcgtgtatagtccacgccaggcgagtctcgcgccggccctttgctctggcgaggaaaagttgcaggtttcaaaggcgctccttggctgcgcaatttatatgctggaagttcttcagcgaaaaaacaaaaatgtgccgatttccctctttctcttgacgcgtccatctctttttcttctcgcgtctggagtgatttacgctcccgcaagccgtttttcctctccgctcttgcgaagacaaagttgaaggaggtctccgacggctggtagcgatctgtgctgcatgagaacaagtgaaaagcggtgtagcgtagcgtaaaacagagacgttgagagaactttcatttgaatcaaggaggtctacaagacaacgcaaacatcagacgccatctgcacccccttgcgccgcgagaaacatatccacgacttttttgagtgtcttcagttcccttgtttctgttttattgtcctctttttctgttcgtcttcttcgctgatggcttctcgcgtctccggtgtctttctttcagcaagtcctccgcactatcagcgaaaattgtctctctttctcttctcgagttccatttttccgcgcgcgagaacagtctggcggaccggcgcgacgtcgcgactcctgctctgcttcttctcgcgttctcttctcccttctctcgcctcctcgcctttgtgagcattcaccgcgggatgaaggaaacggagaggccgacagcgaggagcgaaacaaattctcaattcctcaggagacactgggctgaaacgcagagccgcggcttctcccccggccattggaaactctgctctcacagctctccttcccctctccctacaccttgcgtcgcatgttccttctcctgctgtaattggtgccctctccatcattaatcatcaccctctctctcctctctctccttcctctttctcttctcctctctctctccttcttcctctttctcttctcctctctctctccttcttcctctttctcttctcctctctctctccttcttcctctttctcttctcctctttctcttctcctctttctttctccttctctctcttcgttcctcttccccccaccggtttccctctctcctgccttgttttcttctacga

SEQ ID NO: 2802 - DNA, 1571 bp, Toxoplasma gondii
  source 1..1571: mol_type = genomic DNA
cgaactgacgagtgacttccggctcgcctctgaacacaaaacctcgggaggcggatgtcgaaacgcagacagcttcgtctcgtctgaatcgaccagaggcctcctccccctccccccccccgaggctctccacaccgcggtgacttgtctgtgcgcttctctccgtcaaagccagactcttcacaaagtgaagcagctgtctccccagagacttacaatgcatgcgcagacaatgccgccgacgtctcggttgaaccaaactgtcccgccgaccacaggtgtaccctgaggatgaggctggaaggacaactccattctctggatgtgaaattgaaaaaagtctctgaaaaagcatagccggctggaagaccctcgcggcgacgcctctcctctgtgatctgtcttcaagttcctctctccctcattgtgcctcgaacgtgtgtcgaatgcccttgttctctccttccttcttgttctctcttttcttcttgttctctccttccttcttgttctctcttttcttcttgttctctctttccttcctgttctcgcctttcttcctgttctcgcctttcttcttgttctcctcttctcttggttcctgctctacggttcctgttctcctcgtctcgctattccttctccccccccccggtgcttccttcggctcttctctcctcgttccttggctctccttgtctccttctcttcttctctcctcctgctgtctaccgcctactgcttctttccggcctcggtctctcttctttcaggtgcgaagagacgccgcagcgagcaacatgcaggcgcgaagatagtggcaaacgctgcgttgggctctcctccttctgtctagtcccccgttcagtctgaaaagtcagaaagctccccgcctgcgaaagcaacgactgctttctgctttcgctgcgaagaagaggcggctctgaaaaggacaaagacgacgaggggggcggcttgaggtcgtctccacgtggactctcgcatgaggattgagatcgccctcggctgacgcgccgctggcttgtagactcgcagagacagaaaacaacgaaaatgtgcagagacgagagaaaagaggagggaacagagacagacaaagagagagagaagacacaggcggtcctctctccgcgtaggcctcgcgcgagcctcgttacctcttctccgctttgtccccctatgtgaggaataaatcgaagtttttcatctcctctgaaaggcttcaggcagaaacaacgaaaaccggaaggattctggtgttttcccgtgacgctgagaatcacgagagtgtatctggcgacgctagttcaacttttcgcgcaaaaaagctacgcgagaggaaacagaagacacacactcgacgagacgagactagccgacgaagcaaacgagataaaaaacgcgtcgttttttagagtgctttgttctgcgcccttcctcgatttctggccattttcgcgtctttcctcttcatcttccttcgctctttctttcgccttcaacgactcttccacctcgtctttctcttgtggcacacccgacaaaaagca

SEQ ID NO: 2803 - DNA, 1384 bp, Toxoplasma gondii
  source 1..1384: mol_type = genomic DNA
cattcgcctcttcgatgatcggcactgcacaggtcggcgaaacgttgaagcgcggccggaggaagtcgagagaagacgtttcttctcccgaacacagtaccccagaggagcgagaagaagcagagagagaggacgaagaagagagagatgacggggaaggagagcgacagcctgcggaacttttggactcgagtttgatgtcgacttttcctttcttttcctcagtttttgtcggaggagagagtgtggcggagggagagagagaagaggcattttcagtcgcttcctcctgtttaacgcgctggagaggctccgcgctcgcagcggcctgggcgtctccctctccctctttcttgtctcgctgctcagaaggcgacgaccgagacaaaggcgcgagaccagcgacccgacggagacgccgtggatgcaaagtgcagctcatgcgtccgcacatctcggcgagcagcgaagccttgcggagacgcgcatcgcatgcaagctccggcagagctcccagagttgcaaatgccagcaaacctgcgaactcgcatgtatggcgggcagacagccgagcaacgacggagagcagaggagcagagggaggagagggaggagacaggaaaggaacgagagaagagactccctttagccgtggctgccagctcagacgccctcaagctcaactcgacagacctgagggcggaagaagcaagaccgggaggacgccttctgaccgacaggacgaaaagagagacaacttgggcgccgcgctttcacaaagcaaggaagagtttgggagaaataaagaggcggaaaagcgactcaaaagaacagcgttgaggcgcagagtctcaacggggtgtcgtgaagcggtttgaaagagtcgctctcgaaagagccaccggagcggaacaacgaggaaggaggaaagagcgcgtttctacacaataaaaaatgaaccagagagaacaagaggaggaagatgcaaagctcgccgctgacttcgttcgctggacaagaacgagtctacacactcggtcgcgcaacggctagacacggcagagctgtccagaccagcgactgggtcggttatccatacatccctcgcgttttgtgtacagtcaaagctctgtctgttcatttggcgctttgctgtttttcctctcgcctctgcgactcttctccgagagaagttcaaggattgtgccgagtctcgacgagtgctgtggcacccgcgcggccgccagctcgcccgccgcatgcagtcggggcgggtggaacggaatataagccgcgaagagagagggtgaaagtggagagaagtccagagagaaaggcgcaaaggcgccgaggctcgagaagacccccactcttctttgcgtga

SEQ ID NO: 2804 - DNA, 1606 bp, Toxoplasma gondii
  source 1..1606: mol_type = genomic DNA
atgcatcgaatgccgagaaccaacagacacccgtgacaggcttcggtggggagctttcttgagtccttctttgttttttttgtgtcatacattcgggtatcaccatagcttaccgtttggactttctgagatattctgttgcaactcacaccagacagtacgcaaagaaattggaggacccaggatacttgcactactactccgcaagcttctctctctctctaggcatgaatccgtctgcccgcccgatacaaacatgcatgcatagatgcatacgcatgaataggtttatatgcaggcagcggtgttgtgtatgtttctacgcgtggaactcactgctctctgtcgatacgccgccttctttggcttgaggactcctgcgctgtcttgccccccaactgcagccgcatcttgcatgcaagaggaagaacaagctgaagaggaggaggcagagagagaagagtctagggagttggtgagacaggcaggttccattgagctgtgcagcgtcgcagtcctttcgagagaatgcaaacgcatgtctgtttcgccgtcaggaagccgaagaagcagtcggcgaagaaaggcaagatgctgacgaaggaggtcagacggaggaagagaggaagaagagcaagaacaaaagagaagaagagagagcaacgacagagggaagaagagggagcaatgtcagagagggaagattcgggggtcgagaaagagctggaggagaagcaagactaaagaagctcccccctgcgtcacggactgttcttttacaaggatcaaagaagacgcagacgaacgtgagagaagacgaagatgtacatacaaaggaaaacggaggggaggaaaaaaaatctttgatcttagtctgggtgtgcctcgaggatcccctcgactcgttatcgtcgccgccaaaactggaaggccttcctgacggagttccttcagagcccctcagagggacagtgagacgcatgcaaaggcgcaagttatatttgaattattacaagctcatgtctttatgaacatttaaataaatactttaaaaaagtagagtgcatgcaagtgcatgcaaagcctcatgcaacgcgacggacgcgagaacgcggagacagggcagttgaacagagggcgtgagagcgggagccgcttttgtgcaaagcgtcgagactgatgaatgattgaaggaacgcagtgggtggaaacaaaggcctgaaaaaacttgttcattcatgcctgtgactcagacgaaaagggtgcccggctgttcttaccgagcgtcgctacgccgcagcgctggccctcgagtctctttctctctttctctttgctgaccgaggaagtctgggaagagtcgccgagaaagctcaaagagaacaacagagagaggacgaacaaagagaagcaaatggctgcgggaagctcaacggcgagaggaaaaacgaagggcaacgcagagaactggaaaggagcgaagaacaagggagagagaagacgcgagagaggcaaagggtcgagcctttctctcgcgaagacttggaattttgactcgagtacccgaagcgctgtatcgtcgtcctttccccactgcctcacctca

SEQ ID NO: 2805 - DNA, 2881 bp, Toxoplasma gondii
  source 1..2881: mol_type = genomic DNA
aaaattcaggaaggcacagcagcgcttctgcatgcacaggtgaaacatgcggaagagacgagcgagagcaagcaggcagtccccacctgcagtatgtagacagcgcatggagcgatgatttgctattgtgatttgttcgctttttcggtgtgccgacactggcgtgagagaggcatctcgttcaccaagaaggacaggcactgcgtgaggcctcgagagaaaaatctttttccgcgcggaggaacagaacgagtctgtatctcgtgacaggcaggagtcctagggaagcataggagacagaagcaatgctgcaggcagcacagtttaactctggagaaacgagcacaaaggaaatcctttttaaatagatatccagggagagatgccaagtgccttctccgtacgtcgtcgctccctgcgtactctaaagtcgacgaatggctctagacagtagagactcagctttccctgttttccaaacttcacactaggcagcgctgcggtgcttgtcgttgaggaatcgacgaatgcttgttactgttgttctacttgcctcctgtcgctcgtctttgcgtggaagcgcgtccacgaatatagcgctagaaaacagccgacagttcgtcagaaacagagagaaagagctcgacagagtccgcaacgagaaggggaggtcgctgcaactcgacagttcctgttgcccatctccctctctccgtgtcgattctcgttgtctatcacaagaaacgagggaagcctttgcgcagcaaggttacgctcattagacgcgttgacatcctaggtgttgaatcgtatctgcgggacgttcagaaatccgcagagttgccccagagacacaatcgatccgtctgcggagacagcaaaggcccccttacaggaggcactctgatgagagcccagggtcgctgtgttggtggttttcatggcttttaattggcacacagcgaacaactctttcgggaacagcagactgcgacgctccctcgaacgcgccttcgaggtgagagaaaacatgacacacctctttctccaagtcaccatgaacgctctgaaaaacactcaacgccattgacatatatacacaatatatatgtatacacatatatctatgtatatatatatatatatatatatatatatatggtgtggggttctgcggctttgtttggttgtgcatgcagcggatatttgtgttcatgatatgtttgtgaaactgctgcacagggcgcgtaggtggagggcgttagtctccgccgtatagagcccgatggtcttggggataattcactcccgctgtgaggaacatgcgtcagatgaagagtgcgaagcaccgaggagcggcctcaaacctctcctctaaggagaagctttctcttcaagatagacggcgaagctggtcatcagaaccgcgtatggctttttattatgcgtttttttcaagacccacaaaaacagaaaggaagcgccagtcacaagccagccaagcgagcatggtctagtggctatgacgctcgcctcacacgcgagaggtcccgggttcgatccccggtgctcgtatttattgttaatctttcctcctggagcacaaggactttttgattgttcagaaaaaggtggattgacgctacagcgtattctctcgagagtcatcggcaacaggtctttttttaacggagtgtttccccccttggtcgcccagggatgacgcgggagcggggttgccatccaagcggcaactcaatcattttccggagtcgaacgaggaagatactctcttcttcggctacatgtcacggcgtcagtctctctcaaagtctctgccgccagtctttgtgagttgttcagcctctcgtctccatcgaaagaacgcaaactgtgtccgtgctcgtccgctgtcttaccgtcgggtgtagggcccgaaggagagagagacaccgtaccaaaggactgggagcagcctcgccgtctctctctgttcttctcgcgcctaagtttcctcttgcgttcttccgttcagtcctcttatggacgagtgaagctcttctcgacgagaagataacaggggttcgttgcgtcgcggcactgcgcgttgtggagacagagagacaccgggaaacgcacaccttggagcagacgctcccgctcgctgcgcatccagagagagaaacgaggcagagtcttctctcctcacttgttcagcaaacaaagatggaacttccagcgagacacggttctcgtccacgctccgttttccctctcctcctctttgtgtacccctctgtgccggcgagttcgctcgaccgtcctgtctgacaagacacaagggcgcgtcgtggagaacagacccaaacaggagggtcgaggcttgcttctggaccccagggttttcgaattttctcgtctctgtctccgcagccagcggaaaaaattcgccgattctgacggatggataccccaacagcctgcacaccacagaatgagaacgttcgctgcctacgcggcgggtcgcaccatacgtcttcctttttccccctttgattcagtctaaagcagacactctctccgatccgcgacgataccttgccttctccctcggctccgaacctgctcttccctaccttcttcgctgccgtgtttcctccctctcctcttgtccccatagtctgcgtctcgttccttcgcggctgtcggcttttgacctccctcttgttctccgcgtacttattcctcccgtttcctctcttcttttctccctcctgttctctctcttcttctctccctccagcttctctgtggctggttctcccgcgtcgcggcctcctctgtgtgcggccggtggctgtcgggtccttcttcgtcgcta

SEQ ID NO: 2806 - DNA, 2280 bp, Toxoplasma gondii
  source 1..2280: mol_type = genomic DNA
aatcgtcatgatgttcaattcggcaatcttcttcctgatggtcgtctgacggagtgcacgaatcacattcctgggggcttgtcggcttttttcaggcactcgaggaattgcttttgcgcatgttacgtttggaagttctctggtcgttactctttttagccggtgggaagtgaacggtgcagataacagtagactgtacgttagcgacgagatgccggtcaacagtgcgtgcaggagctgtgctgtgcagtaacgatggaaaaactgcggcgacttatctgcgcttgtcagtcggtatctcacagaaatgccggagaaaatctggaaggcttgtagtgttttgtctgtctctgttgtagggcggagcagagatgatcatgcgagcgcgattcacgtcgtcatcaccggtgacagcgtctgcagcgtaccgcaaggaattcggtccaatcagcatgacgttcgagatcccgatgttcaatgtgtcaaatctgcaggtacgttttttgaaatcggagtgcgtgtttgcaatgtagactcgctttccttcctgcctcctcgtgtttttcacaaatctacggattttgcctcggacagctgaacgcgaatgtgcccccacccgtccctgttacgcactcccgacgaggaaagatacgctcgaccgaggatcgcttcgtcgttcgcgcttccgagtttgcatttcagagcaagtgaagagaaacatgaggtgggcgaaaaggacacgagcagaagtggaaaacaacggaacagaagaattgcttaaagttgcgtcttgcgtgcgtggccggtggtctttttcggcggatggagaattgtgggatacaaatgccgtttacaagagatgaaggagaattctctgaagacagaagtacggatgctgttgtacaactcgataagccccatacaatgtcgctgttgtggtggtctacgctgttctccctgttcaggtgcgctacctgcggatcgccgagaagaacggagtcgcgagtccattccgctgggtccgctatgtcacccagtcttcctcgtacatttgccgggtgtgattcttttctatcctttttcaagcttcttggaccatgtggaatctttggaccgaaatataagtgttcagaacttcttgctggtccacagaacgctcaggaatgtcaatatgtgcaggcgtgttggttacgatttcccacacctctagccaccgacttctaaaagtgcttgttagcgaatgagaaacttaaagatgtggatggaatcatctgtctgagaattgtttttggaatggcacaacgtcgcacgcagtcacgcgttcatctttgccatgcggtacgtatgcgcttgtcggctactctctgttttttgttcaccaagtgtcatttccacaccggttatgttctaggcgtaatagatggattatggttattgctcgtattaaccgctagagaaaactcctcctcaaatgctagtatgatcggtaacatcgttggcttttagcctattcaaactactgcagacgtattacatccaccatgagaacgcgttaagacggtatgcatcctgagtcgagtcaactactggcagcacatcgcctttcggcgttgtctcgttctcttgtcagtaaaacgagatgcaacgcttgatgcgcacgtggcaagtgccgcaaagtttttgctcagctcttctgagataatacccggccagcggtcctgaatgcccctgcttgttctttcgccgttagtgtgaccttaaagctcgataagccatagacgaatcgtccaactgaattcggtatgcatttggcatccatcattgaagtatgtggagaaaggcaactttaagagcggcgtctacaaccgcatggttagttagagccatttaaatgtgagtaaagggtacgtgaaacttagagtcaaggggatgagtgctacgtagacatattcgcagtggttgagatgtgtgtcacgaacgaagcgacggcatggcgcgtgatctgaacagagtccaagaagctccagtgacggaaactggctccacacactttgtagaagctggcaagtataaccgtgtaactctggcaacgtacaaaagcacgcacgagaagtcgttgctgcgaatgcaagtcgaggaaaatcagggaacgaataaacacaggacccggacaggcactaccgcacacggcagaatagcgatatcgaccgcggagtcgatacaaacctgaactgccacaagtggctctgacgaccacgcttctggcgaccaagggtttcg

SEQ ID NO: 2807 - DNA, 2339 bp, Toxoplasma gondii
  source 1..2339: mol_type = genomic DNA
gttcagtggcgtttagtcaagtcacttttatagaggacttcccgaagaagactcgcagccgcgaaagctcggtttcttcttgggagggtccggggctgcgttgtttgcgcctcgaggtgctcttgtgtcgacggcagacttctctggttaaagaaagttctgcagcctccgttggaaagtgtactccatggtgaacgaacttttttgacgggtgataaagaactcttttcagggatctgaccccacaagttagctgcgtcttgtattccggtgtacatacaccggggtttttgccagtacgaggggcaaccgccggttcagacgcgtctttcacgcagcctcatgaatggctttttgtgaacacttcctcacacgaaatggaaccaaacatcattcaggataatagtccgcgagttccacgaggtcaccttcatgattgcacgccggtaaaacgggtttttcacgtcaaaggttgccgattctatcgttgaacatgagcacctgtgcgtagcatctgcgcaagtgtcgtgctactcactgacactttctgggcaaagcgtgtctgtggcgcagacatcagcaaacgagattttctgtcacccactgctagggagaagtttctccgccggctgcaattctcaacacttcgattctggattttctctcactgtacttgattaatttgcaccgtcgcccgtgaaatgcaaaactgcccagaaagtcagaactgtcgatcccacggcacgtggcacagaagctcccggtgtgtcacaggacttggtgaatcgggccctgtctctgatggccttctaagtctctaacataccttttacctacaactgtacggaacgtaacaaacctccaggcaaagaacttgatattgttctaattccccgtggtaaacacaaaaatatacagagcactacggttgagattcaaccgtgtgcacccgagccgtcagagcgaagagttgtcgggtctcgaattcctacatcgacataagaagtacagagagaaatgggtgtgaatgtgcgacacagttcgttctgagattggtttgggacagcgttaacactgtgtactaggctacaatgtagtgttcaggtacgacaccgcttggttgtctggtatagtctcgtatttccttactacagcggctgccttcctcggatatgtcctaccacggggacgaaagagtttctcgggtgctccactcatgccactcactttgaagcacaggcctggtacaaataccgtgtgtttcgaggtgcgcgtatttgccgaaagttgcaggtcacgtcttcatgtacttctaccaccgataggtgtcagcagaccaaaggtatgccttccacaaactcgtctttgccgcagaactcgagggcgaagagccaggacccagagccgtggaacgggtctgggccaagtgtggcttgcacgctgtcgcttccgagtgtgcaaaaacttcacggccgcatacttcaacgctccaccctcctgaacgtgctcacactcactttgtttccttggcttgtgcgtttgaatctttgtttccaactggctttttcctgctgcacgcgccactctgtcggtccacacagctgcggtgcatgcgaccgttttccgcgtggagtcggactttcgctgtatttgcttctggggggctcgagttttctccccgggtctcgacccctttgcccgggctcgtgtagtgtctggtaaaagtagatgtttagcggcttctcggaatgcaccaccgagatttccgcacgcgcatgcactccgttctgcgaccgtgcgagcgggaggccgtcacctggggttcgcggggacacggtgtcccctactaaaaggcgagggtgaagtgcgttgttttcgcagtcggtggcggcgaaaaagttgggggattgtcggctcttctctctgtgcaaattgcgtgtcggctcagaacgcgacaaagacatctcgcgagacgatttgcttgcgcccgtgaaaattcgaggtccaaatcatctttcgaggcgtcctgggcatggtcgcatctgtggtgtatgtatgtatatgtgcgtgtggcatgtgcgcgcctatccgcttttcttcgcgtcctttctcagtctcgcgcctcgtccttttcctgtgcgcttctcgatctcgcgtttcctcgccgtctctctgactgtgttctctgccccgtctgtcgcgtacggcgaggacctggagcacgcaggctggcattcggactctctgcgtggagagtctctttcctgagtgccgcgttttctcgcgaaacacccacttggtcgaccgcgattctctgtctgtccaccgcgttggcaaaa

SEQ ID NO: 2808 - DNA, 2703 bp, Toxoplasma gondii
  source 1..2703: mol_type = genomic DNA
tctctgtgacaaccttttctttcagttctctcctctctcctggtctcttcctctctctgcgcctttctcccttcccccttcggcgcccccgctgcccgctctcggccgtttccccctacctctttctctgtctcctcttcctctccgtggcctggcagccccccacacacagctctcgtttcttccccgcccatgtcgcctctttctcaccgagagcttctcgcttggcagctttcgcagcttccttcgctgcctccttttctgcctttttctgcgccttcttcgacacgggcgcctcggctacctccgcgaccgagggcgccgcctcctctcgcttcggcgtctcttccggcatggggggcggcagagaagacaaacaggaaaacgcacggaggagagacggtgttgtcggcgaagaagaaaccgaaacagctgaaggcatgcgcctgtcgacctctgctgagtgacccgcgagagaggaacagcgagcagaggagaggggaagactccgtggcctgaggagggcgctggacgaacggaaccgcgagacgcctatgaaggagacacttggtttcaacgcctttgtggggagtgaagagaagcagcgagaagtcacgggcgctctagctgaagaaggcgagacagaagtgaagcaaagagaagaagaaggaagaacgcgcattcgccagttctctttgtttctgccaaagcagcggtcgccgggttcggcggcagcgaaagcagaagagcgaaacggactcctcctacgagcagcacaagacgagagaaaagaagcagagagagaagagagccaaggaacgagaggtgcagaagggggagagctggaaagctcagaaactcccgacgagcgcagcggggagaaaggagaggaagtcgagaggaaaaagcgagaagcgggccgttgctgaggcaaaaaaacttcttcagtgtcgatgagaaacaaagagaagataaagagaatcggagcgaaacggaacggtggaaatcgcatgcagagagaacagagaccgtctctctccatggactgcgttatcagctctggaaatcgtctgatccgcactagagaagtgaaaaaagttgcggtttgcgccttgtttctgtgtggctacatgcacatctcttcttcagactgaaggccaaagagagcacgaaaaaagaagaaggcacagggaaaagtcaaaagaaatggggggcggagacggccgtcgcgaagcagcgacggacccagcgcgttccacggagtactcatacaccctccaggaaaaaagtgaaagaggacgcggctctccacgctcagacgccacaagcgagaacaggaaagaaaacaaaggagaaaacgagggagaacaagcagcggagatgctgtgttggtcgcccccctgtctctgtgcgcacagtcgactcagcgggcattctcggcgcgtatgttcacctccgagggatcccagaaaacaaaaaaaagaaatagaatacagagaagaaaatttcccggtctccatcggagaagacacacctgcgcttctctctgggctgtttgcgtcgaatccaatgagtctccgcgtttcgtctcccgcagagccgacggactgttgttcggacattgttttccgaatataaggcggtctcagcccctcctgagaagtgtcacccgctgaccgaaaaacgtttttcttccggcgcagagttttctctctccctcgcatccgccttttctcctcttgatggctgcgttcgcgttactccatgcgttttttccgcgtcgtgtatccggtatcctcggtcggtttccctcgctccgtcgaaggagatgcggcactgcaagccgcccggcgcgttcccgtccccggaatggcgtgaggccctgttcccatctttcctttgggttctgaaaagtcccgctttttccgagtttttcccccaagtttttgccgttttctctccgggtttgacgccgcacgcgcactcgcgcagccagagcgggtcttcgttgttctttactgttttgtgcggttttctctccctctcgtcgacgtcttctcgacgacgccctaaagcctttttcttccaattaaagcgcggaaacgttttttctctcccgagacacctgtgaatagccgaggcgccgcgacgcagcagactcgcagccggaacgcttgcctgcgaaaaacaagacccactgaaacagaaaactgaacattcgggcgcggtctatcgccattcactcgcaactgtcgtgaacctgctttgtagagacttcatcgcacgcgtctctagacatatgtaacctcccagagccttcaaaagtggaagtggaccctccctgcccataatgcgtaaatgcttctctgcaagtccggatgacgccgcgtgtcaccggctcgactgcttgcgtgtgtatgtggagattgcttccatcaatttggatgaattcgtcatctgaagactagctgcaactctttttttacgcatgcatgaacgtcttcttcgcgtggaaacggcgcgaggtctccggattgctcccgttctcttcgtcccctgtcgtcgttcgcgtcgctccttctgtgcgcagttctgtcgagacagtttctctccaatcaggtatcttcgccttgctcgttcgtgcactgtcagggggtcttggtcgaattcgtttccagttgtgacgatttctctgacgcagaa

SEQ ID NO: 2809 - DNA, 1241 bp, Toxoplasma gondii
  source 1..1241: mol_type = genomic DNA
agttaaacgattcgagacgggaaacactgacgcttgacaagtcctacctgtttaatcgagcctcctgcgccagcgtccagagaggcgtccgaaccatctgaggctccgacgctgcctcgaaatgtcttgactttccatccagcctgagaagctcccttctccccttcttcttctaggcttctcttcctgaaatctaaagcggacgacccttctgctggatttgttgacgagcagaaagatgacgaagcagatgaagaagcagatgatgatgatgctgatgatgatgatgatgatgaagaacgacagatccgccgaacaggtccatcagtcgggacaatgtaagtgacaacagtccccgaacatgaggcagagtcgagaggacaggatgacgagagagcggtcatggtaagagggaggctggaagtcgaaagagaagacagagacgagggaggagacagaaacgaccaggaaggatggcagggagacagaggaaggatacgaaaagaaaagaatgagaacaaacaaggagacaagaaagatggcttcgtcgagatttggaaggagagacggtagggtgggaacaagcgaaaaagtgacttctctttcctctgaatgagatgacgaagatggagagactgagggcagcgcgagagagccgcccagagacgaagaagatgcgttcgatgacgttgctggcaacaacacagagagtcggaaaaacaggggaagagagagcgaactgactaggtcaagccacgagcggcaatcgacacaccgtaatcggaacaagaaatccgaagcaaagtgcatgagaaacatacttcttcctgcctacgagttatcgctgttctctctcaccgcgagggtacggcgaagagacgatctcttttcagtgagtttttgaatgcgctccaatccgaggtgagaggagaaaagaggaaagtgactgaaacagacgagaagagacggcagacagcatctcgatgttcttgtctcctgtcgatattgatggaaataaccgcatgcgggcgcgactaccgcgatttgcattcgctcggacggcttctaggcagcgcttcttctgtctccgcttctgagagaaaaggaaaacgtatttttttaagtttgttaattttctggcgactcatcgcgccactccacaatatggagttctcgatggagttctcgacaggcacggttccaggtttttcaggtcgtgctgcgtttaacgcattgcccca

SEQ ID NO: 2810 - DNA, 2043 bp, Toxoplasma gondii
  source 1..2043: mol_type = genomic DNA
gtttcgcatgttttctcagtccctgctgcgtcgtcggacagcgacagaccatgtctcgcgcagcgaaagaagtcgaagaacagcgagaagaagaggaagaggagcaggaagacgaagaggcacaaacgcgaggaagggcagcggaagaggaacaaggagcagctgagaagccgagatgcgtgcgactggattggcgacgagaggcctgagagaggagagcgcgagaagaccgcgagcacggcgccagttgattctccaccgaaagttctgccgaattttgcggggacaaaagaggccgggccgcagaagaagcagcgagatgcgaagaagagagacgagaagaagaagaagcagcgagatgcgaagacgagagacgagaagcagaagaagcagcgagatgcgaagacgagagacgagaagcagaagagagacgagaagaagaaagacaggaggagtccgagtcatgtaggggggtggagagagaggtggggagacgcgtggaggagacaggtcgaaggacggtctctgacgcgtcggacgcgaggagagggcaacaggatggagaagaggaagcgagaaaagaaagaggcgctggatacgagggggaaacgggtgagcaggcctcctcaacggaccggagaaagtcaggaaaagcctccttcgaagaaagctgcggaagtcgcgaggcgaacttgaggcgtgtggcgcgtcctgccgcctctccaaactcctccattttctttcgccaaagaagagagcaaacgactaagactttagcatctgtaatagaagtcttttcactattaagtattacgaaagaaagtcgttttaaaatcttacgtaaagacaaagttttagagtgaagacgcgagagagacgaaacgagagagagcgcctccaagacaaaggagctgcggagctgagaccaagacggaactcacaaacagagagaaaaggcctcgtcctgcacagactctgcgaagggaagaaaccgttaaggacgtcccttggaaaggaagcaaagcagtttcttcagaggctttcctaacctccgttttctggggaggacattctgcgcgttcgcccaggtgaccgagagctgcgacaagaaggggagctgtcctgcgtttccggtcttcgcccttcacagtttctgcccagagtgcagccgacgtggactgacaagaatcaacagcacactgctggaagaaaaaagaatttgcatgcgttggcttgcagctcttgaaaatccgagcaagctgaatttaacgcgtgtatataatactcacgagaatgctcctcaaggtctgctgagacatgtatgtcgacttcctgcctgaaactcgccgcgagtctcagcgagaggacgccttctccgcgagagacagacgcagcgcggcttgtcttgtttcaagaaagaaaaaggaaattctacacatcctcctcggtcgttgctgcttcgccgacggtgacaggttcccttgtcgagacactgccagagcaagctgggggccgccttttcccttctcgcgcatgcgccgccggccagctgaatcttggcgcaagtggaaaaacgtttcgttttcttttttttccgggaaactggcactgtcttgacactccctcaagcgaatcgagaacatgcagaaagaaagcaagaggcgacaggcgagaggcgacaggcaggacgctttttcatccgtcgccttcatgttcgtctcctttctcttttctttagatgtgatcctctgcctccttaccagcctactcatctaatttgttcttctctctagcctctccatctctcttacacttcctctcgccttcactcttctctctgtctccttgtatgtcgtctgtttctttccgtcctcttgaattccggtcgatcttcgcctgtggtctccgcctaataccgtcgtccgttctcgctttcagaacttttgtgtttctttctctctcgcctcacatcgcgtcttcggcgaaagtctccactcttctcctctccacgtcctttatattcacttcttctttcctccgcaa

SEQ ID NO: 2811 - DNA, 2418 bp, Toxoplasma gondii
  source 1..2418: mol_type = genomic DNA
ttttgtagacgtcgacaaggagcagatgtgaccgattgttcaccagtctgcgtttcgtctctccggaggtcgtcacagggtttatgttcggcaggatgttcagtttttttccctggagctttctgggtctttcgtttctccgagacctcggtattcagtcacaaagaagggccgggggagtcgcgtatcgtttgtgtttctgccgaaacgtttctgacagcgttcacttcccggtctcgaaggcgaaactcggaacacctagccgagcaggtccgccgctccagaccatgtggtgacgctggcacttctgctcgcgtagtccagttcgctgtctccagatatcctgtttctctgctcaaagtttgttaaagatgtcgttctcctcgtcggcgaactgccggccctctttgcactcatctgacaagacggtccgtcgaaaccggaggacctgcgaattctctggaggccatttaccgctgccctttagaaagcaaacatgtgagatgcagagcacaccccgatacacaagtcacagggtccacagcttctccgttcctggccgtccacgcagctgggcagcatttctcttccaaccccgacgtaactttgacctttcgattttcgtagctgtcacgacgcgcgaaaatgcgcggaagtgctgaaccgagtttttcgaagaacagagagtggagtggcacagagacaagacaatttgagattctttcgtggacccccttcaccgggcgaccgttgtcggtttcagagaatttcgctcgcaggatggtggcgcctgtcccaacatgtgaggagcagtctgtatgcgcatgtgcacaacggtaagcaggtaagaatagagatgtgcatgtgtcgagagttgggttactgtctgcgagacttccgctccgagtacgctggctggctgtcatctacgctcgctgcgaggaggaacttgcgtgtctgtatcaggaaataaagaaaagagtcagcggcgagcttctccaccacaccccgaagacggggttgtgttcactaaaaccgcacagaaaacaaatgttggtcgcttgacgcacgggtgcgccgactgtacaagtgtaggacgtggaaatcgttttcgacgcttttcctttccgttcccagtctgacggcttcccggagtgtttcaaatagtgtacacacatttttgcgccgcagtttcccggtaaaagctttcgcagacgggtgagcacacatgcccgacttcttcgagactaacttgttttaaagtttcagcaagtccgactgctccacatctcgaaagcctgcatatgtgctgtatccatgtgatcctcagcgacctgtggcgagttttcttcactcacaccgctcgtcatttgcagtccacaagaacgatggcgaatcgcttttgcccagtcccttcgaaagaacctcagactgctgacgcagctctcgaggttcgctgcagctgcgtttctccggcaacttccgctggaaatccgggtggaaacagtcgcctctacagcgggcgaacctgccacagcagcctcatccttccggagttttgttctgcccattccaggcaaaagactgcttgaaaatatatgcctccagtgcgcgaggaccgacattactttctccaatccttaattcgacccgtttctccaataactgaattcgaacacacaacgagacaccccccgtcgagacaggaggcgtgactcctagccctcccttcccgtcgactcgagagtttcagattcgaagatcctgccggacagatagtggcagatcaccgagtcggcttgtttttcattttcttcccaagaaaattgtgcgagaaatccagagagatggttttttgccgcggcttttacgattcgtgtctcgtcctagcgacaagacaagggtgagcgtttcccccgtctccgtgtcagtttctgggaaacactcgcaatgacgatttccctgccaaacatttgtgatttgcagtgagcacttggccgaatcgtcgcgccttcccttcgaagtctctctggaaacgtctcggcgcaggtcacggccgcgagcctgtgcatgcacctcgaggcgctgacccttgccaggttctcctacgcttgttcgttccgatttcttcctctgcccgtcaactgaaaaattcgcttctctccactaacacggaagaactccatccgctgaattcgctactaccctgcgtggagatttacggagtccgccatgcaggacagagtcaccttttgagaggcggccgccctcgttctcgttttccgtctctccctgcccgagacttcttagcgtgcgacgaactcaaacactcgtcgttttctctcgctttttagggggggtgcgaaggtccccgaattctctctccccccgtttcgctggaagcctctctctcgacaa

SEQ ID NO: 2812 - DNA, 2364 bp, Toxoplasma gondii
  source 1..2364: mol_type = genomic DNA
agttccagcgtcttggatgcgaacgaacaccagcagaaacacaaagtcaacgcgcgagcctgcccatctgcagacatcgcgccgtttgaggctgtcgaccgacgcgtctcatcgctctttgctccttcgagcgaggcagaacctaccgccttcaagccgaacatgatgacggcgaacggccagtgaggaccgacgacgagcacgaggccccccggacgaggactgaggtagagaatccaaatgtttccaatcttctcgcgaccccacacaaacccagttcgcaggcgagagagacaaaagccagtcggccggggaggagaagccacggaacgagaaggagaggaaggcagagaaaaaggagaaaagggggaagaagagggagagccaacagaaggaggagaaggagaaggaggacgacaggaaggataagggagaggatgagcagaaggaggtagagaaagagaaggagccgagtttcgggagggagaggcaggttcttcgtgatctgttgctgaagacagaagcgacgagcgtcttgctgcgagaacagacgcaacagacggtgaggaaggagaggcagacggggagaaagaggacgggagaagaaagccgtccgtcagaatcattgcgctagagacctgcactgacgaggcctgcgacgcctcctctccaaaacgcttctcctccctctcttcgctgctcgcagccgccctcctctcgatgtcgtcgcactgcagagtctccattctcagagaagtgcaggaccacagagagagaaagagagcaaggagagagaaggaaagggagagggaaggaaagagagagggaaggaaagagaaaacaagagagaaggcgagcacgggcccaaggggctggtggaaaccaggttcgtcgtggacaggagttcatccgcaaacggaagcgagaaaacacgaggtaggaggaaaaagaagactgacgtgagagagagcttttgtctctgaaggcgaccggcatgctggagatcgagagaaacgcagacttgattgcaaagcaccgtcggccgtcgagagtcggcagaagaggagtttttctactggagagcagcagagttagcacacacccgcgattaagccttcgaatgatcgctcaatcgcctcctttcgcctggttgaatgggagcgaaaagggagctaaaaaaaggcaggtcgaaacgcatgagagaagacaattcggcgtcctcctcttgcccccctcctccccccgtctcttaagaagacaggactggacagcggagagagctacgaggcaacgtgctcggtcttgtttccatctccatgtctcgaggatggagtttctgaaaacaatcaacttttgcgatctgtttcgcccaagtctactttccagctgaggttcagcgctacacgcgcaagagcagtcgctgcgttgtttgggtcgcatcgcgagacacgaccgcctttcgccgaaaggcctttcttcatatcttccgagaagcgcctttccagaagtcccgaggctctctttcttttcctctactacatgacgcacaggagaacgaaagaggactccggtgcgtggtgagaaaaacgggaggcgcaggcggcgagaccatacgcaaagtcacctcgctttcctcgctgccgtatagagggtaccacacacgacgtccattcggttctccttctgtttcagaaaggtgcgtcaatcctttagtgttttgtgccaagagggcggcattctttcgtctcccagttcctcgaggccgacggaacagcgaagcctctgcacacctcgcacagagaagccgacttcttcgctcgcgccgactagcgactctcttctcgcgccgcgacgtggaggaaaggtctcgcgtccagacctttcaaaaaccggaagaggaagcgacccgcgtgcgtccttccccggaaaaagaggcagggcgcctcgtagccccccaaaaatctcttttctccccactcttcaggggcgtttagctcgagaacggcgacgacgacgacgagagtggaaccgggcacccaactgggggttccagggtgtgtgtatgtggtgtatgtacacctcgaaacggattctgctcttcttgtcggaagacgcgtggtggtggaacggcatgacgcaagaaaagaggctacccacaaacagagcttcctttgcgcgtcgttttcccgcttttctcgcttcgtcctcagcatcgttctctgcgttccttctgtgtgttcggctcttcgtctcttcgcctcttcgtctcttctctccctctcctcggttcttctcccctctccctctgagacttccttcgcctcttctgcttcgccctcccccttcccccaccccccgcgacga

SEQ ID NO: 2813 - DNA, 2872 bp, Toxoplasma gondii
  source 1..2872: mol_type = genomic DNA
cctgatcatcaggcggagaaacgccacgctgatttcttttcttattcccctcccctgagaagcttggaggttcgtgggttcccacctgcagaattatgtgtctgtttagaacgcgcaggacccaccgagggtcaccagtggcatttatttctagggcgggaaaacaggatatcgaacgctacacatacctcggtggttcgcccattgctacagaatatcagacataacacaagttcgctgagttcaataatacgcaaggttacactgtggcttggtttcaataccgaagacaaaacagtgggtgatgcatggcgtctgtttttggtacgctaaacacttgcgtgcttttgcaggtcgcatttctgttcgccccctcgattaaaattccttaccgtacagcgccttatagtacgcaccacgacccgactacagaaaacacagaagaaccacaaagacacgattccggtacgtgtgatatggaaacaggacaccacatgtgtggggctcaacaaagcctcttctgaacagtcttcctgactattcaatagtggatacaggcgaatacctgtcgcgttttggcttcgctcctgaatttctagagatccagtaacgtaacacgacagttaggggctgggaaagcgatccaagaagacgaagagccagtcgcagtccgacttcactcgttggagagccgcgagtgccagcgcaagagccagcagagacaactccaaccttcccacgatgggacgaagagtctgacacagtaaacgcagtgtatgtacagctcaccatcttggtcacgctcggactctttggacgcaattcagctaaagaccggcggcaataatcgggcaagcgggtggtgttcagcgagtccgggtcgttccagggaataccgcaattctgagatgcagcaagaaggacaatgagacgtcatctgcaacaaaaagcggtgcttaatatttcctggcttttagtggaaacgcggacgtgtgtgatttaccgctgtgataggcttacacaaggttctctctcgaaacatcagttgactcgcagcatacaagttgttgagagagaagggaatcgcagcttggactgaactgcagtttccagaaggaagaacgcgggagagagtgggagatgtatagcgaagaatcgatggagggcagtctgcgtcactgaaagtgccccgctgtcaaataagccctcgatttgctaccagagccttcagcacaactgaaatcagacctgtttcgagttcggacgtcagcggccagcgactgtttgataggaaagaccgctgtcttcctcttatcagtgcaggtcccgccaagacgcaccgcgcttctctcgatgttcgcttgcttcggggttgagaacaaccacgcatgcgtgaacgcatacagtatgtaagcaaaaccctatacacctatacacacttgaacgcattcaacaatctctgtagcgaggtccgtgcgtccgtcgatgtctggccacaacgagctggagtgtcgctcctcggcccttcacgctgagagcgtatcattaatagaagagacatggaacccgtcgcagccaatccaatgcggaaaatgtgcttacaatgacgggtaagcgtattggatgtcttttacgacatgtgcgatgcatcggcgaagactcttcggctgcaacctgtaagcttttcaatagaaaacattcgagaacataacgcatttctcattgaattcgcatcgacgagtccacgcaatatgatgggccttaacacggatactaggctgactctcttcgcaaagaagcagcacagcaggtcacagcgtctgggagggggagaggcgctgcgaacttgcgaggcaatcgagaatgttacacctgcgcgttgtttactggtcttcgcttttattcttcttgatctggaaactgttcgtcaagaccgttccgtgttttgttcgcttaatctagttgttcgtggggacgctccgcactggcatcgccagagcggtagaccagagaacggcagtgacggggcgccccgtttgcggatttctgtggaattatgtctgttttcttcacctttgccaatactttttttttgagttgagaacgttgtgcgtcataggatatgcgtgtcgccttccgcttctgttcagctggggctggatttgcgcagcgtctccacatgttgctacaggggggcagaggcctttcccaaaccactgtatcctccatcactgagtttttccggattcattcgattcgcgccgaatacgttcccttgtttgcaatttacaacggcttctgctgagccgcaaatgcctccgttgtttcgatctgcctttctaacaccgtcgccccccagaagtgtgcgtggtggccggtcatcgtcttcctctctccacagatttatgactttctcctcctgtatcccgcttcactgactcttccgaagacactacacactttcgtcttcggagttgtggctaactcatgtgcttattcctcccacagtgtttttctttttcactcgtaaatcagattgagaccgcgacgaaaaggacaaaacgcgttgcagtttcctgagtcaggcattgtctcccccgtatttgttgtccccaccaaggcgtcggttacctcaaacacctttgagaaacgttgtagggaaagccccgtttcacgtaaagcggggccgccgaaccgagagtgggcagcggagaagatggagtgaggtttccgatatggacgagtaagctgtcggctgcgtgcagccgctccaggttctttctgttcacgattaccctacatttttgtacatcgcctctccgtttctaccgcctcggcatctctcggcgctcccaggagctagacgccaaga

SEQ ID NO: 2814 - DNA, 1145 bp, Toxoplasma gondii
  source 1..1145: mol_type = genomic DNA
ttttccaggactacagaaaagcttctttgaacttcctgcttcttgagagcgtcggtagcgtcatgggacttaccatacagcgcgtcgcttcttgtttgaaagagacttgtgacgacgctcactctcttcattcgtccttcgtgctcctctgtctttcttcccctctccgttctctttttccttctatctgttcttttctcgcttctatgttccccctttttcttctgtccccttctttcttatctaccttatttcttcctctctcgttcttgttctccttccttgctttccccgcccccccccccccgctctccctcatccactcttgtttctcctctctctctttctacggtatgcagagaacctgtgtgtcttcacagaacaaagcgcctcgaaaactctcctttcagggtgtttcctcgcaaatgccacaggggcgtttttcttcgctctcacttcagacatctcgctatcagtccgtgtgtgcaaactgtacagacaaatcaacccgttccccacaatggtgggccagcgcctgttgttcgtacttcaaggagcttcgatcttctgcattttccttcactttccttctcctctatagacacacagagtgaaggagcttcgatcttctgcattttccttcactttccttctcctctatagacacacagagtgaaggagcttcgatcttctgcattttccttcactttccttctcctctatagacacacagagtgaaggagcttcgatcttctgcattctccttcactttccttctcctctatagacacacagagtgaaggagcttcgatcttctgcattttccttcactttcctctccctctaaaaacacagcacacggtgattcagatctttctgggcctttccattttcatcagacgcgacgttgcagcagatgcgccaggatctctcgggtggtgcggaaaaaggagatacatgcagctcgtgagtaagagggagaggactgggtttcgtggctgggcaaacgcgttttgaaaaggacagaaataacgcagacgacatggcaggaaaaaaaggggtcgcaagaatgctgtctccaaggaactgggcgtcttaaacttgtgtggtgtcaccggcggagaggcgcactgagggggggtgca

SEQ ID NO: 2815 - DNA, 673 bp, Toxoplasma gondii
  source 1..673: mol_type = genomic DNA
agaacagaacgcagtcacagtcggcgtagtagtctttccagatgtccctcagcgtctcgcgaccccccagatcccaaatcgtcacctggaacctctcgtacacgaaacgcgtcaggttgaagcctgtcgttggacgcacttgaggaaggagaggcgggggagaacgcgaaggtggggtgaaggaggaagagcaagagggagacgcagactgcggagagcaagaagaggaagaagaggaagaagacgaagaggagaaagaagagaaagagggagacgagggggaagaaggagagtttgccgtcacgtctacatcgtgcctgtgtgcaggtgcagcttcgggagccgggagggtcgcgtcggcaggagcagcttgatgcgcatgcagggagggagacgaggaaggcctgagagcagagcctctccgtttggagtggcgcgccttcagttgctccagaaaagtcgtctttccactgccgtccaggccaacgaggagaagacgcagttcgtcgtaggagaacagccactgatagaggccggagacgagactgaacattggcagaacgcaggggagagactgccaacggaagactgaaacctgagtcacggccggcaaaatgggccgagagcgaagcaacgcgtgaggactgaggagcgaaaacgggatctgtggcca

SEQ ID NO: 2816 - DNA, 1908 bp, Toxoplasma gondii
  source 1..1908: mol_type = genomic DNA
gaaaagagcaacgatcgccaagacaggagcgagagcatgacacactccaacggagggaaggccgaggacccaacgcagatgccacgttgatgaactctcgcaccggcccttggttggtgcagagaacgcgaatgctgccgtgtagactgccgctccgtagtttgtagccaatgttgaaaggcccattccggctgaagaagaagagggaggatcggaggacggagaaaattcaaatttattagaagagagcggagaaggtggatcttcagaacccgcagcctcgcgggtgaccaactggagctcggacacgagctcgcgaccaagatgtctagcttttcttccaaatcctcttcgccgctcaggtttatgataagaaactgtccgggaaatgacaaggacgccttttcgacgcgtgtggctctgttttcgttctctcgaatgccgagtttttcctcacgtggatgtcttcggagatcccggttagggaaatgaaccaccagatgaccaccgcccccgctgcggaatggggtcgtcgaggcatcccacacattcctcaacagaaaagacaggcattcgcttgatgccatgttgtttactgtccaggtctggattggcacgaaccctccgctggcaaaagatacacgtggctcacgagctgctggttgatgcagtcgctacactgtctgactccaacgaagccagttacgctctcaatccgcccgacagcctcaccagtattccaaggagagcgcgaggggggaagaaaatgaagaaatgactttgattaccctcacaggagaacatgaaggtgaaagaaactcgcaaggtacatgctggcgaccacccaattcttgcgttgtagtggaggtcgtctcgttcatttgcacccctgacgctatggtacgggcaacgtgtttgttcattatgggtggcagttgtaagacaacggatccggtggcaaaaagcatgtgttaggcaaaggcaaaatagcaagcacccggcttcgcgccacgccgatgccaccacaatacagctgcaaaaaaaaagtgatctcctcatctgtgtccgccgtataagaaacgaacagccacttagtgtgcagggaggcaagaaacactaaatgatattgagtcaactgctttttaaataggtctattacttttaactccagcatgtatgtcggccaagctcgcttgcaagtctgctgttccctgtcggcttcgatttttctcgcatgcgaagaggcgggtcacaaggcgacggcaggaagctaggggaaaagcgttaggtaatcggcaaagatcccccggtcatggaagaacattatatatcagactgtggagaaacagcatgtgacaacggcaaacgacaccgcctatctgtttaattccttgggagaaagaatctaccgtcgttcccacgaaatgcgagctgttcgagcatgccaatgagctgctctgctgttttgccgttgtccaggccctagggtttcggcacgcatatttcgtgaataaagtgaagcccaaccgtacacgacaggctttttgatttgtattgttttgttgtgtggcgccactattaccacatgtatttcgttttttctctctgcaacgctgcagcaagtgagtcgttggctgatggtactctccgtccaaagcgcgaagacatcgtgccggctgccgggtcaccacgactcaccatcaacgcttcggtgactgccccagcgctacaaaggggtctcaatattcccggcatatcacagctgttcgcttcacgtgtgcttttgtgcatgactccttcgttttgacagagtgtcgcccctttttcctggactgtcatttttaccgtcccccggcatcggcagtggtgatcttctgacacgttgggggaaaagccgacgaacctcca

SEQ ID NO: 2817 - DNA, 2006 bp, Toxoplasma gondii
  source 1..2006: mol_type = genomic DNA
cgagaagctggagctcgaaagcttgacctgacttcgcttgttgttcgtcgctctctgttttctcttctcgtccttccccgtgttcaccttccttcgcagccgtgctctccacgcaggagagaaatgcgagagctttcgaagtcaaaaaaaaagttcctttccttccgcccaaagaaacatcatggaaggcctcctccaggcgcccagtcaccgcgcctccctcctccatctctcaatacgcacggaaatcgacaatcttccttcctccgcgcgtccccatatatatatatatatatatatatttatttatttatttatatatttatatatatatatatatatatatatttatatatatatatatatatgaaggggcacacagatgcgcatacacgcagatatacggaatcacatgtctgcagatttacgagcatatatgcatgcgtatgtttgacatgaagctcgacaccgagactggatgcgttgtgatgctactgcatatgaatccacaggtgcacagagagacatctggagagaacagcgaacaggcgaggaagggggacatctctcgttcgctggaacagacgcctgagtgagaatcgatacacccgatcgcaaaggaacaacggagaaacgacacggagagagtggaagaagagagaagcgatcttgcgtcggcgagaaaaagcagagagaaggcgaagaaccttcgcgcgaggtcgagaaactggagaacgagggcggaggctcaggacttctgccaaaactaccgtaaaaaacagaggatgaggagaagaagttaggactcaaaagcgtagaaggacaacgatttctcgacgcgcgagaaatggtgtgagcgtatgtcgtcgccgctttcggcgacgcgtggacatgcatgcacagaagtacatcgacaggagaaagactctttgtttctcacggagaggaaaaggaaggaaggaaagggaacccttcaaggtttattccctcgaaaaaggactcttcccagagaaaacggattcgatttcatatcgcctagccagtgtgtgcatgcagagttcgctcttgcattcggaaaagcagaactcaggacactcgagagcgctgagagcgccttttttcgtttttcttctcttctttttcctactttttattttctcttctcttcgtctgtcgaggccttgaaaaccatccaagtttctcacgtgtctctccatgtgcagatgtcctctgcggttgtgtctcacagctgcgtcgtctgcaatttttctccttccctttctccgaggatttctctggggctttaggctgttttctctgtttagcaacgtttgaccctcttgcgtcgcctctgcggtttctcggttttttcctcctcatcttcgctgtcctgcagaaatgccaaaagatctctgtgtccgactgcaggcctgagtcccttcccgctctctccgaaagagcggcgttcttttcctctctgtttcccgatgattcgttttcttcgtccgagttttcccgactcgtagcctttctcgtgagctcttgagtccgctcatctttcactcctttgaactcacgagtcgttccctctgcatctgctgttacctgtcttctctacctgtccagtgggagacatcgacagacgcgcctcgcttgtctcccggagacattgcgcgtctccatttgtctcctaactttgagtgtgtaggcaacagtgtttcgccgcaacttgacggtctctctcccgacttcgcgacagcgagacgcagaacttctgcacatagctgtgtatgtttacgtctggtggtgctttctctttcgcatggattcctacatgcatgcaactgtcgatgcatatgtagtcataaaagctctagaaaggcagtagagagacacatggcgagagttgccctgtgcgtccgcgcatctgtgctaaagagatggaagaggtgagggccggagctcgtgtctctttaacattttcgctaactccggtgcaagagaca

SEQ ID NO: 2818 - DNA, 2606 bp, Toxoplasma gondii
  source 1..2606: mol_type = genomic DNA
tgaggtacagcgaactgtagcagaagaacgtgaggagaaactgctggaaaaaacaccgagaaagaccccccgacgcagacacgcgccgagacgaagaggcaaacagcgacgccgtccgacaccacgtcgaagaaaaggaagaagagagagaagaagagaggggaggagagtgtggggaagagaggggagaagagaggggaggagagtgtggaggagagtgaggaggagagtgagggagagagatcgaggggaaaggagcacgaagggtgtgagtaggggaggcgggcggcgggagaatcgcggtgaattgcctgcttccatgttctgagagctgcgtcggacttgcaaacagagaagacacggaggacggagaaagttgcgaggaaccgagcgtcgcgaccgtcgacacagaggcctcgcactgaggcgcatgcgaagcctgacttcctttcctggaaaagtggagacggaaagagagggcagaccagaagttgctagtcgatgcatttctatcttctttcaaatcctcctcgccttcgttctggttcctcgccggtcttgctgccttcctttccacatggccttcaggcgacgcgccgcccccgccgtccacctgcttccgcgtgtggcttccgcctcgtcgctcctctggcgcgtttgcgcgggcagtcgagagggaacttttgcgtggagtcggattctcgcgtctgccagcctgtctgggttccccggcaacgccgtcgtccaccggcggagtctcttttcctccgcggatggcgacttccttcgcctctttcgcacgctggggcgggccgcgacgcgcgcgcccaggcgtcttcggagtgaccttccgcgctgcaggcgcacccactgtttggacgtccgaagcaggagaaggacgacaggccttcttcccgatcctcgccggggacggagacgctctgcgagcaggcgctgctgccgcggcctgcgctcgcgtctgcaccatcgtcgcggggggtgggggaagggggagggcgaagcagaagaggcgaaggaagtctcagagggagaggggagaagaaccgaggagagggagagaagagacgaagaggcgaagagacgaagagccgaacacacagaaggaacgcagagaacgatgctgaggacgaagcgagaaaagcgggaaaacgacgcgcaaaggaagctctgtttgtgggtagcctcttttcttgcgtcatgccgttccaccaccacgcgtcttccgacaagaagagcagaatccgtttcgaggtgtacatacaccacatacacacaccctggaacccccagttgggtgcccggttccactctcgtcgtcgtcgtcgccgttctcgagctaaacgcccctgaagagtggggagaaaagagatttttggggggctacgaggcgccctgcctctttttccggggaaggacgcacgcgggtcgcttcctcttccggtttttgaaaggtctggacgcgagacctttcctccacgtcgcggcgcgagaagagagtcgctagtcggcgcgagcgaagaagtcggcttctctgtgcgaggtgtgcagaggcttcgctgttccgtcggcctcgaggaactgggagacgaaagaatgccgccctcttggcacaaaacactaaaggattgacgcacctttctgaaacagaaggagaaccgaatggacgtcgtgtgtggtaccctctatacggcagcgaggaaagcgaggtgactttgcgtatggtctcgccgcctgcgcctcccgtttttctcaccacgcaccggagtcctctttcgttctcctgtgcgtcatgtagtagaggaaaagaaagagagcctcgggacttctggaaaggcgcttctcggaagatatgaagaaaggcctttcggcgaaaggcggtcgtgtctcgcgatgcgacccaaacaacgcagcgactgctcttgcgcgtgtagcgctgaacctcagctggaaagtagacttgggcgaaacagatcgcaaaagttgattgttttcagaaactccatcctcgagacatggagatggaaacaagaccgagcacgttgcctcgtagctctctccgctgtccagtcctgtcttcttaagagacggggggaggaggggggcaagaggaggacgccgaattgtcttctctcatgcgtttcgacctgcctttttttagctcccttttcgctcccattcaaccaggcgaaaggaggcgattgagcgatcattcgaaggcttaatcgcgggtgtgtgctaactctgctgctctccagtagaaaaactcctcttctgccgactctcgacggccgacggtgctttgcaatcaagtctgcgtttctctcgatctccagcatgccggtcgccttcagagacaaaagctctctctcacgtcagtcttctttttcctcctacctcgtgttttctcgcttccgtttgcggatgaactcctgtccacgacgaacctggtttccaccagccccttgggcccgtgctcgccttctctcttgttttctctttccttccctctctctttccttccctctccctttccttctctctccttgctctctttctctctctgtggtcctgcacttctctgagaa

SEQ ID NO: 2819 - DNA, 2288 bp, Toxoplasma gondii
  source 1..2288: mol_type = genomic DNA
actttttatcaaggtctggctcacaaatgccggttctcgagataccgcgcgtgccccagcacgcagtgatgagccccgagtgggggacgcacccgcagtccagaattgattgttggcaatgcacgacggacgcgcggttctagggcataagtgtgtgtgtggtcgtcaagaaacaggtcaagttgtgagaatgtgctcgcgctgtctcacaaaatcgtttgaaagatttcgacatatgtggagcagcgtcttaaaaatagacgaattgaactaaactgtaaacccaagtcctggggtgtttgttaatggtttcctttttttaattgttgtggagaagctgcgtacgggcttgagttgtatctgaaatcatttttcaatgtagagacggatttccctggaacaacgtaattccatacccggcatgtcgttatacacgatctgcccattgagagcaacggtaccgcatccagagatctccgcaccgggaagtctgtttcgagagacgactggcgaaatcgggtcttaattccgcttgaggggaccatctacctttctgcaacatcttgtcagttacatgtgattgtggcaataccgtactgaactcacgcgcgacgggtcgcaggaagtcacacgaactgcactgcatacgccccgtgccgtatgctaacctaagaaaaggatgggtgttttgggcaaaggctgccaaaaaatgtgtggagtaccagccgcaacctgtccacatcaacgttatttttaaagcgtcgtcgctcaactgaatgctggcgtaccgtttcccgggtcatcgcattcacactcctgacaaaaagtgtaatctgatcaaaagcacacaggagtactacacgtttcccgccagttccgcgtcacacacactgcgtaccggacaccaggaaaccctgttcagtctgttggaaggctgacgaaggtatgagttattccattgttagcagtggaaaagcggaagctaccctcaccaggggcacatcctgtgttcgtagcaaggacgggggtgcaggtgaaagcaaacacacgattaagaagaaaaatctgatggaagtacctgtagctacgggagcacagcacctctggcacacctgggcagaaagcgaatgccaactcgtaccgggtgctcatcccaagaaaaggtttacctccggcgtacacattaaggcgttggagaccccaaaaagtctacccaccagagtaactgtaacggatacatgaactagcttcatcttcaccacagtgcttgattctataaagttttgtcagccctagaaaagactgaccaccatatcacgagtcttgttagtgcctgcctcgcggaaaatgagaacccatactaccgtcttacgttgcatgaccaagcaaactggtgacctgtacatacactcgaatgttaattcgtcaacagttcatgactcgtcaactagttggaatactggttcagatcttgaaggtctttgtttaccggatccaagttctattgtgttatcattctaaagggctcggaagggtcgtgctcgacgtcaaagtcgagcgcagctccgctgtcagtttgatccttttgcggttgttgccgcttgctgtagtgatcttctgcaatttcttcgaagtttgggttctgtttccagttcgcttggctcagcggggtagtggtgcaagtaactcgtgcgttggcagctgctgctcgtttggacaatcggctacatgtggcggaccggctcccgctggcggacggcttcggtaacaacttgaagctcggagtgcagccgttttgcggactgtgccagactttcctcagcaaatggatcaatgagcccagaatgagaaatggttattaggtgcgtgaggtggcacatacagaaagtgcgaagatggcagactggtgctagcgggactaccaaaacgtggatggtctagaccgaagaattcgacttcgcgtggcagctgcgatgttctgaatgcatagatactgccgcgcatgcacacggacggttcgttgcaaagtgactgagaggcgaagcgtttactttgtttcgttttatttgtccgttaacaaaggctctggtatctaacgaaaaggttctgtctgtggaatcgaggaattcattttctacagtatcgactgcacgacaagaccaatctgtcaccaaccgcctgcttcaaagcatagcccgtcgccgaattcgcggcacattggcgtgtttgtggctaaacagcgggctggccatcgaaacaatactcctttctgccccagtcactgaaaa

SEQ ID NO: 2820 - DNA, 2251 bp, Toxoplasma gondii
  source 1..2251: mol_type = genomic DNA
tgccagcatgggtttcagaatattcccagcatccatgccgctttcgccggcggacccggcaccaacaaccatatgaatttcgtctatgaagagaataatctgtcctgaactctcctgaacctccctgatcacacttttcagtctctcttcgaactcgcctctcagcttcgcacccgccaataacgcacctagatcgagcgagataagctggcggcctgccaaagtgtctgggacgtccccggagacaatccgctgtgcaagaccctcggcaatagcggtcttcccaacgccagggtcgccaaggatgatgggattgttcttagtgcggcgactgaggatctgaatgacgcgtcggacttccttgtctctccctatcacaggatctaactcattggccattgctgcttctgtcagatctctgccatactttttaagggactgataggacacctccggtgtctttgtatttacccgccgagtgccacggatggccttgattgcctgccgaatgtcattggctgtcagcttcgattctttcagaaatctaacaagaaacctcgagtcttcatctgccaaggcagccgccaagtgctcaacagatatatactcatcatgccactggagccgcaagctgttggcgctcgacagcaccttctgcagcaccggacccaacgtccgtgtgctattgtcagaaacagtcggatgtctttcgacaaaatcaacaactccgctgcgaagcttgtctaggtccacacctgcctgtttcatgatcattgtgaacaggccatcttcaccttggtttaaaagagacagcacgagaagttcggtttccaacgtcggagggctgtattcttgcgccaacgatatcattcccgccagggcctcaagagctcggtccgtgtagtcatctcctttcagagaaaatcctggagtgttggcagctgccgagaaacaagaggcttgcataaagcggggaatgtggtctagtgcttcccgtggacgtcgttcgaagcccaataggtctgaatacgacagaccaaagcgaccacggtacctactgctgaaatcccccgaaaagatgagacggctccctcgtgtggagaagctcctgagagaaactaaggaggagcatcctgatgaacgattcacggatactgcacgtgataaaggcgcttccttgaaggcaaccgccactttggcgggtccgcgcagcggacaccgacaaccctggcgcagcatcgccgtgaaaatcgtcgaattacctcaccacggagtctttgacacgccaacgtcagacactgtctataaaaagtgttttcttacaaagcgctcggtttcttctcctctgtgagcaggggtgcagtctgtcaacggtaagcatacttgcgacacacagaacgtaccagcatgcagatcccaagctgtaatcaggcaatcgacaggtaggtgcactgcattaccagttcgggctcatattctttggttgtgatggactactgacatattttatttcctccatctccgttagaggtgaacgtcgaggcaaaacagtagctagaaggcactgtgtctggcgaataactcgcgagtttcctacttgtacgccaaagctaaccgctggcatacctacttttcttcggttcctcacttcaagggcatttcctgagagctagtaagttttcgctggctttcgtggctattttgccacacacttctataaagatgcaaccgctatttctctgaaagagaaatgagtgtttgtgtgagcctgcgcccagggacttggcgcaccgtttatccagccgaactcaatagcgtgtgtcttcagtatcgtcgctgttatcacatgccactatgctaatgaatctgccatactgtcgttcttggtaatggttttgagctctgtgaagcatgtaacgtgtcctttgacttggtcaccgttcccgtctttacaggtgtcctaggaatcagatggataagcgcactgttagccaccgactccaagcgtggtgcgaccatgttgagaaccaaacgaccttctttttgtgtcgtttccggtgccatcaagagaagtaggggagagagagccagtggttgtcaactctagactttttaacgtggctgcgcttctcgaattgtgacatcaggtggctgctcggcgcacggggacaccgccgtctcccgcactcttggcaagcgtgtggtatctgcgaggagtttgcaaagttcgacttcgaaaaaggaagcacaa

SEQ ID NO: 2821 - DNA, 2108 bp, Toxoplasma gondii
  source 1..2108: mol_type = genomic DNA
aaagctcttgagctggaatatcgtaccagttcgccagatgcgcctttgccgcgtcccgctttgcaagccgttcctgttgctgcagcttccccgcgtccaccagagtcgcgagatccgcactgcgctttactgtcggcgggagaagaagcgctgccgcctccgtcgggggcctgtcgctcccagcgtctgccgcgccgctgggcagactctgccgcgccggcgaaggaccaaccagaagcgttccctgcggcttgtgcacacctgaaaccgtacccagcagcttctttttcccccggtggtgtttcgcatccaaagtgacagatgcagccgcgcgagcgtcgagatctattcggtgaaacgcgaagcgtccaggggcggcagtaaggtcgagtcgaggcaattcatgcattccgccggagtgttcagcagcgccctgagcgtcctcggcaacagcggaggcttcttcaaacttcccagacggccgggaggccgacggcctttcccgtctcttcttcagaacccgctgggaagagaaacagagctctcgcgtgtcgacgcccggatctaagtggtcgagacttgtttgtgaaaccgaagggagagcgagagaagacaaaggttcatcacttgaagagcgcgcgtgcgacacacactcgaggacggacagagacgtcaaggcggggtcagcagaagatgccaacctgaaagacgaagctgaagctgaacgacagccggcggcagacgaagaggacgagcacggagaacaaaccgaagggacaggagaagacgtcgacacagcgggatcggaagtcttgcatgcatcgtcatcaggcggcggagggagaagacgagccgcagcctcgattgctcgaagcctttctttacggagttgcttgtgcactccgcttttcctgctcgcctcgtcgcctttctttccacccttcccttgagagcctttcgggatggcagacttcatggctgcccgagaagagacgagaagagaggagaagaaacgagagaaagcgagagaaaaggtccgggacagaaactgaggtaaatggatcttgaatgagtgcgtatcagcggctgttgacagagtctctcacacgatccaggtgctagaaggggaagtacgcggaagaggggaaaaaatgacgaaaaaaacagaaaaccgggaagaaacggatgcggacgagcgaagacccaatgacccccgagccgtctactttgagttgaagcaacgtgcgagtttgagagggctccaccaacactatttgaatgtcacaaaacagatgaaaaggaaaactccgaaggattatgcgtgaaaaagggcggattttgcggtcgctttttttctccagatgcaaaagaaaacggagaagcacgcctcaactcagtgaggcatgaaacttgcctggggttcaactcggaaatctccgagaaaaacctggaagcgtccctcaagacgggaggatttttacctcgaaagattcactttttcaggattcagaagtttgtatgaaacaagaaactcgccgtttcctctagccccacaaaacatctttctaaggtgaagatgcatgcatcgcgcgtgtgaaatcgccgcaactagaagcacactctgagcgagttgcacagcaaagtgtgcgcaagtcacttcttcttgccgccgcctctacgtcatttccattctactcagagcctctcataagtttcttttccttcatcccaatggagtgacggatagaagttgtttcaattctttttcaagatctgcaaacatctatccctgttgtctgagggcgtgagaggactcgtcgcaagacaacggcgtgcgatgttcgctgctctgcaggggaatgtaaggaccaagcctgtgttttattaaccacaagcaaagactaccttcctcgtcttctctggaatccttgattctcgaaggcttcggggctcccgccgtctgttcttcagtcttgtctccgctctcgatgtttcgtaactgacacaggcggcctttctcttgactgcggcatgcagccccaccgaagaaggcgtccagagtctggatcgccaccctttgcagagagacataagttcttgaaattgga

SEQ ID NO: 2822 - DNA, 2394 bp, Toxoplasma gondii
  source 1..2394: mol_type = genomic DNA
ggcttctgctgctgcctttgcgctttccttgcatgcaagaaggaacgcctgcacactcttcagatactctgggaaatgagcgtctctcttttccagattcgcttcaggaacagaggacctgcacgcagtctcttctgtctccgccgcccgagacaactctgcgattgtgctctgcagctgcagcctcagggcttcgccttcagtgactccggtctctgaattcatacatgaagacggacgcaatggagattgaatggacgaaggcgagcaagacaacaaagccggcgaagaaggggaaggcgaggcgcgaggagaggaagacgaagaagcctgtgtctggcgttcgcgcagaaggcgacgaagagcagagggtcggaagacacctgcagatgaagacgaggaagagaccagggctatatgagagaaacgatacgaggaaggaacggagaaaagaactgggggaatggaaggcaaggagcaccgacaagtcgagggattgctcagttgcgtaaggcagctgcagaggcacagaagaggaggaaacacgccgacgcgagcgaaaggtgagtgtggggggtcgggggggggggactggacggaacggcggtgttaagagtatgcagagatggaggctttctgaaagagcggcaagaagacagggtcacggaaagggtaactcatcataccagcagttccctcgcccccttactcagtgctgcatgccgagcgaaggcgacctggtaggcatcaggaggctgaggagggtggtctgccagtcgggcgttcccccttgaagggaccaaggatacttgatgcatggctgtgttcttgctcgtggagaaccgatattaacagtttctgttttgtctcctccctcctgcctcgcgtagctgtttctcgccgtcggcagaaaccccaggatacaggaaccgcattcgcgacggcaaccacagttgcgactcataaagggagcggaaaatgcacggcgaggcggaaagggagagagaagagaattcgagtcacatgcaagacggaacgcggaaggatcaacgggtgatcaagagacaaagggcgctccgtgcggccggcgcagacaccaggcgagagggggataaagaaaaacgaagggtgaaaaggggaacgagactgagaagggagagaagacgagaggaacgggggcgagaagaggtagaagcgaaggggtccgcaagcgaacggtgtgtttgtacggtcgacgtcagggagaggagacacacaggagacagggcgcgctggagaggtgtgctagaagacacggaaaccagggagcgaaacggggaagaggaaacacggagtgaggacgatgcagaaacagagacgattaattaaatgggaggtggaaacaagagaaatccgtagcaagttgacgtttggaaaatgcgaaggcgaaccggatagtcgcgatttcggtagtgcccaggcgaagctcgacgccaggggggtgagagcaacgcgagtgtggaccggggagttgctccctttgagccttctgcttggaatacgagatatctttgtgcagaaagaagtgaggaaggttgaagtaaagggtgcacgagaagggcttttattggagaaaccatgtctctctctatcgtgtcgggaggggttaaaaaagaaccgcgggccgagatggcttaatatctgctgtctaccggggttcgtgtccccgtcctagtagttgtgcctcttttctagctgctgtggaagggtgcgttttccgtcccaaggacactttcttgctctgaagttccagtgtttttgactgtctttctgaatccgcgtatccgccaactgcagaaacagcaagcgatgggagccagcttcgctggccctgcgctggttgcacgataccgggaaagagttcttttcgccgtctcctggtgggtgggagtcgatgctaccccgacagagagaaccggaggcgccgagattctcggaaatccgcgatgctccgggccaaagtgcgtcctcctgcacagccgcaggtgtggcacttctctcggcgcggcggccgagaaacttcaacgaaacgcggattgctccggcgtctcagacagcgggcgtttgtctcacagtccggtctctcagcaaacgagacgaaggcgccgcggctggaaagtccatccgcggaccagcaaccttttcgagcactcggcgccgtcagcgcgtgaaaagactcggcccccctggaccccgatgttgggctgagcatccaccgtgcgcgggcgtccgagtgttcctgcggcggctcaaaactggtgcgtcgccgattttctttgtaaggtcgcgtacttcttttgcttttccgagatcgagtccgcctttcctctgctctcccatatctcccctccaaga

SEQ ID NO: 2823 - DNA, 2303 bp, Toxoplasma gondii
  source 1..2303: mol_type = genomic DNA
ggagttatttgcaagcctgttcaattcaataaagcatgcacttaacgcagagaaacctgattcactcagcgagtgatgacacgtcgagtggacttccctcgctcctgcgatttttttcaagagtcgtcgtagtgcgctgacgcatactctcgaaacacactgccctgacaattctctctgctaagtgggtgcagacgagaatttacagctctgggctctgtggagcttcccagttgttccatttaaaccctttacaaaagagttcctccacgaccaatcttaccactggaagggtcgtgaagtttatcctataggtaactttgagaaatcatccaacaaaacgcaggtatgtctctccaccatcccaggcccactccaaagctcggaacacattacccggcggaaatctaaaatgtttgactgttgtacggaagagacgcaggacgcgcgttttgcacatgctcctcaaatgtatccttcctttccgagccaatgaaacgcaacgaagttcagtgaagatgtatattgggtactcgaccacaagggaagtttgggtctacctcggtaactccggaaaagggtgaacctgctatcggttgtaggcggtgtcaaagaatcctgagctgtgtcagtccgcagccagggaagcaccgcatctgcagcagcctgcatgcttcttgtatcctacgaaacgcaccccgacacgctccgctttcagacaagaaatattttcgagcatccgaatgtcgcgtttctgctggtgttgccgtgactccaggagttgggttcagtctcgacatgcatcactttcccaacagtaatcgcgtctgttttcctgcagctgattctgttgcctgcagacgaacgagccacgaaaacggggttggtaacagagcagaggatagttaccttcactcgaaatacacacacctgtgcatcaatctggatgctagagtcactgaactgttcaggcgagaggccacagtcacagtttgttcgtctgccgttacatttgacatcaggctgctgattagatgccgttgcatcttccactgactgaggaaagtgatgtcgaaaagacgcttagaagcgcggcaactgcatatagtacactactctctccacggcatggtgcagattttttgtcttttctgcacatgactgaatctgaacaatcgcacacctgatacagcggatacagcaaagatatagtcaacttggacgtgtgaaattctgttttgcgtctgctttttaggcctggctggtaactccccgggcagttgtcgtgtttgtgtgagtatttcctctaattctctcgcttatgcgtagccgaaggaaagtcgtcgagttgccactttccagcaatttagcttgtggaatgaaatgatagcctggacactctcaccgtgcagcgagcgtctccgttttttacgcagtttttcgggactgcatgcacgaacccgccgatctgtccgctgtctccggcgcttggcgttccttgtgcctatgattgggttcaacattctttgtcgtttccgtttttttctgtgtgtttcttttcccagtttgtgtacgcctttcactcgggtctcaccttgccgttcttgccccaaccaccggcgagacacacactcagggcgtcttgctgtgtatctaatgtcttgcggagcggcggggtgccccgcgaacgcagcactggaggcgaagggaaaattcaaattaccttcgttgttgttttcgctcgctagcaatccagttcttgtccttttttcttctaataggcgtccgcttctgtgactgggatggacgagatcgacgtcttgtagactcctcggtacagatttcttcacgtttctctggaccttgaacagcgttgtgcgggaaaaaggaagaaaacaaactctcttgaaacgccgtgttcggctgtctctgatgtctgcacttccggtgaatggggacgaagacgttgccgggagttctttggtttgccggacactcttctacttctgcctcataatcaaagggttgatcgccggttctgggggctctgtttttcgcggcatcggccgttgctgttcccgtttgtctctctctctcttcagacagccttcaccgtatttgctaaacaaatcttatcctcgaagagaccctctttcagaagcgaggcgtctccttgtttctctctctttccccgtctactttgctcacgcgtggtgcagcaatagttcttttcaggtctccctctgccttttgacttctcattccttccctcttcggatcagtgttgaagaactcgctacata

SEQ ID NO: 2824 - DNA, 1978 bp, Toxoplasma gondii
  source 1..1978: mol_type = genomic DNA
tttcagtagcccattagagggttgcgaactgcagacccatttttagctgcgttgtcgaggcggaagacgattcgcggttgtcatgtgacgcccgtgaacgcgaggcttcttgcgagggcggagcgcgcctttgtgtttttcctccttgatatggacattagctgccaaatcaacgacgcctacaaaggtgcatgaagacgtgactcactcacttttaattcgaaatgtcagctttgaaaaggatggcatgataacttctttctctctttttctcgggcacccaggcacccttcgtctgcagtgtccatgccgttcctcttttggaaatggcctcccgtcttaaagcagcacacagggaaagtctagccacgaaatcactgcatctaaagtgcgaactgtagactagtcatacattatatatatatatatatatatatatatatataacaacatgtatatgtgcttgcgtgaatgtatctgctgaaccacttgtgtgaagctgtacatccttgagtgtgccaatgcatcgattcatctcctcgtttgaaacggtgtatgcacttgtgcgtcagggtatctagccatttacttgtatggccgtgtatctatgtatctatgtatgtgtgggtatgcttgaatgcaggggcttaggttttcagaagggtaggtgtggagtttcttccgtcgggagaggcgaaagagccttcagtgaaggaggcgagggatgttcttccgatttcaaacgaagaagaaagaactctctgatcaccataaaagtccagctttctttgtcatctgaagatggaagcagctttaggcgcgccttggcacacagtatctccttttaatgggaagagacctgaaactaatgtccatccatgagggtcgtgattcaattggacagtttcagtacgtctttgactactgaagtgttcgttctgtatgcccgctggggagaatcaggaaagcatggccgagctctcttccgtccctctcagccgtccccatgtccgtaattgtttgcaccaggaactggacctgagtctccagtagacgctgaaatctgaggcgagagaacagtacgcgcagatctgcaggctctgtctgcttggcagttccaaccccgcaatgactgaagctgcacttcctgttacacactactcagaaataaatcgttcgcttcttcttctgcgtacatccagcacgtcctgtatacattttttatggggctgtcgatttcggggctcctggatacggcttatactcgagcactgcgagacagcaggagaaaagactgtggtgcgccgcctctgcaagtttcaagctgggttttgtgcttctaacgcgcctcgcgaaaagaagactctgtcaaatattttattcgaaaggacaagctcccgcggctttttctcctggacgaacggagtttccgaaccgttggcgcgctcctttgctcgcgtcggggccccggttcctcgttttctcgttctctgccctccgtcttcggtgcatctttacgcctttcttctgtcaagagactatactgtgccgcagaggtcttgtcttcaacggtgcatgtctttccgctcgggcgatgcgcttcagcgcgtcacacaaacgaggactttcgtctctcggcgcctctcccattcctcctcgtgaatcaaaacagtctcgcccgtccatctgtctctcctctctctgacagctgccgtcctcttcaccctctctgcgtcaccttctctctttttctctccgtagtctcctttggctccttcgtctccttagtctccttcgtctccttagtctcgtctcctttgtctctttttgcctgtcttcttcgtcttcgatcccgctcctccgctccccttctctcgtctctgtttcctctcttctgcttcctcgcttcttcttccttcctcggtgtctctcctctgcgcgacctggccatctcccatcccccccccccatcccccca

SEQ ID NO: 2825 - DNA, 1918 bp, Toxoplasma gondii
  source 1..1918: mol_type = genomic DNA
aggagacaaccagaaaatcagatcatatccggataccgtggtgtcgggtcgcgtgctccactctgtgtggaggctagattttcctggaaccggtggaggtgattctcatatctgaatctgaggtttaggaagttgccagacaaatgcatcaatggttggcgagaaaagcgggtgagtgattcggacagatcgcttgtcatggcaggttagatgtagttatcactcgcacccgttagaaaacatacagatgcgatccagccactggggtagaatggaatacttacgtctgcgatcacagggccaaggacaagtcgagatccgtcacgcatgataattcggaagctcgcgatttggggagatggtagaccgtgctgaaagcctgcttttctagaaaagcatcgcaggacgaacgggagacagtgggctcctctgtttccttttcagatttgtgtcaaaacgctagtggtgacgggctcctcggacacgaatcaatggcagttgacaccggttctgtttgaagagtctgtcataagttgctgcatatgaaaaggaaaaggtcatggcagagcaatgtgctgcgacaggcagccgagcacactgttgtaatggctcgcttgtagatttccactcctgcaacaagcccttgaccagacagctttgtcgctgccccttcaccttttctctgaaacacagtgtcggaaagaaaaatgcggattcgcagcgccagccgtgctgggagagagagacctgtcgtgattctgagggcgtgaaattacaatcactagtgtcacaggggaaagccggagaacacttgagaaaaagaaggaatcggtggagccatcaaattcagattcgcctgccaaactcgtagccaggcggcagtcgcaagtttgcgttcactgtccacagatccatcagcgtgatgcagctcaagcggtcctatctcagcgactgtcaccactggcggaaacacgtggtagtcgcagggtataaactctatgttcaatagttgtaggattctgtctctcattagttgcacggctcgaactcaactctcaaccgttgttccttgacggcaggagcagtgctgcagccacgagtcctttcatgaatgatctgccgactgaaccaaacgacatggcaatccagttctcgtattgcacgagaaaccctcgatgattgaagagaggtacgcgctctttgccactctgcaaggtggcgcattacaatccgtactgaatgaaatccccactttcaaaggcagcgcctggccagcgaagacgccacttgagggtacaatggtgcgtaccgtcaaagaaaatgtcctttcttccgtttctacggtgctggagtccacacgccgtggtcttactcgcagtacaacgcggtgaacgtggacacacgtaggttaggtgtgagacaaagcttgggtgtgtgttcgtggtatgtcgatgcccgcgggcagtttcgggtaaagaaacagcgcgagtgggcctgtgccgttgcgcatagacaagcactctgtgtttgcgcggcctgtctcacctcgtcgtttgtttcttttgctacgcgacgatgtgtcacactcgtcaatttcccgcctttctccgcttttctgtgtcaccgaagtaatcggcagtatcaaggttggactgctgctgcatgcccaccaccgagagctagacacgctcttcccgtagcactagttctctgcgtttctgattgttgtgtccctctgcttttgattgagctacaatcacgatgctcctgtgtgttcccgcaggcaaggaggctgacttctctgcgtattttttcgtactttaacatctttttgcgactttttacacacgaggaactgccgccatcgcggactgtcttgacgaaagattgagtaacgtgtcaacgcgcgcacaggaaa

SEQ ID NO: 2826 - DNA, 2645 bp, Toxoplasma gondii
  source 1..2645: mol_type = genomic DNA
tcgattttcggatgtgtgtgttgcctttagttaatgtgttcatggccatcacggggtcgcttcagctgtaccgcgtgttcatgcaccaccttgcggagaaggagaaagcttcgtcggcagctccgtcgtcgtgaacacgaaggaagtgtcaccagcatcaagcgacggctttctgtggtcttgaagttgctggagcagttttccgttagaagttgtgttagtgaacttggatgtgactcttgaagcggcagttgccgcaagggcgtcgacgagaaaacgtagaaaccgtgatggggttttttgcgtgcgtgcgacgcgtgcacctgcgctaaaagaacgggaaggccttagggcatcttcctgcgtgccgttgaaacacaagtccagtggtttgctcacacctgtaattagcgtgaatgacaacaagagtttgagggagacgcgaggaaccgaacgcatgcagagacgattcgttaggtgctggtccacatcggcgccttcgaaatcgccccagccgatgctgggatgtggtgcgtggagaaccgcgtagatctgtcgatggaaacccgtcgatgctcgtttttatatgtgcatctaaatgaattcattctttccgtggtgaaggaatttcactacgtgctacaaaacgcggccgaaagagaaatgcatcgaacgcccatgcgtctccggtacatttgacacagaaatgatgttgcccacctcgcagctcagtttgacacactgcttccgtcgggtgtacatccaccgaaggtgaccacgtcggcggatccaacgacagcatctgggacatctcgcgtttgcttttctcttcgtcatgcgttttcggagcaagagtgtgtcaggggcttgtgtgcccccagcaaagaacaacccgttttttgataagaggccgtttgtttcgctgaaagaagcagcttttgcaccggttccgtcggcgtgtgtaacgctagaccaagctgcacctgcgtgtcgagttctccgccgccctgtcgcttctgattagggagtatcgatgccctgagtacgacaggaaaaggaccggttaactgctgttcaaaggttaaccgctattcaaacacaactgttcctgtagatgaccgctgttcccgagagtttaagtatagtggtaacaagagtatacttgagaaagcagcatgtgaatacgctgtacaaatatggtactcggtaccatacactagcaagggaaaagtgtacatgagataaaaagcgagaaacgcggagacgacggacacctgaaggacgccaatccaccaagacataaccggctcacacagaacgcaaacagcaaatttggtccatccacgttgtcgggaacacagaacacactgcttgtgtttgagcagttctgtaccggcagcgacatattctcattgatgaggagacacaaggaacgtagactggcggtgcaaggtctgtggtcaaacttcgcttgctgctttctgtactgtgtcgcatggtaccgtgagggagatccgcggacgaatcatgaactacaacacctcacgtggctcctaccctctaaggtattggttccatgcttttcaatgaagcttttgtttcgtggaggtcataggattaccgctctgcagttttgtacggccgaatgcgtgtgaaaacgcaaacgccttcgctgttggttgtatcactacgaccagtttcctgcaaagggacgtgtcttttaagcaggcttcaaactctacgaaattctcttgaacatccggtggacacgcgatccttcacaaatacacgtactgaatcgcgagtgacctgtttcttgtttgtgtggtgtttctcccatctcccgctttttgggttttctgcctccttcaaaagcgcttatgtctgtttttgcgctttgtttctgccaggttgttctgcaggagggggtcagtttctacgccttgagtcactttttccgttccaggtttatttcctgtttcgtgcgtcagaaaggtactgtgcttgtccctcgtccgccacgtgtacgcaggtccgtgatcgttcgctttgctcttcctgtctattcattttgtgggctaggggtgagagattctgacagcgtcgtttgttttctggtgtggtgcgcgaccttgtccagtgcgttatccgatattatttgttctcaaactgtctctgctgttcaggatttccatcaaaaacgagcaagggttaccgctgtcgtcgctggcagaactcggctcgttttccaggtccgagtttctgaccagggcatgtgcgaagcgtgcacatgtgaaagctgagagattttcgctattcttcagaggttaacgtcaactgcctgcttgttttcgccactgcttctgtgtcggagaaaacgcttaactaagtccgctcccgcaaaaaacggttgttcctggcactcagtagctgagagtgaaatcaggcgaatccgaggtctgatgaattgagcaaggccttccaattttcatcgctacgcgtatatctctgcgcgtttgcgtgacgcagtcacggagctagtggctttgaaactgtttgcgttggcatgtgcagagatcattcctttattctcaagaccccgctagaccacaaacacgcggtatgttatcactgacagcgcaaaa

SEQ ID NO: 2827 - DNA, 4224 bp, Toxoplasma gondii
  source 1..4224: mol_type = genomic DNA
ggcatctccacatccggacgaatacgcatgatcactcaaatatcagccgtctacatggcaactgtttgatacgcagtgctctccggaacacgacattcagatataactgtactacatagacgtatatcagtacaaagatgaataggtgtgaatatatgaagatgtgtacgcagtgtaccagagtggagtcctcgttaagtcaacgggatggctcgcagctgattgcacatctacggtatgttcgatatcgacggtgcgcggcacgcctgtcggcctccgccatgcgtagtcagcttttctggatagtgtatctgtggaaatgagagttgagatgccccgattggtaagtcatgatcacatttacctgcaggtcgttcggacaaaaccaatggtgaatacgttgccttttttttagcagcaggtttccactgcaatcttagtcgtgaacggttgaatatatcgaggcacaaaaaggtagcaagcatcaggtgtgcagggagagaagcaactaattgtgaatccgtcgggtgaaagccattctccttgcaagggagtggagatgaataaccggctcccagttcgtaagaagaaatttcagtgacgcaccgcaaccgctactacacccgaacaccgtgcaccgtgggggtacccccgccggggaaagcgaaaaattcattttactcacaagagagatatcgattcttgcagcttgtagctgtccgtttccactgtctcctcatgtgaatgttaataccccataccagaggaattggcagacctgccgtttctcagtattagtcaaaaactgctacaccgttaggcttgggtgtcgtccgcgtaaccgattcacccatccaaatggaagacaagccgtgacgagccactcgtaaaacatttggagatggtattgcaggcgcagcgtgtcacatctgtgcagctgtcttcagcagtggcggctgggaactcgcatctataaaacagcagcgtcgcgagcaggaagctaattccagacgatctagcactggccttgccagtagagaactgaaacaacattgactgtggatatgcaacttctctctagcgagctcacacgtctaaccagccccatgtttgaaactgatagattaatcaggcttataacttccgtttatgctccagcttgcttgcgccgcggctcgccgttaatggttgtctcggcatctgaggaacagaaaatgagcatttgcagctggcaggtccgcagtaatccgcctggtatatatggataatagtcgagtcttctatagtttaaccgctacagctgggacgcacgcgaccaatctgaagaagatgtaccggaaatgcaagttggggtcgccaccagctacgcacattgctagattcagaaacagcctgcttgtcaatcgaagggtcgctggctatcaaaggaagaagtgttcttgaacgctctggcagtccatgcattgcctccgcagcagaacacaattcaagtccacaaatttccgttgcgatggtgtgcaaaacgtgtggaatacttcctgggtgttctgtcccacgacttctatggaattctgaaccgcgtttgttcagcagttttcaatgctctgactgaagttccttgtcccttttcgaccgactggatattatgttgaaggggcttgtttcctgccttcttttgtttgacagtccttcttgattgacgtccacaaccctaaacaaacgcagcagcgagacgcgtgatatcctagcgagtccccaacctctttcacaatgccgcagtgaagtctccgcctcttgacgagttagtgccactgaaaaaaaaacatcttcgctccccatctcttgtcgcacggttacaccagcatcgtttcttctctatgctcttccttcttgaaggcggttactttgggcggcgaatgttcattatgatgatattcaagctcgcttcctacgctacaaaaggtagttgtgtggttgtggaccttgaatcgccggaacgtcgtccgataattgctgacgaagaaacgatttgcgtccaaagccagtctgtagcgacccagccgcagagaaacatctctcgccccgcgggaagtcatacgggcaactcgtatgctcagtatgttcgcattgtctccgacaatacggtacacgcatcgtacaggtgcagaccaggttgtgtgtgcacttgtgtgatcgcttagagtaccaacaggacgtcaaaaatgtgaagaggttgcatggctcactcgctttggtcgaaattcccatactcagacacagcgccgggggttctaacgtatgtcgatcggggcatttcgtcgaacatctccggagcgctaggcatgaatccgaattctttggctacagaacgtcggggtgcatcatctgacacgcaccccccgccaagtacaagagtggactggtttctcttgtttctgctcctgcacgtttcgcgattactagctccctcagcgactgcagcgaacaccaactgctcctggccctgctttccccgcaccggatgccccctgcgctcttccgcaaactcgaatctctcctgatctgtcgcgtctccgaaaatgagagttgatttgttgtgctcactgttgacaactttcccttgttttgtgtgtggactgcctacacgtgggtcgagtacctggtcttggtgtaggctagaaagaccagtggtgtcatccccaaactgtaccgaactcttgtttttgtttacatgcctcgcagccgttgtcacctgttcgacgtagaaagacgggtctacgggcggctgctgtcgctgctgttcgacgtacgcaaaccgttctgccgaagcatctcccccaaggcagactgtcgatttgttgtggtcgggattcggacgaacatgtggatgtgggacagtgccgctgcgatcgcccaaccctttgaacagtccatcgtagggctgattcgcccgtctgtcgtcgaggcacactttgctacgatcgtccgatttgaaaagtgccatcgtgttttacaggtaggctagttccagagagctgcagctcccgctgcgagcctgtccaggttcgcgctagtatcgaggacaaccgagggatttgtgtgagcaatttgccacgccattcagtgtgacgtgtcacatgtcaccgaaccctcgatttagcattgctacctggtaccgtacagaaagcagacgatggtacaccatgtgaggcactcagcgccgtgacagcactgctctaggtacacaagcaaggctacgtttcattaaacagtgggttcccaattgaagaaaccagttgtggctaggtatccagttggaccgacaatgacacctgtagtggcttcccgaacttttcttagtcgatgtttgtgcttgcatgcgaagccggtggccccatggcggaagcgccttttccaaaactcggctgcaggcgcacacgcgtaaccggctaggaactcaatcatatttcagtagaatgacacagctgagcacacggcctgctggtgtcgagcggaagaaaatgactatagtggctgggtttgcgttgaatagtgccagggtgagaaagccatttgcagaagaacggcagattgggcaatcgccaacctgctgcgcaagccttttcttgaacgtgctctctgtgactcggtcaccagtggcccttcataatcctcacacaagataattcagtctaccagatcttctttcgcagcggtgactggggtgacaaattaagtcacgcttgactggcaatcgcatcccaccacacgcctcatagcttggtgtacgccatctgccgacaggggggagttgcgcaactacggtcattatttgtcggtgacatttcgttgttggagtacaaataaaaggctggctcagtacggcctctactcctgggggccacgaccgctcacgttggcaatgaacggccgacaagtgagacttctgccgatgcgttaaacacaatatgatggcaggcaagcagtgttccgcaagcggcaatactcgacttcgatagcagcgccatttcagagcttatgatagtgctcaaatcgtactccaaagtcagagctgacctattggacgctgtaccgtagcttacggaaagacccacgcactgctggaaaactcaccaaaaacaattcgggcagccaccatttcttgtctctttcgcttatttgaagagccagcatatcaacgcggaaaggatcaattcgtgacga

SEQ ID NO: 2828 - DNA, 1625 bp, Toxoplasma gondii
  source 1..1625: mol_type = genomic DNA
ttatcaaaaggtcttttctggaaaaaccggtgtgaactccttgctgtgctacgggaacctagcaacaacagtgaggggtacgagtcaccaagtgacagagacaaaggctgtgaaccttggcttatgcctgtgtgtgcgaagggagcatttgttgctcggtgtcttgtttctaactcacaagaagaaacttccgcagcgtagttcctccggtgacgcagaggcacatttatatccgtctccacttgtgcaacgatctacagaaccaatagggaagtgtgaccgacgacggcagtggaccctcttttctgataaaaaccattcacctgatcactgctgcgtacacgagaaaaatgagaaacaaaagttcttcctttggttctctagaactggtggtacgcgcccactgctattagagaaggagaggaactgcctctcctttatctccatattctatggagagagtctaattctccctcgcttgagtcacgtacacgtctggcgtcgtaggacggattcgaaaatcttgggaattgcttttccacgagttgcgtcacacggtgaaagtcggagagcgtctacggggcaaagcacgagggaaaagaaggtgtgaggacggtgttggcgctggacgaaacgtaacgaaactcgtacaaattcggaatgaggtttccagtcaagatcacacgacagtttacttgtacgcaagcatataaaagatgcattgacgcaggaatccggataggtgcgccacgctgcagcagtcaggcaacctcagtctgtgtgtgtccgtttcgcggacctagatgacgagtccagtcgagagcgaaggacgcaaatgatcatacacatatggactaaacctttctggaattcagtctgtcgtgggggtaaaatcccagcatctaaaggagatccttccgcacgacgactaggtaacttcgctagcaagacgactcaaacacttctgctttgccccgtctgctgactcagcttagtacattagtctttgaggcaattttcgtcaaaaaaagactctccgactctctgcggttctgtgttcgccggtccggtcaatgaccggaggcaaacaggagcgcgtctatgccgttcgtgagactcaccagcggttctccagaaaaccagacagtgccaactcccacacatgagaggttgcactgagatgcagcgaccttcctgccatttgagagggaagcaacttaattctttaaacaagtgcacaatctcccagagctgcatgagctctaaggtcagaacgggaaacgcagtccgtagaagctcgaatcagacagactgctcagctcacacttccagccggtgcctttacgcatatttgtttttaaacgtaatatgcggttttgcgttgaggaaaaggttgttcgcggctttccaggctctcttaccataaagtgtgaggtccgccgtgcctatgtagcgcctgtctcccgtgcatgcagggaaacgtttacatgcaggcgacttcttggctttgcgtcgttttgacggaagactgcaggatgttttccttccaccatagcccgtttttctcgttgattgacgcgtgcgttctcctcgtttagcgtcgattctcacgctgtttctgctga

SEQ ID NO: 2829 - DNA, 1573 bp, Toxoplasma gondii
  source 1..1573: mol_type = genomic DNA
catgagtcacatttttcatcctacgggacatgcaggatactgaaacatacatgaagatggatttttgtgtatttttgaatgtagatgggggcgacagagctccccttgacaataccttctgtgaggtcctgcgtttcctggaggagttgttcctttcttccttttcttcttcgtcttctctcttgcggtctcttctgtctctttttctcgcggtattctgctcgctttgcccacttcttctgtgaacgcggcaaccgctttgcatcaggggctgacgagtaacaagcagaggaagcaggacaagacgaggaagaagaggacgaagaggaagtatgagaagacgaggaggaagaagaggatgaagacgagggagaggacgaagaggagggagaggacgaagaggagggagaggacgaagaggagggagaggacgaagaggaagaagaggacgaagaggaagaagaggacgaagaggaagaagaggagggagaggaagaagaggagggagaggaagaagaggagggagagggcggcgggcgcgccatggttgctgtgtgttggtttgattcgtcaggaactgaagcgaaggagatgcgcaatattctgactttgcatgcacgcgtcacccgatccgcagccttgttcagcgttgaacaaagaggcctgggaagtctccacagtttgactccgtgatagccgaaagcaagagttgaggaggaggagcactgtcgttgagaaaacggtcaatgatgcgaacaaaaagttgtcgactttagtgaaaagactacacgaaaggcacagcaactcggacggcgaggcgcgcgctggcctgactcgggtcaagactcccagagtacctacacctgagcagcggaggagcgccgaagagaagataccggaaatgtctaacacggagagagttcttcaaacgcgcgaaggcgagactcttcctgttttagcgtctttcgtatagaggattctttgtcgttccgaataaaaaagtgcatgccccggctggcgatgcatgcgcgaaaaagagggcgcaaagccttagaagcccccggcagcttgtagcggacactcactgtcggtacagccccacaggcatatatccctgtcgagtttcgcgttgttctggtcgctgagaatttttgtagaaatcaaagtagcttccttttctttcctcctgttctcaaccgcttctgtgttcagcacagaagcgagagttactggagcctcggcggggacggtctgtcgcctctcgccgcgaccacggccctggcgtcgtcgagaggagaaagagagaaggttgaagagcctcttttgaagcccgttttcttttccttgtgaactttcgattcctctccctattttctcccgtctctttttcctctctgcctctcgctccgactgcattcgcaactcttttagcgccccgttacagctttttctccacgcagccgagagtcccttcagccctccttgcgttgtcctttccttcccttgctatacgctttttctttcttctccttctccgtctcctcctccttcttgttcttctgcgtctccgcca

SEQ ID NO: 2830 - DNA, 2284 bp, Toxoplasma gondii
  source 1..2284: mol_type = genomic DNA
cttacagtgaagggatagcagaccgctaccgaatgagaagaacaccccagacgcccacgattggagcacgacgacaaagcagagcgaccggcatgggccgagcgtccgagcggttcgcttccggggacgagagactcagggaagttccggttctcgtccttcttctcttggcgtctctccccgtctctctctgcaggacagtcgcaggcagagcagagcgaaacgcacgcagagccaaggagagagggggagagtgagatggagtggcgacgaagaagaagaccgagaggggactccaagacctgtttgcgggagctcgccgctctcgtctccgcagaaggcatgcgagaattgcttcttccaggagggaacgccagcaagacgagaggagaatctttgggcggagaaacggagaatgaggcagccgtcgactgagacaaagacttccgtcgtctcggccgacgccacaaatcgacgcgagtgccgggtgtacgcgcgacggtatgcgccatgggggagacgctagtgagggaatgggggaacagaaggacagaaaaaatggaggtggaaacaactagaaaggaacttaatggtggacagactctgaaaaaacgcgggggtgaacgtagtgctgcaagacttgaagaatgggtggggaggttggggacgccacacgaagtggaaaagccggcgatgccacgaggcgaaagaggaaacaacagaacaagaggcgtagaaagactgaagatacattcagtgaaatatcagtaacgatgaaagctcttcggtgaacgtatcaacatagtagatgaagcgggtggaggagaaaataatgcgaggcaggtcgacgctgtaggtgagagagttcaaacacgatggagtgactattttcgcatgcatgccacttggaacgttgtatgtgcacttgttcacgaagaggaaaagtcaatcgacagtcaagagaagcgaatgaaatagcgcaggagaggccgcgcgcgaagaaacgcggtgcttcgcagcgacgggtattagatgagaaagcatgggttgggtccccctcttaagaagaagacagaaaaacaacagtagcactcgattcagaaggtgacaaggcacttgcctttgacgatggagagaaaatcgaggtgcacggaacacactcgagcagtgcaaagtcgcccggccggtctccgcgctgtttggggctgagcctcaacggcgggaaggcggaagaaagcgcctggactcgcgggttctcgatttcgttttgttgccacaaggcagaaaagacacagcagaatcaaccggggtccgaaatcgaagaggagagggattctaacggtgaatagcgagggcagtaagacgcagactgcagaggagcgaagagcaaagccgtccgttcgctgcccccttttgcgaacaatgtgcaggctgcatgcgcttccctggagacacgttgcagctgagagatccaacagaacgttttccggagcgtaagaagaaacgaggttggaagaacaatctccaggattagggcaagagcagtacaaagccgattcgcgctttgcgtgacgccacagcactgcaggaacctcgtcgtgacagcagaccatgctgtgtgtatgtatgcacttcagcgcgagtggctctgcctggacattcatcgccgattcctgaaaacgcaggaacgtctgcacgagctgattcttcgagcgagtttctgggccaatttctccaggcggtagttttctgcgttcccgagattctgggttctccacttgcttccgattccaccgccacaaatcgggccgtgaaaagctgttcggccgtctcgcgatatggcgttcttttccagtgcgctgctcctgacaggagagcctggcttgcagagaagcggtttcgtgtctagccaataacctggaataacagttttccgtcggtctgttccctggatctcctcgtttcgtcgcttttcatgttccagatgttgcaaagaagaccctctcactccaaccggaaccgctcgacttgcgcgtgtcctgtggtgtctgacactacagtagggtctcagatcctgtccgccaggacctttgttcttagccacatcaagcgcatttgacttccattgtgaatccccaccaccgttttctgccatccgcagtcgttttccgtatccactgcgagcaaaggtctcgaacagcgcctgctcggttgttcagcaggtgtacaaactcagggctgtggccgctcgtgactttgaatctgaggagtttgtcaaaacgca

SEQ ID NO: 2831 - DNA, 2629 bp, Toxoplasma gondii
  source 1..2629: mol_type = genomic DNA
cttgtttcgaaagacgcgtgtttgaacgcgacctttcccagcttcgtctgacccgtagcgacggccgtttcctcaggccctttcattccggccttgcgcgggggctcttgctccgaatttgtttccaaactcgcactggccgctgcgtgaagatcctgcaccgctccctcatcgttgtcgtcgagaaagcgcctacgcggcatgaggaaacccgccacgaagacgcatacgaggggacaggcacacgtgtagccgagcgctacagactggaaggagaagccgtaggcatccatgatggcattgaggaccacgggtaccgcatagcttgtggacactgccgatcccaaaatcgtgatcaccagcccgccggcgcccggaaagaggcgcgtgatgcagaaggtgggcagaaacgcggtttcgcagcccagcgccacggttgtaaagccaagatagtaaaacatatcagatttgtgcgcgaaagataaacatatccagccacataagttgaacatctggccgaccatcgccgtccagcgcggccccgcgaaatctaaaagcgcaccggcgaatgcgcacatggtgctgcagatcgcccaagtcatggtgtacagacgctggacagctgcgtcctgtttgtcgcaaatgtacggtttgtcatttaccacgcgctgatcatccacgaacgcgccggttagggggtctctctcgcacaaactttcaaagccgttgttccggaagatcaacgcggcaacggacggccacccgtggaaaaacacgcctgtgctcgtgatgtagagggcgtaaatgacgagcagcacgtagcgattcagacccaagggcgctttctggttcgcgggaggcacatcgctgaacggcagagcacgccggatcgcgtgcaggcacgcagaccaggagcgtaaaccccgcctccttgcgccctcagcacgttcagggccgacggcagcgactgaatgtgccagagaaacttcttcgcgcagaaaatcgtgggaagacgaactctcactagacgactgtccccctggcttcggagcgggctctccctgggacgccgccatccttcacagccgcggcagacgaggcgacacacgcgaggggacatggaaaagactgacctgcgagaaagtcgcctcaggtgtggaagcagagccgggggttgtagctctggacgagacaaacgcggaaaaggacctccgcagaaactcaaggacttgaaacggattaaggaacctgatcgaggcggaaagaccggttcgctgtctggagattctcgattcctatcagtcgcacagataggaatacggaagagtaacgtgcaaaatcgaacacggacaacaggggaatcctagcgcacaaaaggccacgctattcaggtgattaaatcacgcaaaaaaaaccattgaaaagacgcagaaataccgctgcgtccctgtttcgtccttctcaggtaggctagaacaagagaccgaaacgggaagcagatgaccacctacaccgggcggccgacaaaaaaagacagtgtcgctttcacgtctgctagtagaaagcctgcgaatggcgaaagccgtatctggtcgaaacacagtcgttgcgggggctcttgggtgttactcctgtccaatccagatttcaaatgacgcaactcaccgaataaacacacttgacagagaggctgggcgtctccagagatcgctgcctgctgtctacagcatgtcgacgcctcgcctccgagcagacacagatgaaaaaatgagggagagagggtcttgaaaatgcataaaagaggtaaatggtgtccggaaagagaggagaagccgatgggacaagtcgccagcttccctggggtgtgctggtgacggacagaggccacgactcaaacaagctgctgtcgttgcggtaaaacggggaaacgccacaggcaggaccgttcctccgttggcaatccacaaaccgcgaatatttcttgaaattcttgactaatcttcctctgtttcacaccctcccccccccgcccccctttgaaaaaggagaccatggagagattttcgaaaacagaggtggagacggcaacaaaaccgaattctagactgaccttctgatagcagacagcatcaagctccgctcctcagaagaactgaagtgtcattatacggcctttagggctctatcgaaagagaggacctccatttttttcagagaatccggacaaatcaacggcgctactttaccccacttctgccgagaacgcggcggaacagtggcagccacgggggtagtggcggaagcgaccgaggaagagtggcagaggccaacagcgctagatgcaatttacgacgccggcaaacgacacgcgacagtccagtctaatgtttgttactgcagaagacaaagcagcagctgtaggtagaccctaccgtactacagaagggcaacgatgagcattctccaatctgtccgcgtcgcctggaagacctacggaaacaaatccgaaaacaaggcggggtttgaatttgacgacagctatttgaaaaactacagggcaaccatgcattccgcagccaagaggaagtggctctcataagagtctttgcaataagtagcaaaagaggga

SEQ ID NO: 2832 - DNA, 2693 bp, Toxoplasma gondii
  source 1..2693: mol_type = genomic DNA
aatcaggaaattacactaggttccatcacggaagagctcgacatgagttacattgtccaactcgcacacactcgtgtatgtatgtaaagatatctatatatatagtgtatgtacatgtatatatgtatatataggtgcatgcatatatgcagagatacgtaagcatttggagcgtatggccagcgctttctgtatataaaacacggacatttgatagattcacaagcgtacatatagctatacaggtatacacacatatgcagctatatatatatatatatataagcatgcatgtatgctacaagggtttgtgcagctcagttgtggtagttctgtactttttcagagaatttctagagttttgacagggtgttcaggtcttccattagcctctgtctcggatgtgtgccctgaaaatcgtccaccttatttcatgtagcgcttcgctctgtaggcagcgttgacaacctcttcctgttccagctttgcagtcgactgcagtttcttcatcgttcaaaagcaaggcagtccagaccactttttcggactggctgtggctcctcggggcggcgaggcgcacagtcatggagaggcactcagcgccaaaggagaaaaagagagaacataaaggtagcagccgttttcccgcgtttgattagaacctaaaactctgtcgactggacgctgagactgcgagttgggggaggaaagggtaaacctttttgtgaggaactgaaacctgtctggacgttcagacacctttgcgttttcctaatgagacaatcagtttcgacgcaaaagtaagaaaaaatgccctgatttacctgaacggtgcgccacgcgtgtttagacttccctctgtgcctagccctagtttccaaggaactgttttacctttcagtgcttctcctgcgtctgtagccgctcccctctcaatacttgtctcactggtactgtacagagatcggaaagaatgtaattttctgtgtatgtcatacgaggggatataatagtgcctttagaagttggtaaaaaccccacgacgttttcagagagaacatgcacatcccgtttgaccattcttttgcttttggtggcgtctctggaatccgagaagcgatgccttgttaactgagatagaaagccctcgataaagatgaaccccgacgggatatactgacgatggcctcggacagctatcgcaaacacttgcaccgaagtctcttcagacacacacatgtatacctatcccttaagtcggaggcgcaaaacacgttcacagagttaccaaacaggtactaggccaacaagaatccggcccgtgtacatttgcaaatgttggttttccaaatagatgctgacgttaaatccgacgacatgcatcggtgagaaattaacattgcaccagccaagaattgatgactgcctggagatccgccatcgtacattttaatattcccgccggcgttttcttacccctggctcttgatgggccactggtaacggtaagactccagcctgttcctcattatattgcattcatctcgttctttagacattacccagagccttttctctccgcgcgatagtcattctttcttcactgttccagtaaccgacaagcgggagtcttgctcaattgaaccctgctacccctcctcagcagggacttgcagacgcatagaggcgagttatctagctgaagaagccacggccagggtggcacggtggcaccacacatcgcacatggttctttctctttccacgattccgattctcaacgggcccaacggatccactagtgacccacttgagagcgccgcaaaaaacatctttatgcaagatctgcaaatctgatatacgtatgagtacagggttgtcccgctgctgctcctccagtatgtgtgttggagaggctacgtccactggcaggatttgcagactcgtggcgcccaagacccacccgtcctcgacgaagttcttttttgaacactggcgagacggtgtttgccgcatcaattgtttgaggaactgctttagaagcctctttcccttggaaaactggagaaggaaagctacaaaaacgctggccagtaacgctcctctctgcctgtccgttcttgagtggcagcccgtccacccgcttgactccgcgtactcagctgaccgactgtgaaccgccatttctgcgctttgtggctcccagaaaacacgtcaactttcctgttttccggtgcatacttcgcgataaaggaggtgcccttttgtcttgcgagtttcccgcgcgcacatctctcatttagggggctttttcgcacccaaggttcgacgctgggtcctcggatttttctcgcagcgtgtttgagttacgggccgaatctctccgggaagtccatcgaagttttcttcccatttggacagcagaaagacccacctttcagcggaggctttccaatcgaagtttcttcttggattgtccggtgtgtagccttgagcaaggcttacacccacgaggtttctgtggcccgcaggcgccaatacatctattttcttatccattcactcttttgaaaagcagagttcgggtatgtcctccactgggtgctcctgactcatttgcggcactcgaggagcgttctgacgccgtgttccgcgttaaagttcactctacttgtcttagcgaagacgaaaca

SEQ ID NO: 2833 - DNA, 2415 bp, Toxoplasma gondii
  source 1..2415: mol_type = genomic DNA
acaaagccctcagcaagtacgcgaaggacgcaggctcgttcttcgaggcggaagagcaagaagagacaggtcggtaggcgacgtttcgtcttccgcgtccgcgagcgcgggaacctcgcgcaggagcggcaggagcggcagaagcgcgagaagaatctggagaggcagtggaggtgcaggcgccctggccgcggtctctgcctcggccgccgcggcgagcgccgtcgggtgtctgtccacctgctggacgagacgacgcgggcagcgacgcttctgtgtggcttgtcattctgccgactctggattggtaggagggcaagaaggaagaaccgccaccgacggcggcaacgaaggcgaagaggaaaggaggaggaaaggaggaaagggggaaaggagggagggggggcagatgaggagagaggatcagcgaggcagcggccagaacgaggcaggaaaggcggagttcatgaccggaggagaagcaggagtgagtgcgggaagtcgcaggtggagaggagagaccgaagagagaaaacaagggcaagaaagcgaggcagagacagaacagaggagctcatgcgacggaaaacagacacacaccgttcaggagggggacagagggaccagtggatacaccaaaagcgggtctcgaaacctgacaatgacacggaggtgtcgagaagcgtattcaaaaaagcaacgcagcagaaacagaagtttttttttgaatgtcgaggtttcgaagagagctgcactccgagggaaaaggactctctgcgagactggatctcaccagtcgtgggaagacttggggtgcatgtggacttgcacggtggctgaagaaacgagatatttgcaaagagatctctcgtctttcgcgacgctgggaagaaccgcccgcagaacgcaggccaaccaagagaggacgcgcagacggagaagtcgaggtgctccctctctccagctctgtctggacaggcggcggtcttggattcggtgaagccaccctctacaagaaagaatggaactggaagaggcgcgaaacgaagggtcttctctcccctcttgggcgtaacgcagacgaagcaaaggacaagaaagacaccggcgtcacatggccgtcgcgcgctcccggcgaaaagggagagaggcggggggcggaggtgaatcccgaggcgaacagaagcttcccctgggataaactgttcacacatgtgtggatgtgaaggagagattcgcaaaagcaaaaatgcacgagctggaaggcaaacgggggcaacggtgtgaaagcgatgcacggatcccgggagagagcagccgagtcaaggcgaatcctggcggctgtcagggacggcgacgcggagggagaaaaacgaagaagaggaaaccgagacacgggcgagattccacagtgagacacacctcgagaagctcttctgacagccgcaaatgcgttcattttcagctccctggactccttcgtccccctgagcagaagccgttcggggccgccgcgcgcgttgcccgctgcatgcatgcagcacatgcgaggaaagccggaaaaagctaaggcgcccgcgagatacacggaaaggaaacaggcagtgcagggaaggacacaagtgtggcttccgaatcgaaaaatcgtctatttccacgcggaaggcatttgggtcgcggcacacgctgggcggcggaccacggttcagtggacgtgcactgcaaagagtcaagaaggctgacaaaaccgaccgcgtcttctgtcagttgcttctcataaagtcagcgtgccgcagctgggcagacatatctgaaaagcgtgtggtcaactctttgttttcttgactcgtgggaaacgcaaaaacgaacggaggacgggcaagttccttcgttcgcgtccgttccccgtcagcctcagagattgaccagcaccgcggaggaggtcgcagcgacagcgcgacggcaagcaacttgcgcgagttcttcatcctgctctgctcctctctcccactgttttccgtctaagtctccttctgcgctcgcatatttctcgtcgctgacgcatatcgacgcctcgcgcagcgaactgatcggcgcggtcttccaggtgccagctctctctggtcgctgtgtgtcagatcagaggcagcgacggcctttggaaggatacacgcagcaggtgaatttgagaaatccagaaggaggacgacggaaaaagagttccagcagcatcaggagggagaaaacgttgactgacgcacaggggtacgaaaaatcacttttcttgtacgccagaataacagcacaagatatttagacgttcatctgtcgcggacatctttaagactacctcgtttcacccgtcgttcttttcctcccttgtctccttggttcgctatttccagtctcaaacca

SEQ ID NO: 2834 - DNA, 3423 bp, Toxoplasma gondii
  source 1..3423: mol_type = genomic DNA
gacctcagggacctgtttggaaaagaactgcacacgaccactcggattcgagagggaacagaacaaagaggcccaccgacggagctcacgagactacagagaaaaagataggcggagtcggatagcttcgggatacgggagttccccatgagcttcaaagatgtcactggagtggacggttccatattcaagccgaggaagacgtaaatgcgaatacatccgtcttcttcagttctttaggacgaccaaacgaaaggggaatcgaccgcgaggaaccttcgcggtacaagcatggaataacaactcgactgctccacacataccgcagggaggtaacacaggggactcaaatcggatagacattccatcccagagaaacggcttctccttggattcacttcctcttcatattcttcctctcccttcgtccgtctctttcttctgtagctacggctatctcacggggaaccagaaccggcatgttctcattaccttcgtctcttgttttgacctgagcggaacgtccccctcattcttctatgttcaccttcttttcacggcttcgacttccatcgttccttcttcccagtttctgctctttgccttttccacactttttcactcgtcaccacgaaccctcaggcgttttcgcgttgcagcaacgaaagacactcgagacagggggtcagcttcctgccacctctccttttgccgccaaaggcagcacagacgcgaaacagagtataacgtgtttcggtatatccctgtgatccgcgcgaatttctctctccacgaactcacaggacctgcgcgctcctcccagtatagtcgcttcctcgggtccctgcggtttctgcgacctgcccgccccctctcgtgcacaaaccggtccttctttcgttgtcttttcgctcgatcctatctaggagagaacgcggccggtttcttcccgaacttcctcgccgagctgcacgggcgacgacgagagcgttttgcgcgcctctggagatctcgactacctgctggcttcccccgttccactttccgggagacatcctgatcagactcggaaaatgaggattttccgagttctctaccccttccgtcgcgactttggcagcgtttcctaccttggttttgcgattggcgagcactcgcggtgctggtatccaagtgctctcgacgcggcggcggcgcagagccacggaatctcggagcgggaggaaaagatgacgacgagggaagacctcgaaagaaatcgcaaaagaaaacgaatttcggcaccggaaaaggtggacgagtggctcacgaggcgggacaacggcgcgctaccctgggggcaaagtggctgcgcgaccgcgtgcgatgaaaggaagccccgacacccgtttccgggcagcggatattctggcttcacaaaacagcaacttagcacgcgcgctagcgaggtgccgcacaatctggagcaaccgggattaatagaagctaaattccgtgtgaaaactcgatcctccacacacaacgacaggaaactcgatttatctggcaagatgtacaacaagatctggaaaaacaaaggtctaacgcggcacgcgcgccgctgcgacaccagcggtcaaacgccgtagttccgaatataagccgaatcggagtctgaggcgcgtgagcgctttcgagcacttctctccaggcgcaagaaaacgggcgaaccagccacaggctagactgagctgaaacccgtggacatttttgaccccgagttttgctcagaggcgacgagcggtccagatcttctcgtgcccaggcattccgagcggggcctgcgattcgcggtttcttctggcgctctgggaacgcacagagtgtgtggaagtccgcgttttctgctagctgtcgtcccctgtagctaagtgaaattggtgaaattagacagaagtgccgagaagtggagtcgactccacgagacctgtttcgctctgagttcggggtgcacgcccattgcgatctgctgctgcgcttccgtacttgccagtcctgtgaaacgcgtggaagcagcaagctcggctttgcaactcggaagagggtttcgcgcatatcgtcgcgtccgctcccggacacgtaaatctgcatttgctgaacctacaatctctatagtatgcttgcgggtagacgtcagtgagatctaggcccatagtgtcgagcaaaaggagatccggtttctctctgctgcggacggcccttcttttcccgtcttgtcttttaagctatcgatgctgtcgaagagagcgttgcggcagaacgcgcagcttgtctcccgctcgagctctctccaacgagaaccggagtggaaggctgtgttgtaaacgcggcgctttgtggggatcgaaaacgaatgaatgtgaagatgaactctcagattcgcgcctgtcctgccgaaaaactctgccgagcctcctcaaggccgctttcaccaaactcgccactgagaacgcgtgtgttgtcttctcgcagtcgcgtccccgcggggccggagtcgtaaagttgaagacttgcagacaggtccagaggaaaattttcagattttttgttcgcccgtagccggtggggaggaaattctgggttttccatacatcctatttcctgccagacttgcggtattcaaccgagcagaacatggctctccgaggaccctctgcttcacgaggaggggcagcgccaggagacagtaaaaaacggccccgcgcgtgtgtctcggactcgacgagggggtgagagaaagaagaggaagccttgattaagtggaaagcgagctccattgcgtgcttagattggcctgtgttagcgagacgcagccgaagggtaccgaggaagctgctgcgctccatacggcggaacattacccagcaagcgtcgttgagtgagagaagcccggctgccgcttgatctcactgcccggcctcttcctctagatatttttcgtggtggactgcgtcttttaagaaacatattttattccactggaaaacgctttcgctttctggtggccggtgggggggcggcgctgcgtggagaaaccggaagagaggattctacgaggaagtgcgctcttcctgtgtccatacaaggaagggaagataagagcgtggttctctctctccgcctcgcttcttacgcgtttcctttttgtgtcctcactctttcaccgtgttggacatcccactcctgtctgttcttcccccttgcctgcagcctccagtcttcctcctttcgtttgcttcgcctcgccatttgtgtggcattcgcctcaaactctgcgccgttcgcacttgaatttttgtctcgctggcctcctcgcagctttaccctgagggtgttgtctgttcttcgcttcttctcggatctctcttgtgtctgtcggcgaaa

SEQ ID NO: 2835 - DNA, 2322 bp, Toxoplasma gondii
  source 1..2322: mol_type = genomic DNA
cgtctggagacggagtcgcttgatgaatgttgacttcgttcgaatgcctacctgagaggactttgtatctgtggggacagtctgcaaaggcgatggcgacgtccgagtcgacagctcctctgtacgcctcgcgcatgcgtttttcgttgatgaaagtgccattgaccgcactcagctcgaggagttggaaagaagctttgtctctggacgcactgcccgatctggagcgagagcgactcgaggagacactgcgccctctgcgacctctgcgggagtcttcgcgcgcgggtgttctgtcggcgttctgcgtttgacgtctttgtgtggcatctttttccgagaagacagagagctctgcatgcttgcgagagatcgacgcatgaggcaaacgaatgccaaccgcacccgagttccggccgatcacgtacgtcttccgggaggccaggcgccagcactgcgtcggatgctttccgtcctcgaactcgacgaggaaagccattttctgcgaagagaaagagaacgtggaggagaatccaggacgcgcgttcgccgcgccggacgcggaacacggacgcagccgagacactcgagctgtgaggcggtgaaggaacgacggctgcagcgagggccggagcggacaggagagagaagagagacgaaggagacagggaagtacaggggaggcagagagacgagaaaagacggaaggggaggagagtgaagagaaagaagggaggcgaaagaacgaggaaggagtggcggtccaccggagaacaagagagaaaaggggagaggaaacagccgggatgcacggggcaggaggaaagaagagggagaagaaacacaagaaaagcgggaaggaaactgacagaggggagacgacgcgagaaaaccaggtgagggaaggccccaggaattcgaaaatcctcgtccactaagcgcggctttccgtttctgaagaaaagaaaaaaacgcactggccacgacataaaaacagacgcaacagaagaaaaagaccgagtgtatatacacccgaggaatgcacggacagcgcgcaggtgcgaaaatctttcagcctgaaaggaaagaagagacgaagaggtcgcagaatcggctcgcctctgtctttctccggagaaatcttgaaaaagatttggaagacaaggacaggaggagaagaagagggaaggaagacgaccgtccctggggaaggagaaacgcaccacgcgatatcccaggcggatgcaaggggatgaaaggcgttgatttttttcccgtgactctcgtttttctttccactttgcaaacaccctcacagaaaggcaaacacgcaaaatagttggcgaagacgatgtgatgaagaagcaacagaacgccaagaagaactttctgtaacctcccgccccctcatcgcgctcgattcgagcgctgcgtagttgggagaagatgagtctcgcgaggaggaggccttcgctttgaaggagagaagcgtcgacaggaaaaagaacagaaaacggagaacctcggcgcattcctcgccgcgccttcggcacccgcctcttcccctcgcgcgcgcatctcggtgtgcaagaaaagtcgcagactcagctgtcacgctttcttttcgcagtcgaggtggaggaaacgttctcttttctctcgagcgatcaccgagtctccagcgatcaccgagtctccagcgaccgcagagtgtcgagcgaaggagagcgaaagagacgaaagggacttccagagtgtggagattttttcggagactcggatttgaaaaggagaggagaggagagcctgtgtcgcgaagactccgctggacgtctcatcccgtttctccgcgccctcttgtctctcttcttccccggagaaacggacagagtcggagtggggagtgaggtctctgcggtcttctcctttcttctaaagtgtacccccaggactctcaaggtcggatggtgtttcctcggagaaagaaaggagctccggaaaaaagagtcttcagcggtcactctcgtcctgcgtgggcatttccaacttcccctttcgacacaggcttggcggagaagtcacggactctctccccagctcgttctctcatcgccttcctctctgccagtctgctccaccagttccgttgaggcgatttcaagagctggaaaccgaagataacgatcaagcaccttctcttccctcttgtctggcgttcgttgcatgtctgtgcatctgcaactcaactcttcccgttcctgccgctttttgcgacctcccttgcttccacagacacactctacagtgtagggtgtacagtca

SEQ ID NO: 2836 - DNA, 1283 bp, Toxoplasma gondii
  source 1..1283: mol_type = genomic DNA
cagtaagcaaacgaggttcaaaagggccgcctaaagctcttcttttgcagcttcgggtgaataaaagagaccagcgatgaacatgttctggaacgaagcgctcctccgcatatcctgagactctccgtctcttgcccggctcttgttgactccgaaaatctcaagtccgatccccgacggaaccaggggacaccccagagacgaaatgtctcgaacaactgaggatggaaaacggaaaaatgacttcgaagaagtccaaaacttgatggagaggtaacgggctctcagccgcacagaatcgaccttctacatttaaggaatgtccatgttctctcagtgaacggaatccacatgtccagaactgcctcctcccacaacgcgctctgtgtatgtgaaaagataccttcaacactcacacggatgcaggcacacacgcacgtccatgtcgatgcaattggaggctttgtccaattgcatgaaaggtagcgctcactgggaactctaatgacagcaggacgaagggtggcagtcacagaaagtgcgacccgtctgtcgcctagaagcggtatccgagtcattaacccaagagaaaaagaagtcaataagctcgtttttgtctgctgagaaaacctgttttcctccggaagagaacaggaggctccagggacaggcgggtgtccagggggagtgatggcagtaatccatagatcacgcgtgaaacgaaaaaagtggagcagctggatatgaataggcaacgaacgcgctgccagtgagagaaaggcgcaaccgaccaaacacgaaggcagagaaactggcgatcgacgggggtagaacattaaaggtccccgaacgcgcacatgggacgcagggggaaaggagaagtcataactgaggcattggaggtacagaaaaaggtaggacttcgcctggacgaaagcatatgattcgtacgaagccacttgccccagaacaaacgcaaatccttgaaacctgcgcggacacctgactcacgtagagaggcgattcattgggctttcaggagttcggcgctgcgcttgttccacgacataccgctaaaaagtggagagcacagaaaaaaatgaactttaagtactctgtcacattttcttttgcactctctctttctccgtctttcccgtcttcgtctgctcgcctcgcctggtcacccacccttgcgcgtggtcgttgccgcggtgcttggtactaatcctcagaacagagggagacactgcgaaaaacagctcgcgagggagcttcacgaa

SEQ ID NO: 2837 - DNA, 4690 bp, Toxoplasma gondii
  source 1..4690: mol_type = genomic DNA
ttctcgtgtctgcttcgctggatctgcatgcatgcccattttgatccgcttgcggagctggtcgtctgccctacccttggcgcctccgggggcctcactccctggggctccaactgtctccgcagcttcgggtgccagtgtggcctcgtgggttcccgcgtctgggtgctcggcgaggctgtgcggcttcagagaggcgccgcttttgcatgcaccgcgtaggcgactggagagccagggcgcctcacgcagcatctccgagggaagctggactgctacgcgacgccaagaggcgttccgcacgaaaaccgaaaccaagtcgtcgacctcgaagaagtcgtctgtgggctctcgacctcccgcgaggtccttcgagctctggagcgcggcctcgggagactcctcctggtggccgccgcaagcactggggcgcctcgcggaagccgccggagaagaggaacacggctgaggcagagccacgcatgcacaactgctgcatgcaacgctgctgcagaggggacaagggagtcggacgccgccgcccaaactctttcggcgaagcagagtctccacggagcctccggacagaagcagcgcgccgagtgccggcgacgcagaggcctctcgcgccatggcgccgattgaggaaaactgtcctttcgagggggctaagctgtagtagagcgtcgacggcgaagacgacctgctttgggggcctggagagccgtcaactccacaccgagccggttcgcgcttcccgaagacgcgaggagctggcagtcaagaggagctgcttctcttcctcaaatgctcgtagcattgactgtgaagacgacccacaggctctgagcggtcagtcgtctgtctcgaacggtgtccttgttcgcagctgagcagactggagggagactctctcaactggtttcgagagaacatgcatggggaaatgcaggaactgtgaagaagcaaaagctgttttcgccagcactcgaggcagcgacggggacatcgggaacaccctcgaatggaggaggcgcaaaagaaggaaaaacgatgttgaaagaagaagactctctcagtgtcgctgaagagaagggaagaaggaaaggaagaggaaggcggggacggacagcaacgacttcgaccctcgagtaagaccttccactctccagctttcgacgcgcgagtttcggctgttcggcggtgaatcaaaccgcacgacactctgtcctggtcgctgctgatgcggaactcgttcacgaacgaagtcgacctctttcaaggcctacggctttcgcagacctcgacttggcctcaacttggctgacgacggagagctgcgcggccaagagaagaatgctgggagagagtcccttcaggcgcagagaaaaaaatcgaggcggaaggaaaaattggcgtccgacggcgcgtggatagaacgagagagagagagaaccgcactgcgtcctttggtctcgaccgaacgcgttcgcggaccgtttttccggggaacgggaggacgcgttcgtcgcagggctgacgcctctcaaacccccaagagagaccgagtccccgcgctcgctgagaaaaaactgcgcataggatgctcccaaacgcgtcatgagaagagcgaatgtggcgagccgaagcggagccgacaagtgttgacggcggccatgtcagaggttcaaggcgcacagcacaaccagcgttcgatcgcaattaccgcagaaagacagcgaacctgcgagtgtggcaagaagcgaggaagctgtgaacgcgttccccgttgagacacgcggctcgagagctattttcccagggcagggagagtctccagcgccgaaggaacgcagcgtctgcagctgaaccctcgagtgaggagaccgcgatgtgggaggcgctcgcaggagctgttcctctaaagttgcccggcaaaaaacgcgaatcgttcacagatgactcttggaaaagcttgcgggagtcgaaaagcgtttccgcgtcaagaaaaagcgaaaagacgctcctatctgctccacgaacagcgcggagaatcggctggcggaacctgccccctaccggcgccgtcagaccaggtacagcaacgcctcgaaactcgcctttggaaatccacgtttcctctgtgaaaaaactcttgcgcgaatctcgctccgcaaaaacctccctcactcgaagaaggcaaacgcgcgagctagcagcgaagcgagcccgcgacattcgtccttcgctagcccgccgctctgcgggtggggagacagaaaagtcgctcggccggcagtccgacactctggcggaactttctgccgagaaaacaccggaaaaacttattctttgaggatacttccgcgtccttgacgcagagattgttctcgacgagcgacggagaaaacatatccgccgccgacacggaaacaacgccctggcgacttccagtgtgcggagtgcgacgacgtacgaagcccgcctcaggacgtcgaagaaagaatccggacacaccaactctcctgtcgaatccaatcagacacccattcacgctcttgcgactcgcaaagaaaaactcaacgacctgcggcaccctacaaagaatgcgagcaggcaacgcgcttccctcttatagtagtggggggtggaacgcccaaactctacacggcggaaaaagcccctcgctctcaattgccgacacaaacggatatatttacgtaattacttgcagttttacgtacttagttgtatgcgtatacatgcatgtatggctacatgcagtgggagttgtacttgaaagcgtatctgtagttctctttagcgactatatacatgtaaacatatatatatatatatatatatatatgtatatgacgtatgctgttgtgtttactgaattgggaggcatttgtgtatgatttcgacgttgtgccatgggtgccctctcgaggaggattgcgactaggagcttaaactcctcgtcgaccagatgctgaggaaagctctggaaacttgtcgcaggttgagacagctctctgcacggtttgagatgcctttcccagagcaagcgagaaaagggaaaacgaaagcaaaagcctcttcacttgcgttgtcgccgagcagcttccctgttgttgccttcgtccccgccgcttggcaccgtctccatgtccctgaacccaacacagccctctccaagaggacttgtgtgtgctggtgcgcagaattgcagaagcgagtaggtggcgactgcgttgaggagctaagtcgccaacggaaaacgcgagagaagactcgaaaggtcgtctgctgaacacaccgatagagtcgcttttttccttcttgaggcagcctcgcggccagcggcacgaagcgagtttgcgctccagggaagaagacacgcggggaaaggacagcaattctcaaggaagtcccacagtctgggtgcgttaggcgctcgggacggagcgacaagaacgcagaagaaaggcgaagaagtaagagaacctacacaacgtaggtcgcggcgcctagcctccagcagcctcaaaggactcggtgtcgcacaccccatgtgggggggggggggcacacccgcgacagagcgagaccgaagagcggctgccagccagctgggcgagacggggaggtcggcattgagacaaaacgaaggtcgacaacttcgtcgagttctttaaagcagtttcaagaagacactttactccagaaaaggatgtgtggactccacacccgctggggagggtcgcgcgtctttggctgtgttgagcgcgcgacggctgcgttgacgccctcgtgtcaactctgacggccgagagaaaaagtccagctttccctcagttaggaacgtctcattttctcgagtcttatgtcatggatatgaactcccttcctcgcggtggcatccagagatccaccacgggttatgtgcgtggaattctcgggcagcctcagagacaacgcgcggcgcgtgcagcgagattggcttgagcggcctcgctgtgtcgatcgtgcctctctctgttcggaaattccttcttccacgctcgtttgctgagatttctgaccgctcgccgctgtgttcgagagagcgtctgacgctcgaaacaccagcgaccacgcggagtgcagggatctgcgccagtgttttctggatttttcgcattcgtgtcgatttctccttcgctgtgctgtctcttctgttcagtcgcggaggacggggacttctttgggaagaaagggtcctccgcgtcgacctgtgcatgtgcggcagaccacctggaaggcagaaagatccccgtttcgcggcgacctggaaactagcgagtgctgcggcggttgaaacgcggaacgccagtctctctgtgtgctgtgctctctctcagaagttcccaaacacaggcaacctgaagctccggctgtcaccgagcgcctctcagtcctggccagtcaggtgtatgtacaccgcgggagttggctgttcaaacgcagcgaaacgcggaccgagcaccatggcggttttccacaggaagcaggggacgactgaagttcgtttttcgccggttctccagctcgactgagttgaaggcttctttctgctcgccgcgcggcattctctgtacatttttccgtttcgtttctcgtctttcgtccctgcggcggcacacga

SEQ ID NO: 2838 - DNA, 3120 bp, Toxoplasma gondii
  source 1..3120: mol_type = genomic DNA
aatcgaaaattcgttcttggcgctcaatgcaaccaagccaccaacgaaccggtcttcgttgtcagacgtgaagtcttcgcctaatgctgcgggaccggatgccgcatgagaacaacacgaagaaggaggcgggtttagagcatcgctgcactgcaggacatggagcgggttgcctctgaggatgctatatgaaggcctagctttgccgttcgctcgggtgttactcagaggaccaaacgatgtcgaataattctgttcgttccggatcgcggggcaggaagtgacacaaggcggcgacggggttggatccaaagagtcacactgagatggggactttgacgtcgcacccgagacggggagaaggttctccagcgcagatttctgggcagcttttcgccattttcggcgacaagtagacgatgtggtccgtagggaagcagcaacgctgttgagatacgcttcggctttctgcgtagtatcaaacgctatacaattatattgacagagggtcaaaatgtccagtagcgccaggcgctgaaacatgttcccttcaatgaggacaatcttggaccgcgttgctccaggaaatatgagcggcattgtgactagtgataaagcttagattatgcagtctcactgccggagagaaaaagaagataaaccaaaatcgtggggattagctattaccacaggggggaacacagaattcaccgtcgctaattccttcctgctcgctgatctatatgtatcttctatgaaccaaatagcccccggaggtgcctttcctcagtgtgctactcggactcaaacgcactgagtacacataaagcagaagcacatgcagatatgacaagcatttgcatgtaccgcggtaaccttagtacgttgtgcgttgcagaaaggcaaaaatgcgtaccgtgagcccacatcatagataacaatcataacggtgagcagattcccatgagtggttctgccgtgtattcacaaacacaacagtaccggtttcaaacccccatcaagaatgcccgacgcccggacacccacacgatacaaaacatgacaatacagttgacgcctttgacaataacgtggtacaacagaaaacggcctctcttgctggcgtgaaggaatacgacgacgtcgcacgcgaacccctatcgtgagttgaggctccacagtagcctgtttatcatacaaccttaaatatgcgattgcctacatgtgcaccatagtgaatgcattcactaccgtccacattttcgcatactcggaaatccagatgtggtacgtgaagggcgacatggtgtctgaacgtctcggacacggtgccaacattcgaggagaggggcgactgtctcacacgatagcgtcacgtccatagcgagaggctttgcgttttacgagatcctttcccatcactctgactggcacttggcggttagaagttctgcagaccggctaactctcgaattcgttcatgaacacgcgtagacagatagagcactgcgcgaaagaatatcgcggcaagcagaacagccgtgagcagaaggcaaattaattctccggaaaaaatgcactgtgtgctaggaaccaccgaagacactttcacccctgcggccccaaaatgtagaacccctccggcgggaaatgaaaacgacgaaaaaaggcttgcttttcaatggcgcaaacgcgggagaggagaaaacagatattcgctccgctcatagacaccgacgccttgaatgctagttaccggacacacgcagagggggacaacagaagttttactttcagtgagctagcgtttgcacgtacttagtcccactgaccaccggtagaaaaaatgaaaaccacacagctcacatgtgaattaggcaaaggctggcgggggaatcggacatacctcatgaacctgaggaacggtccctcgggatttgtagaaaaaaatagcgcccggcgacctgttcacttctcagttcgcagggcacggtcagaaggagatccgatgtgagggggccgaaaacaacctgcgtcacttttcctgcgaaggccctcgcaaaagaaaaatggtgagggatttgcaatgatcaacatgaccacggacgagcgaaggacgctaggctctggcccggtggtacttcattcagaaggaccggtggtctccacagaaagtcgctcttcgctggcagttctgcgcaggcggctctctgcaatcgagtctctacctacttagacgcaatcttccgacaagggaatacgttccacgaagaataaagagtggcacctagtctctgtgtcttcatatacgtccttgggtccttccaatgggatcctgatcaccaacgaggaggcacaatcgtgtgcgcagctcctaacggaagactctatctacagctccctgatcagcgtggttcaagtggggtgagctcgacagcacaacagtagacgaatcactaagagacttttcggaaggcaagacaagaaacgctacttccacgagggggtgcgttagtagtcggaatcggattccgccaacaacaatatgattaattgcgtgaccgtcaacttcatccgcgcaagaaagcaatcacgtctcaatctcgtctgaatctagcagaggaggccactcgtggcgacggtagtcttttggcttgacgaggcgtcactcaacttctgacgctctactagcttgctacgtctacaatgccgtgtgttcctatgtgttcctgaacatgacgtcccgggctagcggtcgaacagatactgagagggggtttcgaggaactcacgttgcacatgcgatgtctgtttttgtattcattccagttcattttcagcattccgactcaaaaatccctgcttcgttcctcgtctggcgtgcaaattctgcccagccgtaacccgggacggttgtggtgcttgactggtgtgctgtcaacagcgaattcactgtttaaagcgtttttgggtctcaaggctgcctccttgcgcagctgccgccagcttttgttccagcacacatgtcgatacaaaccctgcaactgctgagttgaattctcgtttcccgtcatcagaggatcttctgcctcgtgttccacccccgttctccgttcaata

SEQ ID NO: 2839 - DNA, 2337 bp, Toxoplasma gondii
  source 1..2337: mol_type = genomic DNA
ccttctctttccgcacctctctttctttgcttttctctcctctcgttcctctactgtgtctcccttcctgtctccccctccctttccttcttcgcatgcggttcgcgtggtgtacctgcactgtggccatcgttggagagcggctcggtttgtccctgttcggcgtcgcgcagctcttccagccctgtcttgtatccaaggtagattctcggcgtcttcttcgcgcgttccttcgtgacggcggagctcaccctttcgaaaacctcgtcgtaggcgaagaccgtggagtcttcagcgagggccttctgttgctggacttggtgccttctgtccggtcctgaggcgagacgcacagactgcatgacgccctttttctcagccgccttcgcctcctcctcctccgcatccagagaagcctggaaaagcgcagacaccgaagaagctgaggcagcaggagcagcgaaagaagaccccgacgatccagacgaggcagaagaggctgcattaggcggcgctgaggccttcttcagactcaaggagaagcctgccatggtgagaggagaaccggcgtacgtggaggaggacggaagagagagaaaaacggacaagagagagggaagagacacagtgagcaaagagaagaaaaacagaagaagggaagaaggcggcggcgaagacgagagaggcgaaggcgacgaggagcaagagacggaagagaaaggtgaggagaattgacaggaaaagaacgagatgcaaggcgtaagaaggaggtggaaagagagtgagagggaaggaggtagaaagggaaggaaagagaaggagaaagaaagcacacgagagacgaaacgaataggtatgaaaggggaagtgagggcggcgagaacaacggagagtccggaaagaagacggaggatcgaagtccaacaaagacagagaaaggagagacgaaatgaggggagacaaaagcgaagaaaccggtgagtaagaaaaagttggaaacaaagagattcaaaaggaagaaaaaagacaagaagacaagggcgagatgggcgagacggcgcccggcaatgactctggtctccttgctcgcaggggccctgtgtcggacgaggaggaaaaaaagacaacaagagaaggagaaaaaaatggaagactctctcagatgtggaaaagagagaaagagaaaaagcggatacaaaagctggggattgcaaccctggatatgcacggacgttaagcggggcctttttctttgcgccctccacctcaaccgcatgcgcttctgtgacgaagacaccttcgtcccgttttctgctgtctccgtgccttctttcttcctcatttcttcttctctttgtcctttcatgggttagctcctctccgtcaccctcgcttcgtctctcttcctctttgtgtcgttcgaacggtgaagagccaatgcgaaggagggatacagaaccgtcgataacgcggcgtcggagcgcggcgccgtgcggctcttctcgttccttgtttcgcggacttgactggtgtgtagacgaaaaaggcaagagatgttttctttccagtcacattaaactctagactctaaacatctctttggcgcgcgcccgctggccccgacctctcaatgggcgctctccgctctctttccttcagtctttctcgcgctctctttctaggttcctctctctctctcacccgttcccttcccccctcttctgctccctcgccagtgcgctttctcagtcgcttttcctctccgttggtgtgcctgcgcggtctctggagactggaggctgcgcggactggtccgttaatcgaagacggctgtgctgtcgagcgcctctccgggacttcgagtaaacgccatccaccatttcgcatagccgataggccttcgcctctgcagacacctccggcgtcgacaagcgccctttccatctctcactttcgtttcgggcctccacctgctgtgttgtcgagttttcttcattcctctttccccgcgcttctgctttccccttgcgttcttctctcctagctgcttcttgcgtcgctcatgtttctcgctttccccctctctctgcgcctgcggtctgcccgctccacatcgcggcaaactgccttccctgcactgctcacgaacgacccatacgtagacagtgttctctcctgcttccacccgctttacgagctttccgtcgcagtctgatcgcgccactcgatccccctcgcgaagccgcgtttcaaccgccaaccagtccagtcccactgctgcgtctgcagaacgtcgacgtcgggggagaaggctctttgtgtttctcagtttttcca

SEQ ID NO: 2840 - DNA, 2705 bp, Toxoplasma gondii
  source 1..2705: mol_type = genomic DNA
cctcggttcgagggtcctctccacccttcaccctttaggtctcttccgcgattctcctctctggagtcgcagttttccccgatcgcactctgccaccaagaacaggtacacacgcgcgtttgtccgttgaacaaagtggagtggcggcttcgggacagccgctttcgcctggagattgcgtttcactggtcagaaaaaaagagccgaggttctctgtgtctccctgcccctctgggcatctggcagacgcacgagagaatgtgagaacagcgcggatggcttgaaagactctgactggttccttcctgagcagtcctgagtcttttttcactttcgtagccctcgagtcggacttcggtactgcgggggagaactcgcgatttgacggtcgtactccaaagcttttcatttcgccgacgattcttgacttcctgacagtgtggagagactcgaaaatcgcctccgggatgattctccctcggcgcgacacaaactcaggtttctgcgttccttttgtgggatatgttcatgtgatctcacgtccttgaagggaccgcgcgaaagaaagtgacagtttctctcagagacgcttctgccaacttgtcgagagaaggaaacgcgcgaaaaaaagctctcgtcaaacgcggtgtcaaaagcactttccttccacgcgaaacagtctccaacagacgcaggaaccgctggggtcttcgacgtcggcgtttcgcgaattcggaagtcgccgcgatggaagcagggaactagagactctgcacggaaaaatctcttcttcatcacctgctttcatatacatatttatatatatatatatatataaatatataaatatatatatgaatataaatacgtccatatagagatatagctatatacgcctgctgcgttctccatacacaggagaagttttccctcggcttcgagtgttcgtttgtgtccgtgtttatcgcatgcgattgaacatacgcagaaaaaggcttttccagttttctgttcggatctcttatttactctcctcacagtctattcaagcatttgtcagatgcgttgagaaaaacaagcatccgactctcggggcgtttttgaagtttcacagtctctccggacagactctcacgggaaccgacccaaacccctgacgacagatctggtgtatgttcaaacacaaaagcgtggccggttcctgtatcataaatatatatatatataaacatttatgaatataaatatatatatatatataaacatttatgaatataaatatatatatatatatatatgtataaactttttgtgaatgtgtttgcatcactggggagtgagttgtctcgggacgtagaacctgcccgagcagcgcaagtgtcagccaaaaaacgaatacagcaaatggagatatgcgtccgtacctcaatatgaaagttaaaccgatacagaaagaagtgaggagcccgtggtttttttgtgctggcttttttgagaggagtagtaggcagctggagcgtctctgaaagctttagaagagtgaagagattcaggaaactccgcaagagtcgagaagaaacatctgcagctcttagaacttccagtttcgttgattctgtcccgcagaccgtgcacagtcgacttcgtcttgtcaaaaaggcgcgccgctgcgacgagatgtccgtacgcgctgcatgcgcttgcggcgcattgcggtcctcgtctgtcttctcggtgccccccttccctttcgcgaagtctggtctctcagcgaagcaaagtggagagctgtgtcgcgtctccacttgtcttgcaagttgtccaattcgttcggcgcttcggagtccgattcaaacgcgtcttgatgcgtctctggctttttcgtcgcacgaccagaggcaatctcgcgtccgccactcctgtcgatgcacctgcatctgtgcctcctcctccctcctcaccagtccactgtgttgcgcgaaaacgaggcttttcttcctcgaagaagaagccaacacacatcttcatttcactttttacttggagcgagagaaacgcatcccgcgttttcatggccctttcgctcttgtggaatctccaccccaggggtgtgggcagcactgccaagtcgatgtcttgtcaagaccgaggtggactcgtcttgaaaccacacatggccttctcggagttctcgccttttcgccttttggcttcgacgggcagctcttcctctcacgaaaaaacagtcttctgcagtctctttcaaacgcggggcttctgctttccttcgcctctctcgtggacagagaactcgctgcaggcgcggcctcgtcgcgaacgtctcgccgtaccacagggacagagagaaacactgatggatagagacttgcctcggtctgtacaccgtggaaagggcaaccatttgaacgaaaatccacatgcagctttgcgtcgttgttcggcgactgcggaaatccgttctggaactctaaagggtggatagcttttctgctgcacggaaaaagaggaacgggagacaccacgtttagcgtgtgtctgacgcaaattcagagagaggccttaagaagatgagaaaggagggatttggcgcgccacaagagcttcttctctccaggttcttcttcctttctgtcaaaggaattctccccatcttccctttctcactcgccccccatcgtgcctaa

SEQ ID NO: 2841 - DNA, 2066 bp, Toxoplasma gondii
  source 1..2066: mol_type = genomic DNA
tcagtcggactacagaggttccttttaacaaacgcaggcgcgtgtcccctgcgtaattatgtcaccaacacggcgccactcagaagaattaagtgccccaaaggcactcaggcccatcgtaaagagctgattttcgaaatgttatgctcgtaactttcgccgttaatggttgatttttgattatgaagtgatatcccatttggaccatgtcaagtgcaggcgctcagttcactgcctgttttttcttacatgcgtcatttgcttgttgcctcgtgctcggcagctgtccctgcgatgtgggcacaccgccatccctcaatttccgtatcagtagacgcggagtagcgagggtagatgtgcccgtgcactgcatctccctttcttgtcaggccgcttcaatagacgtatcattctctgatcggcaggaaaggccggacatcagcgattgacttgcagcagaggagaaggaatgcgtacgtatgggtgactcaaaaactacaactgcgtcgtcagagggcacctaaagtgcggccaaggatggttggaatttgtacagttggatgtttcataattgttcgtgaagagtgaaacatgcagcagaggtggctgacagaattggtattttacgttcagtgtcattcagctgctccctcgacttcgtctcatgcgctcgggttcagctgcgtgtcaaaagttgaaagactactcttccttgcaacactacgttgtccatttcctttgtggactgcttctttccactgtagactccgcaagtccgtttcgctgtggggaactcagtcccgcgacatccagcgtcaactgagacagccatgcctacaggatggctccactcgagtttcggcagagattgaaacttctcccgatccggcgggccaaacggagaaagaaaacaacttttggatcttccggttttggtgaatacggaagggcttcatgtatagagtgcatagtcacatgcgagcggagaggagtaattcctgcggcccgcgactttccgccggacaagcgaatactgcatctgcacaccgcgtgtttgtgtaactgtgtaactgatcgttgagtcggcagccgtcctatggcagagccttttcaaagataagacacgcgcaagtggtgcggaaaagatgttcgaaatactgaagttgagataacagaggaaactggagagtaccaccgagactcacagaagcatttctaggcctttttcgtttctggcaacgacgctggaagacatcgcatccaacaggaattcaagattgagcaatttaagctattcatgaaggcgcatgagttgcactgccctgaagggcaccgatacccattgggggcgagcttaagatgcgtaaaaaagcaaatcactacagacagtcgcgttctgattcatgattatttagaatagtgccgttctgttccctattctcagcgcacgcattcgtagtgtgcttagctacgaaaacacgatacatttttggggtgcacggaattccgtgtggcaacgtcaagaatgagaagtgagatgcgtaaacttgtgaggtgttaggaaaatcacgctcgactgcctagcatccgatgaacgcgtggggagaatcgctgagcaaggaatgcgactccaatgaaacaggcaaaagcggacacggaatcctggactctgctctatgctgatgtgactaagtcgtctcacttttggatttttcttcgacttgccagcgaaaaaagcattcgaccttattttgtctttcagaggactcgcgcgtgagccacgacgcatggtctgtcgtataccgtcctcaaactcgtcaccacctgacatagccgagacccagtcaaagcgcgtttccgatatttgatgcacgggaccagcctacctaccactgcaacaagttctctcgttgctggcttcctttgccagtatttttcttcattccgtttttttctgtgcctcattttactgcttctgcggtgaggaaaacaatctagccgcaaacacgtgttttactccgaacatcgacactcatcgttgcaccatttacacttccagctaacaa

SEQ ID NO: 2842 - DNA, 3516 bp, Toxoplasma gondii
  source 1..3516: mol_type = genomic DNA
ctcctcctctctgcgttcattcttgctacgctttcctctctgctctcttcactgctctaagctgtctggactcggttcgctggtttgcctggtctctactgctacttccttttctgtctcggctcctctggcgaacgccctgcatacaccgagtcgctgccctgcgccagtgcgaccagtcgattgattgggttcgcctcccgggcacacggtgtacgtacagcgcctgccagccagtgttcggtgtctgtgcggcagctctcgcggcgtctgtctcgcatgcttcgcgtttgctccggaagacttattttcagctctgagtgttcgtcctttcttctgcaggccgactgtggggccgcgcacccagtttcgcgctgtctcgcgacagcagacacggatcaccagaactcatcgggactccacactgcactcctcgtcttcctccttcctctgtatctcttctctgcctcccctccccccggctgtccccttctcgtctcctcccccgtacaccctcgtcgatttactcctcctcagcgctcgcttgcgcgatggctccagcttcctcggccttgcgtctcgcagcagcctcgagttccgcggccattttgtcggagaacgcctgtcggatttctgcggcgaagcggcgggcgctctggcggtgcttcttgtgttcctcgcggttcgcctgcttcttcctgaggaccagggcgcgctgcttggtgccttccgtctgggcgaggcgcgccaaaatcttcaagttgcgcgccgcaggattcacccggcacaggacggcatggttcttcaggaggttcttcttctggccgcgcttcttctgcggcgcgacgcgcgcaggccgcacgacgcgctggatctcctcagagttcacgatgcggctgaggtccgcgttggacatcaaggctcgcgggagatggtagcctttcttcagctgggcggtgccggtgccggtgtggcggccaaagaggagctgcaggcgcttgaaggcggacgcagtgtacagacagaagcggccgagggcgccgccgggggcgagttggaggagattcagcgagtcgaccttgcagagttcgacgccggggatgttgcggaaggcgcgggtgacgccgttgtcctccgcatagacgacgagcggcccgcgacgcatgtgtgttctgcggccgcgcatcttgcccttgccggcgcggagtttcttcgcgctcgcccgcacccgctcgagctccgcggtgcagccgagcgtctcgaggatcttcaccgcctcgcgggtcttgctcaccttctcgagtttctcgctaacgacgagcgggagctcgggtacctcgtcgatgcggtgaccgcgggccatgaccagcgcaggcaggccggtcgccgcgaccgcagaagccaccgcatgtcgcttctgcgtcacattcaccttccggtgccaccgtctccaggtcttgttcggcgcaaacattccgccgccgcggcacatgttcccgaaggccgcctgcccggcgcggtgcgtgcctccgccggggacgcgcggaatccgcgacaccgcgcgaccggttccccaggactctgcagaagtctggtaccccgcgttcggcgcgacgccgtacggctgtcggcggtttttcgccatgttggtgtggacgaaacgcaccaagtccggccgcagcggagagagaaacacggagggcatcagggacgtccccgacgccgttccgtcttccggcttatagacggagaccaacggacgggctgtcgccatcttgaactcgcaggcaaagaagacgtacaaagggggggggggagagcgagagaacgctgcagacacacaaggacagagacacagagacaggcacatgcagagaaacagaaagaaacctcgagagtgtgggcgagactgagagaagaacggagcctgagggaaaaacgggagagctcacggagcggcgacgcgctccgactcggcgcagagcagtcggcagaaagcgaaagagagaaagaaagagagagaaagagaaagagagacgcgcgactggtgtgttttcaggcaggtgcgaaacttccagaagtgacgcgcggcaacacaagggatcactcgggcaaggctgttcaaaaaaacggcaggacgggggacccacacaacgacgctcttttattatgctggacacccggcggcctctgttttccacgacacagcaaaaagagcgcaaggaaacgcacgcgtccgacaactcaactttctaaactcgttcgcgttcggagtcaaaacgaggtcttctcgcggggcatacgacacacacacagacgacagggtgagagcggcaaagacggacaacgcctttgaaaaacagcgacggtcgaaacgacagaggaacgcgtctccccgaccctgcaattcggcggatttctggtgtggaagaagcaaagacgccttcgcttccctgtcggggcatgtctctgagaacaacactggtgaaccgatctccaaaaaaccgggcacagtctaacgacgaaacgttttcaagttcctcctttttttcgacaaatgaaagccgactcagtttgtcctctctcgcggggtgcgaccgccctggctccccccgcggtcggtcgcacgcaactcttcagtttcaggctctcttactgccactggtttttctgcccaaaacgatttcctcccctcacgtccggccgccgacccagcagtggattgcggggagacgccacggaaaaagacaaggaaacgaagtcaaaaagaactctcgaaacacacaagcggggcctctcgcaagcttgtggggaagagaacttcggcctcgcgttgcgcagagcgtcggggcagggttccgcagacttacgtcctctcagagtagacgagacaatgtctctccacgactttcgcctgaatccgagaaaaacaaaatacagagaggaccgacagggaaacccagcctcctcctgcaagcgccgccacacacgaaagcaatcgtctccggtccgcctcttggaaaacttctctcccctggccgcgcatgcaaaccctcgcggcgcccggcctatttacgacgaccgaagcgtgttgaacggtatataagccgaattcgttgtctcgtgtgttccccgcggccaggggactggcttccggcgcggtcgacagatcaggcgctagaaaagcggagagaacaggggtgctcgagggtgtctttcgttttttcccgagaaggtcattgtgcatgcatccgagaggcctgcgtcggccgctggcgagtttgcaggtcacaggcgaaggcgcgaagacagtgaggctcgcgccgtgagcgggagaggctgcttttcgccgtctgctttttgtgtcgagtaaaagccgagcatgtcgactcgactctcagcgcgtggaagtttcggttcatctggcgatctacgctgccaaaaaggacgggtgccagtctgcgcgaaaaggaggcattggcattcgcaagaaggcaaacaagtttcagactcgca

SEQ ID NO: 2843 - DNA, 1791 bp, Toxoplasma gondii
  source 1..1791: mol_type = genomic DNA
cttttctcgctttgccgcgagtacctgtgaggttgcttttgctcaagctcacaggctgtccacctggaaaagagtctctcgaccaaccgcacatttttcgcactcgctcgcgtacgcgctgcgcctgctctggaggcagaagccccgaggcgtcgccttccaaaatccccggcaactccgccggcgacacagcgagactgtggactggagaagaagaggaagaagaaggagaagacgaagaggaagaagaagaggaagaagaaggagaagaggaagaaggagaagaggaaggagaagaagaggaagaggagcgtagtttctcgccgtgtgcagttcgtcggccatcctccggcggcggtgggatggcctctgaatggagagcgttcatcgttgaaagacaagagaagaaggagagaagagagagaaggagagagagacgaggaaggagagagatgaagaagcaagaagacggagagggagacgaggaaggagagagatgaagaagcgagaagacggagagggagacgaggaaggagagagatgaagaagcgagaagacggagagagagaagaggaaggagagagaggagattgagagagtccagcgacgaagggaagagaagcctacattggtggcttgcatgttcctatttcgttcttcatctgcggttttctgtctcacagttgcgtctaatagagaggtgaagtcctcccagacaggacggagatctttcttggagaggaaacccaagaggctctgtgaactttgaggaacgcggagagctttgtcggtgaaggcctcccccggagacgccaagaaagcgaaggaataaaacgtatttgttcgaaagtggaaggagcccgagagaaaagaaagagaggagagagaagagagaagagcgacagactcgagcagtttctttcgagttttttgtgttgcatgcatgcatgcgcactcgaaaaacgcttctcttcgtcttttactggcatggctgaggtctctgggtcacctggcaaagcacggaagtcggcgcagacgcttccttcttgcttccgttgctttcgccttccttctctgtcttctctctttcaccttctggaagggaactggggaggcaaagagagaagcaagaccaacgcagagagactcaccggatacatagggtgcgttgtggctgcacagagtgagatgcggcgactgacgttgtgtggaggaagaaggaacttttggatcttcttctcttctgttagccttttacggctgtgtcgccgaagcagaaaacaagggggagatggcttccttctcttcgctagactgttcctttgcagccagcgtctgcgttcttctgcgctctacactctccaagggtgagtatctcccccaaaatgtgatgcgttctccagcttcccggcaccactaacaatgcgccattctggtttggccctccacccgcagcgatctcaatggcagaactgcatcaacgaggaaaaataccacgacttcagagcgagacttcacagaacatccatccgaccttctcgacgcggaaaactcctcacgcgtccatgcgcgcatgcagaaggcgagttggtggaggggaaccgcggctttcaatcttgttccccgcagaaggcgacgcaagagagataaacgctctcgcaaacatgctgtgcatgtactccccccatacgtcttcgcctcctccctcgtccatgcgcgcagatggcggctgacttgcgcgacgctcttcttcccctccatctgtctctcggcgactttttccttcaacca

SEQ ID NO: 2844 - DNA, 2438 bp, Toxoplasma gondii
  source 1..2438: mol_type = genomic DNA
tcgcttccttttccggcgaagtggcgaataaacgcgaaaacagagccggcacgcagcctctgctccgcatatcaggtgtacatacaacagcactgaaagcgccggttccgggctgccacctgcgccgtacagggtgcagccgagatatcggaggagagaaagtgggttgaaaaagaagaaatttaggaatgaagagggacgaaaacacaactgaaacacaaacagatgcaactgcaaacagtaaaaacgacacaagagacatatacgtgtatgtatgtatatatctttgggacagcacgtgcagatcagagcgcctatccatacgactgcagcgacctctttaccattcgcatgtgcaagtgtatacgcggcggtacacgtatgatacttctttctaggtatactcggtgtattcacaatcgtagaactcatcgatcttgcacgatttttccgacctgtctgctctcgagcgtgtcgccgctcttcgctacgttcgctgggaatctgcggtgggggtgtatgtacgggccattccacctgactccctccgtcaagccgtccgagcatgtttcttcctcatagcttacctgttctcttggctttgcgcaaccgagacccattccctagtttttccgagaggaggggcgacgaggcaggcacgaggtaccgcaagtgccttcccaacaggggcagccgaaaagccggagcgcacgaacctcttcggcagatgaagggcagcagacctcatcgtgaattctgagaactaggttccttttatgtcacttctcgggctcccgggcttgtcaggagctggacaacttaaaggaaagcgatctgcggagtctgcgaggtcactcgtgcctgaggcagggtcttgaggcagctttgaggagactgactgccggcgcacgaggcagaaaggtgaagaacccccaagaggaacgaacgcgcagaaaggagagtttcttgagaggaaagaacaaaagtgttcctgcctgcgggttcaagaccgtgcgaagccgcaccagctgtgaaaacccaatgtggcgacagaagccaaaaaacggcctgacacaagacacttcgtcaggtgtacgtacacctggcgacgcgaggaactgacacgagtgaggtgtatgtacacccgaggagctggaagccccgccgcaagtttcgcgttttttggcgactcgagacccgcccaagatcgactcgcctttgcgaccaagagcgggtcgaggcacaccgccgcacgttttcgtttcctctcttctcttccggctttttccttcgatccaaatttcttctgtcttccttcttgcggaagaagaaacaaggaccctcaaagaaggaccaagaacgctaaaccccaaacccttcttggacacacgacccttaaagctcgctcgcgcccgcggctccgcgacttcgtccgcgtcggctttttcgttctgcctgccgcatgcagataaaatgcacatgcacatgctgcagagagagagagactgacgtgtcgggactttgagggcgacgcacttccactttttttctttctctctcttctctcgcctcagtgcagagggaaagaagcaaaagcgaagcggagacgcccgcctttcccccactgttcgtctctccacgctgcagagcgccttctggctagaaagagcgtttgagagaggggggtgacagaacgacgatcggttttttttcaccctttctctgcctactgctgctcttttctgccgcgatcaaacgcgcgaaaatgacaaaggcgcatctgcaatctcgctgctccctgccgtggagagacacctgccgctctcggtagcggaagcggactctggcgggacacagacgacccgagaaaccgatattcctctctataagcttctattctctcttcttctctcgtctctgcctctttattgtcttccatgacttttcgtttctgccctttttttcacatcgtccgtctgaagtgcgacgcgggtccgtggtcctcgctcgcgtctcgagaaacgattcgtgtggagggtgtgtcaaaaaacacatcttggtaaaccaggatttctctgccgtccttttgtggagcttgtgagagagaagactgacgacgaggaagggtcaagcctcctctctctcctcggttgagtcatgccagtcccgacttttgtcctccgtgtttgacgctctctacatctttaccggtgtgttttcgtctcttctccctctcttcgttcttctctctcctttcttcctccgttgctgtttcgcgtccttctcttccactgctgctacgcttttcctctttccgcgctgtcggctccgtctcttttgtttacgtttttttctctcctgcctgccgttgcacatttgtttctttcggtgacctctccgtgtttttctttcggggtgtccactgacctgtggccaga

SEQ ID NO: 2845 - DNA, 2470 bp, Toxoplasma gondii
  source 1..2470: mol_type = genomic DNA
ggtttgaggaaaaccaaagggcgctcggctttaactttgtgctccacggtggacagagagaagcccgctgcatgtgttagctctctccggtagtgaacgtagaacgcttatgatacacagaagataataagaaggggggtctttacaaaattagttatctagaatagccacacgccatctgagagccacatacaacagagagtacgcacagcaacccgaaaactctcacacgacgtctgttggaaagagttcgggcaagatatggtaataagcgctcatagaagtatacatatatatgtgggtttatgatttgaagggagaacccttgtcaagaattcagaacagggaagagaattgctgatgattgacgagactgagggcgatccacagactggttacagaagacacatgcgcttggtgcttgcttaaaaacacgaagttgtttttctgctgcagtgcctttgcaaatactgaccgcgcatcggctctgatgtcacagcccctggaccacatgtttccccgccacccgaaaactcggcaaccctatagacatttgaaacaaatgtgcaaagccgaaagaccagtccccggctgtgacctacacatatatataatctatagatatcttggactgagaatcagtgaatgcctatgtttgcgtttgtgcatgaagcaattcgaatgaacagtggcagtcccttcgggatttccctgagggtgaaagaaagactgggggaattgctgaagtgaggcagcgtagaaagagaggcctgttacacttcagagaaagcaaggtgtcgctgcgggaaatagcagggttgagcacttgctccctctcgcgcgacgagacaagaaagcagatttgttcattaactagcagctctcccagggcagcttgagcgtcagcaaaaatgctccggacaagaagaaaagggggacagaagtgttacacaactgagtcacgaaatgccatggaatcggaaagaaatccgtgtctccgcagatacgtcaaacacagtgcaggttacaaagatgaaaaaatggtcgtaggcggagcgggaagcagtgtcaactcgtactggaggggtagcaagcacttttgattggatggcaaaagcacgagatgctttttctccctctcttctcgaattttttccctaaaacctagcgtttcgaaccgcgcacgctggagtaggaaagagcatgcatggcaaactttttttcagaaacaaacgaacgattttggcctgcctcatgctgtcctcgtccgcgcatagtttcgccagagaagttgtcctgagcctccccccgccgccccccccccctcgctcggttgccgttgagcccacgagtgccgtttgagaacttctatgaagaccttcaaaagcggagaaatccgtgcaagtcgaccgacacgaagacggagcgagatgcaagtggaatgcaaagaataaaaatcccaagacccccggtcgctctagaaactggcattacgcgtgccacgggaaactataaaactgagctcacaaattgtctgccgcctgccagccaaaagagatcttccaacccaaaacgaccagccacgcagagatccagaggtacacaagaatctctgccctgtgcagtggttcacttgtatctgctttttgtgtaggttacgaaaggcctacgaagggtgagatacacaagaatcggaggacggcaacgcatggcggttcagctagctgacaacccgtagtcgatatgtcccaagccacgggacgtctgcgtcactagtgtgtgtcgctgtcggttagtcgctttcaggacggacaattttcctcgtcatttgccagcagcatatgttctcgattctgttaccacgttaccgaatattcggattttctgctcctcaagttgaacgaattcggcggcagcccccacgcagactgtggttccctcttgctctatcgccctcgtggcggtctgagagctggcacgacaacactactcctatcaaggggctcttttcttgctccgccggtgcattcagcgaaagcagtggtgacataacacttcaattgtctctctactttggcgcccgtagtacgtttttgcttttcacctgtgcgtcgtctgcgttttagctcggcgtctctcactgaggcataaacgcagttgctctgggaaaagaacgtaaagttgttgtgccgatggagaattaccgcacaacgaggagaggcgagaatcttttcggctttgtgaaaacgagagcggcgaaccagaacgtttttcgttactttatcggggatttccccgtacttctttgcatcagatatttttgagaacagggaaacagttttcggttccgcctggggtgcagataaaactgcaaatacacgaatacggcagtctttgaacctttgcttctctttttcgatctagctttttctgtggcaccctgccaacttcgctgtctcatcccgaatca

SEQ ID NO: 2846 - DNA, 2932 bp, Toxoplasma gondii
  source 1..2932: mol_type = genomic DNA
gagaacacccaactgcttgaggcgacagagatagagagacatgagcgaacggggggggaggcagagagaactcagaggcgagagagagagaactcagaggcgagagagagagagaactcagaggtgagagagagagagaactcagaggcgagagagagagaactcagaggcgagacagacagagaactcagaggcgagacagagagaactcagaggcgagagagagaactcagaggcgagagagagagaactcagaggcgagacagagagagaactcagaggcgagacagagagaactcagaggcgagagagagaactcagaggcgagacagacagagaactcagcggcgagacagacagagaactcagaggcgagacacagagagaactcagaggcgagacagagagaactcagaggcgagacagagagagaactcagaggcgagacagagagaactcagaggcgagagagagaactcagaggcgagacagacagagaactcagcggcgagacagacagagaactcagaggcgagacacagagagaactcagaggcgagagagagagaactcagaggcgagacagagagaactcagaggcgagagacagagaactcagagacgagggagagagagaactcagaggcgagagagagagaactcagaggtgagacagagagagaactcagaggcgagagagagagaactcagaggcgagagagagagaactcagaggtgagacagagagagaactcagaggcgagagagagagaactcagaggcgagagagagagaactcagaggcgagagagagagaactcagaggcgagagagagaactcagaggcgagagagagagaactcagcggcgagagagagagaactcagcggcgagagagagagaactcagaggcgagacagcgagagaactcagaggcgagagacagagaactcagagacgagggagagagagaactcagaggcgagagagagagaactcagaggtgagacagagagagaactcagaggcgagagatagcagggagaccagcggcgagagagagaacggagaggaccgagggaagaccaagagagcaccgtcgagtagacagaagatggagagaggagagaggactcacaatctgtaggagagtagaacggatttgcttcatgtttgtcagggtcgtaggaaggatcaacgtagacgacagggagatctttcaccatttcctgcaaatagacttccaggaaactgtcgaaagaccggacgtgagggaagaccgcttgctgcagagttgcgttgaacgcggcgcgaggatggggcgaagcaggcatcgtcgacggacgacaagaagaagaaggaagacctgaagaagaaggctttggctcaacttcttcatctggagaggcgcctcgtggtcgacgcttcttccaggctctgtcgtcttcgcctgccatcttgactcctggaacaattttggaagaagacttcgaaagagaaggaagaaggacggcgagagaacaacttggaggcgaagcagattgggcgcgcgggtgcgttcggaagcatctgcctcgtctttttcacctttgtgatctcagcatgtctctctggagatggctgagagtgaaagaaagtccagtggaagaaagagaagaacgagagaagaagcatcgagaaccttcctgtcgggtgtgtgctcgagtgaacgggagggaaggggagaaaggtcaggaagacgagaagttgcagcgaggagaacagagggaaatccggaccgcaaaggaggccaacgacgaagagttctgttctgctgagattcgccgcctcccacaagagttcaaaggccctttgaaaggctcgagtcaattctgtcgagtttcgcatgcaacgcgaacgctgcgcggctctcatacccgcagacgcgcgccggacgacaccgatgagcagaatcgcgccgctctcgctctccctccatatatcgcctattttttcgctctcgccttgtcgcggtcggtggtgtggacgcatcggttctcgcctcctctttcttgccaacattcctttttaccgcgtttcttcgtcagacagtggttcagtgtccaggtgtgaacaggaatttccaaagggtctctcagaaggcgagagattccccgaaaaagccgcaagaatgtcggcgagcacgcatcgtcccgtggcgctctttccgcctgcgctgtgcaaagactcttcccttttctgcgtctacaccgcgtcttcttctctttttggagagcgagaactcgacgcgtagtgtgtctcttcggcaaaaagcgagagaaaaagaaaacgcctcttcacctgctgcacatgacgaccaggcagctgggcgccgtacaccacgcgaaaagagacaagaaaagcgagcaggcgacggacatccttgtggatgcttcttctgcttctcccctaaaagggtggacttctgttcttctcatggctccggttcgctcatttccatttctcactgggtcgtttgactacttccgtcttctgcacatctgacaggcgtcgacggcttctcgcgcaaagatacagggtcctctcggacgaaccaagagagaagaaaaatcgtccacgcagcttcttccaggaactcaacttgcctacaccttcttcagactctctcctatgaacgcctggcttcgctgcgtggatgctccgaaagaggtcactcgaacaaaacgcgagacttctctcaatcgaggaatcccagcaaaagctccttggtgaaaaatacgtctctgcctcaaacgtcgacctttttcttctcttcctcttcgatcccctcgtcctccgccttccctcccctcccctgtcagtctcttcctccctgttttcttcgcctcggtcttcttctccttcctcctcgctttcttttcttcgttcaaga

SEQ ID NO: 2847 - DNA, 2608 bp, Toxoplasma gondii
  source 1..2608: mol_type = genomic DNA
gtggctctgagcgtgcctgaatgtgcagaaacgtttcaagaaaatcggtttttcggacggtgcggtgcgggcgttcccaatcccgagtacattccactggctcagcaagggcccactctgtatttgtctcggcaagaaccggcgaacctcacgccgtttgaaagggcgctacttgctcgggacgaaaggctgctcatggaactgaagagtgtgtctgagcgatacgtaagcgctataccgtggctagacatttatatccagatgcggctcggggatgtccacaggcttcttgtggggtgtcacacgcagggaaaaattgggagaatggagcttctaacactctcctctgtagcggaaagggttttccggcagcagctgcacacaccgaccgtggcaagacctgatcccgtgaatgacaaccgccggtctccatggacaagccatgagtcgagaaatactaacagttcacgtgcagaaccggagtgcgctgctgaggttgtctactggtcgaggctgacgtcgctgttgttgcaattgaaagagttcgccctccagcacagggacgacgacggaaaggcatttcttagaattgaactgactgacgagactacgtttcgcgtctaccgccgagcacattcccaacctcgcgtatccgttgagattggctcggccatattgaagtgctcgttatcaccgacgaggtacggtagccagtccattggttgcccctctttgcagtgaccagatttcctctgcaattttgtggtgaaacaaacgcagaacatctccgcgtcatgcaaacgtcaataaaggtggcttctgggaatatttgtttgcacaccaaacagcgcaagccgaagtttttgtggtcagtttcctctgttgcaggtaccatttgaggggtgtgctatttcgttgacaccactgcgcaaaaacgggattgcagatctgtcccattgttcactgtgtgctacgacctgtgctcctgtggcattctcccgtatcaatcctgccttgagttcgagaaggctcttaacgctgtctcgaagaagctcccctgcgtcttggattcggatccggtccgcatgtgaccgggcgacatccccatgcgccgctttttacgccctagagctgctccacgaatctttgccaatgaaagtattatatcatcaggcttgctgaacccggaggagggaggtgccactacttatctgaatcctgctggaggttctgtgaagcagtcgttgccctcccggaagcagcccatacttcctggaacgtttcgtaaatatcgttgttcttgcttagcccaaaagctgttttcctctagagacagcgataaaacggtttttactcaacttcagtgtaggcgacgtcctaaaatgagcgttgctacgggtcattcctggagcgagacacattccgtcgagcctcgtattggtatgtcacagtcagaactcccgccacaagactagaatatcaaggtgcgtgaggaaggcacttgtgagtgttgctgtgtcttctcaaaatgacaaaggaaaacgcggggaatacagatgagatcatggacgccgcatgggggtgcccactcctaattccctcccttgtatgcctgccgttacacaaacaacagtattcagtaacggtttgcatcgactagtggatggttgtaaaaatcataggggagagacgtcgaaacagcaatacagcgtattatctccctatcgcgatgtttcaatggcacactgcggtgggctgcttcatgagagttgcgttctccacagccagattctggtaggccttgtgccatcatacacgcgtcacgcaggaacactcggatctcatgaacttcgaattttatctgaaggaggaataaacaccgggatttgtgagaacgcgacggctggctgcagcagccgttcgtatgaaacacacggggaccatgtttcgccactacggtgtgtagttctccggtcatcaagctttggagccttctccagaagtctcagttgatatggccacacaagaacttttatggtgtccattccattcgcctagtctcttttggcaggcagttctgtgacatgaaagtggtcgtcgcacgtacgtgccatctctcgcgaaaccatgtcaggtggttcgctctttcgtggtacgagctagcctcggggacctccccagaaagtggcaccttgtgtgtgtgctggccagaggagcccataaagaagcatctgacagccttggatgctattttgcctcctggaaacacgatgaccttgaaattcacggtaaaacacatatcctgcgccctccccccacccagttggacggtgttgttcgagcggaaggcggcaggatcagctgcgaagagacgtcactcgacggcgccccacaaagggagaatagggagacctgtcggagcgccccagtgaatcgttaagcctgatccacatcttttcccgtctcttcgaacaccacagtttgcggccggcgtggggtgtctgagtcgcgcgcgctgtgcgaggggtgatacgcgccatccgcgcgctgtgctgaaactgtgaaaaagccaacgacttcttcgccttttgcgcagtgcaaaggcaca

SEQ ID NO: 2848 - DNA, 1865 bp, Toxoplasma gondii
  source 1..1865: mol_type = genomic DNA
aatattatgtatggtactagtcagtctcgaagatcttttcttctctcgcgtaccttgctaagcgacaaaactcggctggtctcctgttactcgattcccgtctgaaagttgcttcacactagagccaaaagaagtgataagctgctgcagaaacaccgatagcagacagactcgcccaggagcgccgtaggcgcagattatcgtataaggggacaattgtgtaacggtacccttccgcacatagcattgtcgattctcttcagttcccatccgctccacgatctcagtgcatatgcatgccagtatcgtgacaaatatttgttttgtcttgtgtacgtggccacgacgtcagtcgattcttaagctgtttcactatctttctcggggccactttgcagtaaccgaagaagtagcaggtagatcccgccagccatttccactccaggctcgctttaagacgcatagaatttggtgctaaaatccatgcaatttcaactgcgacagcgtccacagtcagcgaccagtaccttagtattgatattaccccccactgtttaccgacgaaaatgaccaccgtcaaaccaacagcagcgctgacacactgttgcccgctgaactatactgaacatccgtacggctgttgggaatttatctacagctccacttggcatagaacgggacaacacacgagtctggactagcatagagataacccgtctttcgtacacgttgccatttgtaatgctactgttccacagaatccggacgcctgcgtggaccaggagccaacgacagctcaccgaatgcgacctgaacaacgtcgatttccggagaaagttctcgggtgcactcggtcggtttcatcccaccccttcactgtctcattgtagagagctttctccgacagtgggagatgtctgagtagcagaggcaaaccttgacgtattcgttcgccccgttctggggcacttgcagttcttagtgctgttttctgatccgcagagtatgtgctactgtggcgaggataagagctgccgattccttcttcgcccgactacgcaaccttctgaaggcattatcgcaccaaaacgcttttgtgagagcctgtaaactgcctcaccggtaaaaacggtacctcttcggcggtagcggggaaagaagtactgtttataacgtaggaccttgcgagcgcattctggtgccttcccacccctggcttttttccattccctttttgaagataacagcgtcgtaagcatggcggaaggcggtcgaatctcacacaactgtcttctcatatccattactctgaaacgagagtatcgctgtactagatatttattctacatgctctacgtttcgggttcccacgacacccattaaaccgcggtgagggtcagctagcggtccccagactgccttgacaagcacggtcttggcgcagattatgagataattcgccctttaaaaagtgtttgtcgtgagctcctgtgcagacgagcgctcgcagtttttgggggtgcgcgaagtgaacagagtaattcaggcaatccacacggttccccgtaccgggtcgcttacccacagggcacaacaccaataggagcggcggcaacccgcctgagcatggcttgtcgctctttcttcgatcctcccagcgtgtctcgccgacaagtcgagctggctgttagttccagccccttggtgggttagctcaactctggaacaagcgagcgccataggcatccagtgggccactctagccggaggggatggccacacccgggatcagctagcccacccggttgaagtactggggctcccgtagaacccttctcgctggcttgcctcaggcccgaatctaa

SEQ ID NO: 2849 - DNA, 2703 bp, Toxoplasma gondii
  source 1..2703: mol_type = genomic DNA
ttttcggcgatcaaatactcgggtccatggaacaaaatttgcccagcaaaaaacggaaggaatccgccaaacattggtccctagggacccgtgtgcttctcgtcggagcccgcaagcggaaaacgcctgctccggaccatttcacagaccaagtcaaatgacgttctgtcgcctcaaactgggcagagtaccttctggaagcactacgcctaggacacaaccgatgaggaataaagttggggtcgtaggatattgatattcagcacatgcagctgttttttgcagccccgcgggggagggaggctgtatgacaatcataaagaacttggttgtctgtatcgcacgacaagaattataatcggtcactgcttgtgtctgtacctcgactcagatcttctgggggaacggtatgagcgcgaccggctccgccggccgacactggacgcccgacgatcgtcgccgtttccactatcttctcgaagttcaccatcacgaggaggcgatctgtcttgcctcggtgaacgctcccgcgagcgagagccgtcacgcgagccggagggtcctctggacgaccgccggtccattttcacgtcttcggcttcctcttgagccatgatggatgaaacctaaaaaaagcaaaccaacagccccacgaattcctcacgacttttccgaacactccacactgaatggagcttccaacacgcacgagaaacgcactctactcttcgaggaagtgacagacagcatcttcctcggccattgcattgaaactccgtgtcctttctgttcacatcgcagactaagccggcttgtgattgtggcgcgtctaccagcagaaacgacgctgaatctcgtggtgaggtcctgtcgcaagaatgctgcacaggtgcactaaccacggagacgtgacaggacacagagttctattgagaattacgtgtgcgattgccgaaccgcctgccaatcacgacacggttctacggaaaaggtaaaaaaaagcgtggccgaagaaatgacacaggctgcacccgccgaacaagggtacgaggacagaggagctgtgggggaaaccgagacaaacatcgcgctcctcttgataggacagaagtccaaaatgcaaatggtgcttcagctaacctgaataacggctgaagcgaacgagaaaaggggatctggcggggtagaaaatgcctcgacaggtctgctgctatggcgcactgattggtagtttctcccgtttccaagtacagaaacacctccttttctgatgagagaaagacgaataagggaaagtccacctcacaccagacaaagcctgacgcgaagcaggcagttggcaatccactttgaagaggtgattgggttttccttgttaggagaacggcggcgttgctttccgtcaagagtgcagccgggttgaaaaacgagagacagaccgtaccgaggtggtgttggcaattgctggatggggtggatccccccgcaagtggcaattcccgaagatacgccggacccttcttcctgccgcgtctagcacagaccagcacgtaaggattcgcacgcagccgtcgtcgcggctctctgaggtgccgaaaaagcggacaaggtatgctgaaaaacgggaaaccgtttgcgctttcttgtcgtgcttggcatcttttcatgacttgagccgtgaagaagtctgctacctgttttttcccggccacaccgaagtagccgcctcaccacgtcgtccgggatttgtgctgctttcgtccagcgaccgcaaggaggaagacgttgctgaaggcagtgtgtgtcggacttgtcatgtgtggcacactggtgctccggagggagcttttgcgtttcgaaggacagcatgccctttctgctttgaaaatactctctgtgaacttttctcacagctttgtcgtaaataaggagagaccgcggcagtacatattccccactatggcctttcgaaagatcaaagcgcttcggtgccacctgcagtgacgcagcaaacaggggattagcgtggcccccggactcaccagattacctgatggggtccagagatcttcgacaccgtaatagctggtgatctagctgcctattgtccgcctgcggcttacaaaccctctgaaaaagacgagtccagttcctagttgctaatttgccacggaacacaccgcggcgaatgcggcggcaaatcacctgaaattttcaagtgggggcatacggtcacacgaagtactgtcagaaaaagttatgcacgtgtccgtctccctgtattcgcctccctagtctctttccacgttagagacgtatctcaatcctagcaaaccgggactccagtcagtctcgctctctatcccagtcagagctgctcttcactacgtgtggcgtactgatggttctcgtcgtcttcgatgctccggttcacttcggacaaaaaaccggaacatgtcttcaccaaggaacagtttgtctgcctccttgtctgaaacctcccctttagagaccaaaccggcacactcgtggagagcttgaattaggccgggtccacgctttctgaagcgctttctgccgtcagctttttcgtctgtgcgtgttcgaagtacctacgggaggagtgtaccgtctacttgttttttcaatgcgtccgcaacggattgtggctgcagttgccgcgttatcgctaaaaaggcacaa

SEQ ID NO: 2850 - DNA, 1734 bp, Toxoplasma gondii
  source 1..1734: mol_type = genomic DNA
cctttgacgaatcagcgaacgacccttccaacgagtcttcttcatcgctctggatgaaaggctcacagcccgcgaaacgtgcgggtgcgttcgagacattcgtcgggagatgcttcacattccagcttcaaagttttccatgctcgattgctgtgaaagacccggttgtggagctgatccccagcccctacccccagctaaatagcctcaataaactcacgatcttcggtttcttctcgcagcgggtagttccgctttcgatagtgttggttgcagccattgcgtctctttttccacagagcgtagaaatgcgcgggttcatccgcaagcgagtgcagaactgctgagcgaatggagctgacgaatatgtcgccgcagtaaacccccgttcagtgcgttgcccgctaggcagttggttttcccacgttgatagagcactaggaacttccgtttcacacgcgaggcggccagatatggaaggcaggaccgagcaaagtacagccggcacggatgggccacagttagatgccaaggaactggacggcttcccggtcggaacaaaatactgcgaaggagcacggatggagaatttgtggaaaaacgacgaaaggatgcgtttgtgtgtgtctaggaaggcaggacgaaccatggaaatttgtgactgtccgtagaactgcagagctgggaggacagcggcgctgctgtggacgtacacctcatgcacagcgtcgggaacgaaggtgcctagaaacgacaaacaaggtacaagagccaaggacgagagccaagttgccctgaaaactgaagacacaattcgagctaccggtgtagacgagtgactccttcgcgtgtcttggaaacttcccatgggcagtggaaggaacatggagcatcagcgtgccacagtaactgaccgttctgtgtctgagctgatcgcaattcaactgggcggtgcgcgtatgttccttcccgcttcgacacgaaacgcgcaaaaggtccagggaaaggcatgcacggagatttaatcacgtcgggtgtgggtgagtgaggatgagtcactgcccgaagatcctcgaataagtaattcacacgacagaaccttcaacgtctaggaaacacgatcagaatcaaaatgctatcacgccattccagcagtccttcagacccaagacagaagagaccaccggaaagggcaacaggacttgggccctcagttgcatgcatgctgacacagaacagggtgccggggctggtcacgagccgacgaacttactgtgcaaaaagtcacgccacagacggcttaaaaccgggcagtatcgccgagaataggctagagtggacgcacagcaagccaaattcaggtagctttgagagaattgtcaagcgcgcggactgctcaggcagatgcacactgcgcagcaacaggagacacgagaggcggcgtcgtgcatctgaacacactttgttttcttttccacacacgcagggccaggcgcccctcgggtttcctttcaggcggaacgtccgggacgctgtggcatcgtgacggagtgggctttttttccgtcttgttgggaaggagcgctggcggggcgagcacgcatctccaatcctggagaagaaaactattcctatctttttctcgatattcgcgacctcgtttgctttgtgctggcgtgtttgcttccttcttttgcggtccttccttctatgagacgacttagttgcccacga

SEQ ID NO: 2851 - DNA, 3041 bp, Toxoplasma gondii
  source 1..3041: mol_type = genomic DNA
gacgaagagaccattctttttcggcgtggctggtgtttcgatgcatgaggagaggggtgcagagtttctgggcgaaggcgacgcagaatcgtccgacacgcgacctgggggttgtggaacgagtaatcccttgatcggcgcgcctgtgatttttctaatccgggacggtcttttaggcgggaacgactccactgaagatcgacacctgcgggttctcgttcttcactgcaagagtcaagacgttttcaagagctgctgtgttgcggcgtgcatgcgtcacgggaaaagcattgcagactggaaaggtctcctttttgattcgttttttcggtggagacagtgtcacttgttgcagagacttgacagctttctgtacaactagttttatgtgccggcttcgaaaaagggcataaagtggtttgactcatatacgaggagagaaggcgacgtcgtgctgtggtaaaaatgatccagggggctctgttcgccctttgggaggccgagacgcgttctgcacgtggtcctgcgtaggtcgcgtgtgagaggatgaatcgaattaagtatgggagagtttcagcgttcgtcgttaaacgatgagtagaaaaaacaacgttaagcgcccgtttccagcctcgtcagaaatgtgcctcagctgcatgcagcgggaatgtggaagcgcgcaaccagtggcggtttcatagatgcgaagagtccacacaaactgcattttacatctacatttgacgaagagcagtatggatgatcctcgtttgattctacctgtgaattctcgaccggtagcaagggtcgcgtggggagacaccctgtaatagttcggatactgcgttcgacccaagcgatgagagacaggcaaacgacggatcgcagctcagcaaacgcgaagacaagaaaccgagtatcgactcagatggacagaacacgtaactgatccttgtgctatttgtcttagttgagtcttcagattaagcgatactaacgtttttcggaactaaagtcagcaggctcgaagggaatgtgtgcagccagcctggctcattaaaccggcctggattcgtagacgaaacctcaatggtaagattgactttcttccgggaagcgtccacctgacgcctggtgtatgtacaccccatcgcggcgtctcactggcaccgagtttcggtgatgtctgcaagaagaacgcgtatgccggagagagatcctgggcttttcgaatcgccagagttggcaagtgtgtagactgagcttcttcgaggtcgaaccgtatcggatttgcgccccgacaaatatgctgaattcttaccttggctcgtgagctgcggtccgccgtgtaaggcagtagtctccgacgagaaaaagcgaggcacatcgacgcgggagaaacctgattcctgacctggcaagccgcgttcttgggtatgtttttatcgggtttagtggcttagcatgcttgtgaatgcaggacatcatcccgcaaggggatcttttccagaggtttaccaagggcacaccgctgcctcatctgcacggtcagtgcacaacgaggcgccattgctcgtgtttgagtcgaggcagcgctgtgcgtgtttcgtctctatttcccaattcggacgcccaactttttctcgcgaaatacccctcaattgtgtttgctcaacgccctcccacaacttctctttgcgtaccgacagttcctcagagcaactttttctgcgggcagtagagacgtacggcctgcaactcgtggacttgcacaagcaaagggcccggtaaagaacaggttcagcattcctcttgtggggcaacaggcgagaccactgcttgcgtacgtttgtccttgttccgcaatttccctccatcgtctagaagcgcatgcttcggctcaactcaaaaaaccggtctggccgacctcacctttctgcaagggaaataaactcaaacttggagacgcagcggagcccctccgtccagcgcgcaggcgtctctcagcgaggggggcggagatttcctctgcgctttgacttctcccgcgacctgaggcggttgaggaaagagttctccgctctggagaagccgctgtcggcggtctttttgaagagtctttgggacgcggagagcttcccagacaacgttcactaccaagtgtggagattcttcagcccctgagctccggagagcacgctttttcgttgagcagttgccgaccgacagaggacgagcatctggatcccggttcgccccctgcatctagtggtgtggaagcatctacgttttctggaaggaacttgaattgctttctgtttctacgtttttaaccgtctggagcaatttgctcctgcgactattaatacctcgcgggacgcacgagagctgccgccgccgtgttggtgttgggagtgtcgcccttgcgagacgaagcgcgttcgtgctcttgtaacgcattgttttttttaagtttcattggctgttgtccaagtcctctgacgcactgaagatcgcttccccgttttctccagagctcttttccaccgagtgctggtggccagcagtcctgtctctcctgtctcctctcctgtttctccccccacgtcccccgcgtgaggaagtctttgttttgagtcggcctattcctccacgaattctcacactgacgctttgccgacatgcgagtgcacctaaacgtgttggaattcagcatcgtacgacggtaaggatttaccacctaaagtatgttctcggcatttccagttctttcagaagtgaaacgtgggcgcgctccgcgggactcgtctgttttccgccgtgtcatcctcgaccttctttccacgttgtgttcccgcttgaactcccgctttttcacagaaggacgctgtttgagtaacgcggcttcgtccacacttttttgccgtccaccccagccgcacagtgtgttcgagcgctagcgggccgagagacccctcgtctctcctcacacatttaccctcaatcccaggcgttttgccctgaaccccttttcaccgcga

SEQ ID NO: 2852 - DNA, 2646 bp, Toxoplasma gondii
  source 1..2646: mol_type = genomic DNA
atggtatcctcagtactgttcgcgccaaaagtctcgtggacggttgcggtgctgtgcgttttccagttcaagtgacactacgatgtctctgtttccaaaaggatatgccgagcaactcaagaagacatcgttgttgaggtctcgatgtacgacagacgcgtggacaacgtgtcagtgtaacagttaagcgcatgtttgtttgcggtgtccgttcgcttgacagggctaccacttggtcgtggtgtcgaatcaactcggggttcagaaagggcatacgacgctgatgtctctgacggagaagagtgacgcgctgcagcagacgttgaacgtgccgttgacggtttgcctcgcggttgctgacgactttttccgcaaaccacgaacagctgcagcctctttcatctttgctcaccttctgccacatctccaccaggtgcagtgctgtgtaagctcctctcagtgctgtacagtacggtgttcggatggtggatgggcattcgaccgagagcgacagctgtcgctcccaccggtttttttcgtcggcgatgcggcaggaaggttgggagttcccagtagcacaagtgtaggcgagaaacccaagggccagagggcaaagaacgagaaggcaaagacacccaaggatcacagtgcggcagatctgaaattcgctctgaacgtaggagtgcccttctttactccggagcagttttttcttgaacaggacgaagtgccaccaccgcttattgcgtattttgggaagggcactctccccataggttcggtacagagtggctggacgcggcacggaacgcactgggctggagtcggatccgaagttcactccgaccaacgcatactaaattctacagcagtgataacagaggcaacctccaaagtgaaactgttcgtgcctgctgagctggtgaagaacgctactccgaaccggcgaatgagggaagagcattttgggtggctgcgaggtgataaggtacgcagctcgtccgttggaagcacaggcctcactggtcccggcgtaaagtccgaaaacggtgaccgtgttacaggtggtgctgaaaacgactcaaggggattcactacggataacgctggcaacgagaccggtggtgacaagaaccgtcacgctacacagccgcaactggtaatccttattggcgctccgggaagtgggaagagcactctgacagagacagtgttcaaggattacacgtgcattcggcaggatgacctgaaaactcaagcaaagtgcgtcaaagcgtgtgaaaaggctcttagcgagaagcgcaatgtcgtgatcgacatgcaaaacgcgacatgcaaaacacgcgagccgtatatcaaactaggaaaggcactagggactcatcggatacggtgcgtcgttcttaaatggcccgaagaaatgtgcaaacatatgaatacgtacagagcgttggttggacgcgagagggcaaaacgatcacgaaacgcgctctcaactgatttcgagggacagcgacgacccaccaaacagcctagcacgcgattccgggaggaggctgttccgtcgtttgttctgaaaaatttttacagacaggtggaactgccgtccgccgatgcagaaggggtggacgatgttgttatccttgacgacgcagaacggcatttcatgtgtgaagagttctctgatgatgatgaaatggtactgtttggttctttcctcgactgagcctcaccttgaacatattcccattgtgtgtgtgctcattctttctgcttgacatgcagtcatgaaacagtgggaagactgacgcaggtcaacaaactggtgaacatggttgttgtatctaattggccaagtatagatgagccttttcttgcctgaagtgaaacacatcctaagcgtacagctacccttattgagccgtctcgtatgtcgaagcctacgaccaacacttggcttaccgtcaacagcggtcgctgagccgcagacttaatacggttgtgccgtctgtacaaacacattgccagctctgaagatggctctgaatcctgggttaacgtcgcttcggcgtgagagcctgcccaataccaacagctgtaaacacagagtttaaagccgatggcagtgcttgggcgcgcacggagcgcggaaataacaaggagttgttcttcaacacagctgagcctatgccaccgacacgaatcatcgatgaaaaccacaagcagagttatttaccagcgcaaaaattggctatttcaccgtatatattagtataccagaagattgcatcgactgttcggaggcaactcgccgctacacggaattcacagtgacaccagcaggattagggtggcgtggggggttctcgggggacaggtgttttaatcgagaaaaaaattcagaagcagaagtcctaaattcgccaatgacgtttgcgtccggtagccactagggaattctgcccgattataaagcactgggttctgtcatctgccagagtgctcccggaagtatgtacaccggccgcacctgaacactcgcaccaaggatgggagccagctggttgtccagtctgctgaagtaacgcttctgtcttttggcgcaccctccactctttccacaggcgtcttcctcaatcacagcta

SEQ ID NO: 2853 - DNA, 3046 bp, Toxoplasma gondii
  source 1..3046: mol_type = genomic DNA
agatgcataaaattacaatatccgcctctgcgacactgtccatcaacgaactgccggcaccgtgcttcccggaaatctgtaacaggggtgaactcggcgtgaatctgcttgcctgtaaacaacacaccagagacacgccgcgacggacaggtggccatgaaaacacagctgaacgcagttgaaaagctcaccagaatgctacctgctcctacacccgctcgtgcatcacatacctgagtaaaatcttccttgcaaggcagccagtgccttgtttgccgcttcttcatctgtgtattttacgtagacgtttccgatgatgtggtcgcctatattgtcgcacaccaccatatcctccacctcaccgtacttcgctaactcctcgaatacttcagaaaaaaatgcctcgaagtggtccgctgcttggtcaagtagttcatccgaaactgaacaaccacagcacacggattcgcaagacgttgctacgaatgcaactgcctaacccgttgacacctttcctaaacgaagtgattcctaaacgtgcacactagtagccacaagcccctgcaaaactgaccaatcgaccacaatgaagaaaaccagacgaactgcaaagcactaactagcacaactatgcgtgccggaattcaacaatagtggacggctgaacgattagtcttggcttaagaagaccggttaactatcctgtgatgactatccttaccattctgtccttctgcaattgccacagctacgggagggttggggtacatgtgacggaggacgattgttggcgacgatgtcggtttatagtgcgaccgagaacactgatctccatgacgacaggctccaattttccaataaaaaggacagttcactctatcctcctccgtccctatgatacgagccagatgctccgccatcgtggatgacgaaggcagtgacgcagactgtgttcaacaataaaaacgtattcagcgcaaacgtatttagcagattcaccaagggcaagatataattatacacactaccaagtgcgcaagacaatccagtcgggatacaaccacacacccagagaatcaagaaaaagcaacaaagccatgaaccgatgataagacaaaaacgttaccatccatacaaaaagagacagggttttaaaaacggtgtcgcgtgaccaaaaagacgcctactgaaagcatacaaaagccagttcagccttcaacgagccaacccgccaagcgaaagggtggatctttccccagctgttaaagacgctccgaacggtgcaggaatcgaacatcaaagcaccgcgttcgaatgtgacacaagacgtttcaaacaactcttctccagactacgaggactctttcgactgacaagataaacgggacgcgaaaactacgtcgttggtcgtccgctgttctttgccgacttcatccatagtcttcctctgtatgcatcgcggggaatggggggacttcttttggatgcactggaggaaaaacgccactgcgcccgttaacttttcttcaatgaaactgtcactctttcatggaatgacgtttttccaccatgtaaacaatcagaaaacactcttttttgaccgtaacatacggcagcgcatcctacaggcagtgccctcagaagaaaaactgaaggagcttgtgctatacttcgcatagtaccaagtgattcacgtagttaagctttcccctatttgcagaactccgggaattctctgcacacgccaacaaagaaacacagcaactccaccgtagtgtagatatccgtccctcattagggaacgggcgtgggctctgccgaaaataagccgtggattttatgttgaagcggtggctggtattctgcgctctctatgcgagagtgaggggtgacacgccaaaaagcgtgtccctaatggccgtggattactttttgtcctctttactttagtgggatcaacatgccgtttctaattattccgtatcagctgccggtctactctttgcagggtcaggagacagagtcggccttatactgaaggtcgagcggtctttcgcgttgcttcctacgttccaccgtccaccgctgttttcagtgagcaaaatgcttctggaagtcaccggtttccacctttttttcaaactgagacggcattgttctggtgttggacctaaaattagcatcatcttctgtatcgttcgtctcacggcgtagatatgaatagaggaaagacgagctcactatgtacgcctttggctttgactgtcgcctgtcgcatgcaccgtccctcctactacgagcctgcaagattcctcttccctttgtcacgcccgctgcagcgttgtcccgcctacaaagacacgtcacacaatcacccgtatccacctgcataaagttgagaaactggggcgttatgtgtgggaacaaatcttcgtttctttccgaaaacgacgccgtccaccggacgtttgagtagtgtcagtcgcagctgcctaccttgatcccgacattttgtcgtccgctattttttccgtctttgtgcggttcatctgcagttgttggctcagccacctgatttgctgatgttcttctatctcactgatctcactgctgttctctcccgtgtttttgtatggacaatccgcctgtgtgcgtggctctcctgcacatgcacctcggcaacagaaagggccgtctgggtttgcgcctcactgtcactcttttagaggcgactgacagacacggtcccaaacgagtgttagctgcgcaactgcccgcattttgttgagtttgttgcttgctcggaaaacaaacgctccagcaggagacccgtcgatcagtaccaacaggatttccggcaaaaagtgccgcatcaccgaaggcaagcgaccgaggttacctctgcgaaaaaggggacatctggagcagcgattgtcgaaaaaggtcttagcagttttgcttcctgcggacgtagaggccactgcgactaccgcggaacggacagcactagagcaacgcgtctcgcagaagccccagagagaacaaa

SEQ ID NO: 2854 - DNA, 3874 bp, Toxoplasma gondii
  source 1..3874: mol_type = genomic DNA
gaagtggtgttcgtccaagcttcgtcgtctcgttaactgaaagacctaggggcagtcgttcattcgaagacgacggcttcgttgaacaagtaaataggtagcggtgttggggaaggactgaagctgatatctgctgatcagtgtacctgcgtctagtcctagctgaaataggtcgacctctccataaaaagccgctgtatcagaataaacgcacatggcagcaaactcgcacccccgcgagctcttcagtagttatttgcctcattcgttcgttggtatggcctccgtaaccgcagagaacaacaccgacccaccgtggtggaggatggtcattccactctgaggatctttgacgctgtagtcgacatcaaaagtctggagcatcctgaaacatgcaagaccctgtgctggtggaaatgattcaaattggcaaccgtgacacagtgcccaagaagaagccatcatgatgatgtcttggtcatagtactacttgacggaagcaaccgacgcatcaaagtcacttcagccggtcctgacctcaccaggaacagagtcagggatctcaacagttagcaaccacttaggcgtgaaggtagtatgtacaaagtgaggaaagcgggcagttgggaaagcactcctacgccgcttcgtggctgaagtagctgatttgtgaggaggataaacaatcaggtgctgatgtttttgcagactgaaagagtaagcgtgaaaatcagcatacttccattggcagtatttttcgtgaggtgaaagcgtgcgaaggggcagtgggctgtggtttgtaggatacctgagtttgttcatatccggcgcctccttcatgatttcgtcaaggagctaagaacaaacgaaaacagcagccgtgtcaacgatatttgcagacccagaccgtaggtagctccacaacagagtaggcgacccggctgccgcgcgcttgggagcatactaacttcaagctgcatccgctttttgctgtttgtcaagttgccaccgcgttttgagtctgatctctggaggccatcgtcggtggatggtttctgcttttccgaagcgggcacatccgcccggtgcggagacacgacgcgcgacatcgaaagagagatgaagagatggtgtcctctctttttcgaaaccgactaacacatggaactccgcttttccacacgttcgtgatcccaaacggtttccatcaagttgttttcaagtttcactatttcttttcacgaagtagtcggcaaaagaatcaagtatattgaaggatgtcaggatttcagttgtttcatcgcttaaatgattttgtacattaactagcacgaacattgaacctgcatgcgaacctggtattgtgaacagaagctgtgctgttgatgtggcggatcacaccgcgtaaaaggtgaccatcttaagaaaatgtcaacaaaatacagaacagacacaggttcttgcggttccaagaatccacgaatgtctatttctaaggctggtctagttgatggaggtcgcctgtcgcttacggtggatttcagtgtatcaggattttgttggctgagagtaaggaacacaactgttgagcatgcaacaagaagcagaagcagtctgccctcgacatcactttgtttttgctcggtcaccctgggggcgcctacctcgaaaaccacccgctgctttgcaacaggttcgtggaagcttttagaaactgcacaaggatggttcttcctttagccccagaagtgttggtccgcatgcagaacaaatgcaacccttgtggtagatatcgattgctcccaccatcaagcagtaacacgtgacgatgacaccagacgggttgaatgctcctcctatcccgattggcactatgcccattttttgcgaaacccgaaagacatgtggtagggcaagtgaacgcatcaatgctgaacgagttgccttaaaaagttcttctgctgcccctgctgactccatgtttgtgaggaagctccaacaatttggtgatgatcttacagtgctgcttcattcatagccgcaatctagggagacactctgaagtggcaaaaactcaagaaaataattcaacattatcatacctgcgttagctggttcaaagcttcgttctcgcccgtcgctgcagaaaactgtattactgacgatcaatctcgtacagtgaaacagtgacgtaccgacttcctgaagtgccttcacatcatcttcaattatcgttcacacgatgttacacaaatgataacgccaatgcgaatccatctacctttctcgaaagcccataaatctgccagggaacgtctgagagagcgtttctccttcccgaatcgcagtgagtctagatggtcgtcagcactctcctcaatgtgaatgttcctggaagaaatgtgtttgccgtcttgccatagcagctggtgtccggcattttttctcacaaaactgggtgaggagggacctgaaggtcccccagcagcgccggtagcatgtcctgtgttcgagtgattttctacgaaactagaattactcaaaaacgaatcttactttcgagcgactgcctgccgcgaccgtagcacagaggcacacccatgtgagagtggcgcttgccatcatagtttttggaagggacatagtacagcccacagtatatatcacagtattcgacggaaggaatgcaagcaggggcgagggagaatgaacgtagcgaacatgcagtcacacaaggttcttctgtatgtacacgccacgtcactcgctgtcggtgatcaacctcagcagctatgcacggcatcgcctgccgatgccgaactacctgcgatcttttctctttcctgtgatggttatacgcacagataagactggtcgttatgcatggcagcctgctcgctggctgcttatcttgccagcggaatgcgctgtggctactgtcttacgataatgtcaaacgagacatgtcggcagcacactgcgctgagtttcaagtcgtacctacaacaaatgctcaaatgcaactgcccataagatagttgtggctaacctatctctgtgtcttagtaatgcggtataaaaagctttgccgtgttttttttgggtgagcacgaagtagttgatgacactcatatcaacgtcagctactgtgttacggtcttacatgagagcgaccccactgcagacaaccattctacagacgtcttggccttcaagatgttgcaatatacgcgtgcgacggtgtaggccacaaaacaacaagcgagagtgaatcaacagcagcgcggtatatgcgatgtccgctgaatgacagtgaagactatcgggtcacgatgccgactctaagcgtgcactccatttaacgcgaataaccaatcgttccggtttacaagacagttgagaaattaggggtggaatccagctaagctacactcgagcgacgaaacattctggttgtgcggctgaagtttgtgaaaaagccttggacacaggaggtcgcatgcacactgttaggatacttcttctcgtcacatgcctcctacacttgatgatcctgctactgtgagatcatcctaacggcggaaagggaaatgtgtttcaaagaaaatctaaagcagatgtgtgagtgcattaagacgacgaagggcgtagattatataccgatacatcttagtcttcaagtaacatgcgaagcttaaacttgaggacccagatgcacgtgagtgtactgacaccgggattaatcacctaaggtgaacagagcaacatcgtgcctctgtatatcggaagaaggtgcttcacacaccagacttgactgcaaggcgccttggaatgcattgtaggagactgctgtgactaaacctccacgtatcca

SEQ ID NO: 2855 - DNA, 1925 bp, Toxoplasma gondii
  source 1..1925: mol_type = genomic DNA
aacagtcaggaaggaagaagacaaagaaaaaggaagaggcgcaagagaacgaaggaaacagaaaaggggagagaaggggaggaagagcgagaatgaaaaagaaggagaagaaggggaaagaaacggatcctgtgcagggcaatggcaacgaccggcgaacgagaaagtgaaggcgcatgcgcagagtcgaaagaagcggaacgcgaccttggtacggaggcgagagcagaagcaggctccgtcgcagagtcgaaggatgccgaacgcaaagagaagacgtccctcgaggctgaagcgccccgagaagaacatgcgaagacagccagcaaaggcaacgcacaagatgatgggaggcagagaaggtgagagcgaaaaggagaagaaagagagagtggagaacgagaagagacagaggacagagtggagaacaagcagatgagcacgaaagaagagaggagagacggagcaaaggtctctggtggaagagaggaaggcgagagaagagcagccggtaaagccttcctggacaagacaagccggcgaagaagagacaaatgcggttcgcaggaagaagagttcgcgccaaaattcgaactctcacgcgagccgcgaacgtggaagcaactgagattcgtgctgcgtatcaaaaaaggctcagagaagacgcccagagaaaccgatttgtctgtcggagaattgtgtacacacacgcgccggtcgactcgcctctgtcggcgccgagcttctttcgcttcctccgtatttcctttgcactgacgcctctttttctcttcctcgccttctcgttcaagagtggagatacctgcatttgcgtgacgactagcgagtgaggacatacacgagagccggagtccgacgccgtcctcctcgcgcgctgctcatcgccgcgcagagcgaagaagacaaatcccaatcagaaagaggagatggagagaaagagagaagacagacagagaggagatgagaaagagaagcggaaagaaaacctccggagttctctctcgcctcgaaaaaacgcgagacggcgctcgccgcgccccgagtctgcgtgcatgcaacgccgtccaaaaggcggcttttctctttgtctcgcgtcacggagagagagaggaaacgagggcagaacgcggacaaccaaggtgactggagacgcagatcgaattgaaaggcggaatcggagtctcggcgcctctctgtcgaaacaccgtcccggtttgacacctaaaaaaaagacgagagagacccacaaacagaacggctcttcgggactcggtctacctacacctgaagcttgttccgcagaaaaagcggagaagactgttcgaaacagccggtggccgacgggagaaggaggcgtttcgttcaactgtcctcagttttccggccgctctccactctcatcgtgcgtccgtcgcctgcggcaactggccgagagctgcagacgccagacgcgtccaggtcggtcttctctacttttcttttcactttctcccgctgacaggaaggacgcttcgaacggcgagtgtgctcactcttgcctgctgcctcgaacagcgagactctctggatttcttcttcaacgacgccgcgctccgctgcgaggacgtttctgtgtctcaacatcttttttgcgtatcctcgattgggtatctccctcgcgtcttcggcttcttctctttctttcctccctctctgccgtctttgcgtcgacgctcgctgcttgcggcgcccgcaggtccgatttctctcggcgttcctctccctgctgcgtttcttgtctctccttctctgcgtgtgtcaggctctttgttcagagccgctcagctccttctcctcctcctctctgtgggccaagctcgtcaggacttccccgcttggctgcaggctccaacagaagccgaaca

SEQ ID NO: 2856 - DNA, 2952 bp, Toxoplasma gondii
  source 1..2952: mol_type = genomic DNA
tggccgaactcgagttgagagagacgtttctgtcgcacttggtttttttccgcgaccctttttggcaagcgaaagccagatagacgcgaaattcgattcgcgtttccgttcaaccggtgggaattgtcggctttctttgtcgatgcatacgtttcactgggagcgctatcgcctcgtttatgtagtcgaggtcgcggtgcaggacggacggaaatcttccccgcgcttttgctcatcccacattgtagagaacgcaaatgccgcggattgtgtatcactcagctacgggaaacagtgtctctggtgtacggaagccatagttcccattctttcaaacgacacaccggtaggttttcgacaacgagcagtcctcgtcgtttcctctcgctgcgtgagttcgcacatgccaagcacttgacggaagagtttgtcagtagacaaaagcaaaggggatccgggaaaacggcagctcgtgccaggcaatggaaacgccaactgagagccccgaactcagggcatgcagcagagtcagatagctgcagcagttccccgtgttacaatttttaagaggggactcaataggagtctttgtttttcgtaaggcgcagacgagagtcgtgagagagaatcacgcgccaaacctaactcgacaagaccatctctcacgacagcatcggatgtgtaacatcaagcatcctaaacacacagatacatattggtgtgcatgtgagcatggaagtccctttgcactacgaaacgcagagcgtcattgtgcatctgtccagtagaaatgtagaaaaaaacgtctttgaaatatgcaaattgaatttatagggatgtggtatttccttccagctgaagtgggggattcaagtagacccttctttccaagacttttcaaagacagagtgtgtttcgagttgccagcatgcgagtttcttcggtctcacataggaagagttccactttcgactccggcgttttcaactacatgattcttgtctttcatcaaagatgtgacgcaacttcaagatcttccgtgaactctgtcgggaacgagagactggaacggacctcacacggtcgagaatgctctatcgtcatgggtgtgttttacatgctgccggcaaaatgttccggtttctctccgtgttggcatgtacgcttcgtggcaacaaatttaagggcactctctggacccttgaagctcccgttttcacggcttctctacggtctaagaacaagacagaacacatcttggccataatgggctctctgcaaactctagagctgcggttgtcaatttagagtttgcgccctaataattctaagatccaaagtggttcctttatctgctatagtgtgagcgcttctggattcatcagaaagcacctcgtacgtcggtcgaccctatttttccggtctgaaaggtgacacacacagttcaccatacatttgatttcaactttggcaggaacccaatttctcatggttggaatcatggctctcgattcgctgctgttccgtggcacagtcatggacaccacttttcaggtggtgatgccaatatcaaaagtgaggtggagggtagtttaaacgagttattgggtttgtaaattcaactacagcctttgatggctgtcttgagcgtcaaaggttcttctgagccgctcgacgattctggtttcgcctgtggcaaacatacttctgacaacgtgccgcaatgatgcttccgtaattgcttgggcactctcaaagaaaccccaatttcgagcgtttttcacggtggcattttttagcgcggggccccccaggaaacgctggactgtttcgtgacccttgcgcctttctgtgcctctttctgtattttccgggtcggcggcaaggaaattccgtggatttgtgggtgtgtcttcacagcctcacacgctttcgtgtctggacggacgcttcttctgtgggaatggaaaaaccaaacaagacacctaaaccaagcggggccgcgtcgcttccctggattctccggttgcgcttggctttctccagtctttggaggaaacaaaggtcacggatggtgtgcaaaagatgttctcgtaggaacgaatgcagacggagtttgttctggaaacaacgtaggcacgtgaggagcaaaaccctttatccgttgtctaatcggaaaacaggcagaacaacaggggaacacaacggcagagggtttagggaaagttagaacaacgaaagttgaggttgtcctgagttcaagaggttcccagaagttatacataaaaactctgcgcagctaagactctcttttctgttcgttttaagtgacagaaaagtctgctttttctcgacttaaaaggagaaacgaaatggcgcattggcacagctatggttttcaattttctctccctttcgacagagccgacctccaacctgtctgtggttcctagacggcaactgccttcttgctgtgcgttgtccgagctgcatctccgaagtcaggaacctgtgaacgtcactgcctttcagctttgacgaagaacgtttttctctctttaagaatcgcaaccaactgttgtctccccgagagctcccgacacgttgctgtcgcctctctcgatttcgtgtttgtttcttcgcactgcatgacatattcgctctcttgtctttctgtccgctgatccacttccgcgcgtttcccccactgactgtctcttttccgcctcccctcatttcctcacttccttcaacactttctgttctgaattctttcctggcctcacgttccttccttctctcatctctccgccctgcgagcgagtctcctgtcgcacgtcggagaaactcaaagattcggtcaatctcgccgctagggcgctgcgtcgcaccctccgtcggtcagtgccctgcccctgtctcctcgtttttctctgcgaattttgaaggaca

SEQ ID NO: 2857 - DNA, 4464 bp, Toxoplasma gondii
  source 1..4464: mol_type = genomic DNA
ggagataagagaggaacgtgacgcaacaggatgtagagagacgagacgacgccggtcgagcgctcgcgggtgtttcagaagatacgcactcgaagaaggaatccggaaaaaagggggaacgtagaagtccagtggcacacacaaaaaaggcgacggagacctccctggcacaacaggtcgaaggaagatcgccaaaactgagagattttctccaaaaagatgattttaaaacgaaagacaaccttgcagattctcgacacaaaactcactgggaacagacagtccgcaaaaatctcgactttttgattgctcggcgagtcgaggctccaaagaacgaagcaggcgaacccgagcgggcgtcgctctccagaaaaagctcgaaattccctgcagtgaaactacatgcgccacccgctcttcatttgtagactcgaaagctgacagtcccgcagacagaattacgaaagacgtcccaatattccacaaatcaaacagtacacctgtctgtgccatgcataaaacaaatgcaaacgcatccctatgcatataggcatatatatacatgcagtgtcagggattcggactgcagatctgcagcaggaggatgagtccggaattccgtgaacaagccctcaggcggtcacgcacctcggttgagccaagggggttctccctctcagtggaggaagctccggccagcaggtgaaaatgcagaattccgacacaaaactatcaatccggagtagagttgtctctggagggcgccagatcgatcgatcggtgtaaagtttcacagcagctacatgcgagttcgccttgtagggcaaagatgtgctcggagacacagggagcctgcgtcggttgaacggcaacgctagatacagctaataccgcttccaggtacggctgcggatgcatctctccggcagacaacgctaaggtggggtgcctagacagccaagcaatcgcgtcggcaatctagtttttggacaacggaacagagcaggaggcagggcgtctcgttcggcgaagaaagaacgggtcagaagcgaaaaaaagaacgaaaaaggcgagacaagaaagcgacgggtgttcccggcgaaaagccaagtgtcgggtgacggcgaagcagcgggggtgtagtgacaccggaaacagccggcaaacagccacgttcgagaaaacgaaccgaatctgtttgccgttttctcgagaccctggtgattttttcttcgagttcagaggccacacgcatgcgcgagagcctcggcgggagagcagtggatctggaagactgcagaagctctagaaaaaagaaaaggaaatcgctgtcgcactctgcgggtcggcaaaaagaaccgccggctgcgacgcttgccaagcagccacagatcaccagccggagaaaagaaaatttccaagtcccggagacagacaggcgtgagctcaacttaaaaccactcaagaaggcgtggacatttctcttgaaagcttttccccggctttcaaaagaacatttttggtgtccgctgtgttccagcagagcgcgagactgcgatctaacgaggacgaggcgcccctcgtgccgggtcgtcgacgacggggaacgaaaatgccacctttcccgagagaggagacacgaaaggaaagcaaaaggaacgccagagagagagggcagtaaaaatctatccgttttggggaagtggaaagcccgcgaagaacagagtgagagaaactgctgcggatcgggagcgcgagggcggagagtctttggaacgacggaggcgaggggtttttcgcgcctggcgggtgtgtatcgggggaggcgggggacttcccaggaacttgcatcgaaaagcgaaagatcgccgctttcggaaggaagttttccgcagccgagacccgcgaaaattcgctgaaatccggaagtccagagaccgcagagaaccacacctgcaccgaccccagttgcagcgcgtaaagggggctgctgacgcagatgtacgcggaggtcggggaaacacaggagctcggaaaaccaacgaagaatatctttgagaactctcgtttgaacgcgggtttctctccgatcactgcaggagacaaaacgcggaaaaaacggcgccgttcagtccccgtgggggaagcagatccacggttttgacttggggggagtcgagtcgtccaggtgtacagacacaatccagacgacaccacctgagcgaggccgccttcttggaagactcggagaaacgaacaaagctggggttccagaatttagcgagcagggcactggacaaagcaaaaggcagaagaaaaaaagggcctcgtgttcacgcgagaaaaaaaaagcatctgcgagttcggtgcgggcggtgcggctaacaggccgagggctgcgaacaatggagagaaccggcagagaatgccgagagctttgacagcagcttgggagcctgtagagatttcttctgctttgaatgcgtctgctaaaatagcgctgatcataaatgcggagactcgtgcagaaaccgctttcaagagttgtgcgtcgaaaccgcgtctggcgctctcaaggctattcagcgtacatacacaccccggaggcgggtgtcgtcaggacatcctacgtatggcagacgaagacgacccgcggtgaagtagggaagaaagtggattttcacgcgagcctttctccgaggaagactttttgccggtagagacgagagaagtgagagcaacgcaacagagaatctccacgaagcccgaggcgtagtctagtgtcaagatgatgcatgtccagcaccttcagagcacgttaatactccctttctcattttccttccatttctctctcggttcttttgcgccaggctcttttctacacccgccttgagggcagacctagcgccgccgagtgtcttcttccagtgtgtgtccaccctgggtctcctgatgcaaccgcgagttactctcgcctgttgagttgcttcatcccggaagatgaaatagccaaagtgaagaggaataaggacgagaaaatccagatggggcgcactcaactgtaaacgcaaatgcctgcaggtgcccgccccttgaggctccttgaggcgagcgcgtcggtggtgaggtgacagcgacgcctgagacacaacgaggtcaggaggagcccggactgcggaagcgtggaggtttgacgacgagaaaagatcgagtacagcggcaatcagcgaagagaaagggaaggtgcaaagaacgagactaggaagaacttggtgcgttgctctatcgaaaagtcttcgaaagggcaatccccgtcgaccatgcgtcgagagtgttttttgcgggagggactcaatccggtgcagacccgcgaacgacgccagcgtgcggtccgcggccagtctgaaaggcgggtccaggtgtacatacacctcagcagaggtgcgagaatctcagaatattcgctgttgaggggaagcgagtggaaaagaaaatcgactcatgtctgttgaaagcctttttcatccggcggctctcctgtgtgagcccgcggtcgatgcgcgcgtgggtggctgaaggtagtaagaacgcgcttttctcgacttgttgaacccaggaatttcttctggcttttctctacgctttctttcgcctttgtttcctttccgttcggctctgctttcgaaggttaacgccgcaactttgtgccgttttccccactctccgatggcctccatcgagactcctcaagcaatcacgaaaaacaggccgtataggcgtctcgatagatgatgccagccgcaaagcgcacggcgacatcgatatttaaagggtgtataagttttcttgccttccttctttcattctccgtttgatctctatttccccctttcccccgtctgtttctctcgcctcattatcatctccatttccttgggtttctcctttccttaccatcttttgctctcccctcctcccgcttctcttctctcgtcctcgtctccctttccttctttcaccccttcttttcttcgtcctctctttcctctctcccttttctctttcttttcttccttctctctttcctttattccagtcctctgcctcctctccattgcttcgggcgtcagcttcctctgcgtccctgttttcttctcacctttctggctcatcgacttcttgtctctgaggggagatgtgagttctcactcctgatcgagtcggttttgctgtccttgctctcctctcttatctagctctttcacttttcatctttcctcccgtcgttgttctcctttcttcctctttcgtctcctttttctctctccatccgctcccttctcgtcctcatctggcttaccgtctgcccccccccttcccggcttctccgcccttctcttctttctcgtctttccggctgtctccttttttcatgtcttcatgtctcgctttttttgccga

SEQ ID NO: 2858 - DNA, 4579 bp, Toxoplasma gondii
  source 1..4579: mol_type = genomic DNA
tatcgggaaaagagagaagtctcttttctacggttttgaccactgaaggccacaccgtctcacagcgaggctctgcatgttaatcgacgaatgcatgcatgtgtgtatgtacacctgcacgtgcatgtatgtgcatgcaatacatgcatttctgtatctacgtgcgtggatgtatgcacgcacatgcaatctatttagataggaagacacattcgcatgtgcatgcatattcttttgtacacggtcgggatgtttggagaggggggacgtggtaaggttactggggggtcacgctcattggggacgtctacttcttcgggaaatctgcactcactagggacgtgctggcgggcatcgtctcttgctatctgcctaggaaagaggccaaggcgtcttctttgttgtctaggaagaacaagtgcgtgttactctgtacttttgtcatcttgtgaaattgaagtactcccagacgcacgatgtgaacagatacagtggcacacactctcctaggcacaggtgtcagacaacaagtggaggcgtgacttgaacgcgaaaacagagaaatattgggcagttgagttcccaaggagctaatgcgtgagaactgtcttcagcactgtatttcatcacaatcttgcgccagcgaagaaacgtgtgttgccctaggacgcccacggcagagagacaggcagcctcttagtagtagatacacgggcatacttgtcagccatgacaagcatatttcttattcgtccaggtactaaggtctttaattggatgggcacctatgtcgctagtcataatactatgcgagcagaagatctgtggccgctcctccactctagtgaaatatcgttagacaggcagaaccttgtaactggaaaacaacagcgcctatcctgcaaaaaataagtctttcaaactacacgaaaaggctggggaaaaagcggatgcaggcaggcgccagctcaaattacacttccgcacggacgaagcagctcggttacgaaagggaacggttccgaagcttgctcgatgctgactcggaggaagctaatcacggcacacagatagtcgaacacgttcgcgggaccagcacgcgaaaagtaaaagaacaaaccaagaaaataaagcaacttcggatgtttaacggacagggcgatttctcgatccagccactgttcaaacataagtctaggcctcgcctgtctgctggcaaaatcactgccacactaccttcagcagtcaaccagacgcgcaacacaatgatacttgcacagtttaaccctgccctatttactcagtggttgtaaacgaaggactccttaacttgaactgagaactcaagtgggtacaaaccgtcacatttttactttttgcaaggtttaactcccctcgaacccatcaggttccacgtggagtttccaatggagtttctcagagccttctcagcctgaaaacttttgcaacaactgggtcgcatgtgttgcgtctggcacattcgtggcgttgtcacaaatgcatggcgtctcttcgacgtagtggtgcaaatgacaagcagaaaaaggatgttgttgatgacgtctcctgccacgtagtttgggacaatcggggggcgcacatgttcacgtgctaataaagaagcgggacagagatttccttggtcacatttttagtaaccctcatgtttgcgccgcatattcggagcggttgagtttgaatatattcaattcagctattgctttttccggcgtccaacgccgactggggtctttcgctaggagcagccgaataagctgctggatgcctgcaggaattccattgcagttgtggaagtttagcgtctccggcgtattctgatcgaggatagcaacgatttttctgtaatcgccttcttcgatggctataccccatgggaggcgaccgcaccagagaaagtagatcgtgaaggcgagcatccaagaatcgtgggtcagctcaacccgaacttgagaaaattgcgtagccattcgaatgttctctggactgaaaaaagcccaagtgataattggaaaagtagacatttgacctcgcacatacgcgtacgagaagtcgccaaggagcacgatgccactgttggacacaaggaagttcgacggcttgaggtcgccgtgaaccagaccttttcggtggagtcccgctaccactttgaccatttggactgtagcggaaactctcgctgcgaaactcttctgcgtggtgtcaagaagcggaacgacatcttctaaagttcctgccgcgatcgggaacgccagaaaaaaattgtatatcaccgttgactgttccgggaaaaaccaatcatttttgccagggagccgcagcacgtcgctggggactagtagccggtcgttatatagaatatcgtcgagatcttgattgcctagaagctcggaaattcccgcttctcggcgcataattttcatggctgaggcgccagctgacaggactgatgccaaattagtcatttgagcgtaactactcaaaattttgactgcgactttggtgccgtcctcctgagtcatagagtagacattgctagtacctccacagccgaggagctctccccttgtaaggttgactctcgatcccggattgaacagagattcaaacacaagatttctgtcgggaggcatcacttgggtggagattagcaagtcgctcacttgttgcgcagtttccgtgcatgcctctctttccgtcagacgaagcatgccacagtaatcggcaagcgcagcctgaccagtctcaagacccatacgaaagttgactgcgggaattggcccatgctcagtgtgtcggaaccgacggcgaacggacgggcagatgaacggcctgcaaagtcgccaagccaagcgggcgaaatgcgtttgaacggctctgaatctgttccacactggtcttcgctgctgtgttcgatcaacagcatacgtcccgcttcttcctgtagatgtcgcactggaaggtgtctccagaggggaggcactgatttcagatatccagtcgcttcgtctactcggtgaccgtcccgcagactgccttctcccgtccgggcttgcctgggagaagccgcgttttgcccgtgagtctgagaaacctgtctcgagtgcagattcttcaggctgagtgtcagcagggagcctgcccactttcttttgtctggacgtaatctgtagcttgataccgaaaacaccagtcgcaaacaaaaacagggacaaacacagtgccacctgggctcgcatagtgccagaaatactgtagaactcttacagggacgctcagcagctcatcttgacacaaatcctgtatgctggagaatgtttttcaacgaccggatgatacggtaccacaaccgtgaacaaatcgcaacaactgatattgactttgctgcgcttggcatccgggttctgcccgcgccgtaccgactgaagagagtgccaatgatgactatccacggttatgacgcacattacggacccaaaccctctgtctgtcttccattcttctttcacggcctttattagctaggcagcagatgccttgcggtcaaactcagttatgcagacacaaggcgaaagccctgccccgagccccatgaagctacacactctgcacctcaaacaagcgacacaaacagagcctccattccccagcctcccatgacacgtgggttttatctgaagacaacctgagatatggaactgggaagcgaagagtaagctctgtctctctcactagaacgaaacaaaacaatacttgagacggctagccgccgtgcggccgttctccgccgggtgctgtgctgtaatggctggaggggaaaagtcgcatgttttcttgtgctcagacttgcttgtagactgacgttttgtgcagactctctctcgctctcagcatgtctgtattgtcggcttttttagtctctttcccctttcaagtcgttcgtattttccactgtatagggcttcgaaaccgcgacatacaccgcgtagcgtaggtcaagcaaacgttcttcacttcaaccactccgttcacgaaaatcaaaaaggctttgactgattgtttttatgagatgtgattagttcatttagccacatggtgcataacgtagcttagcaaagcgaccgtttgtctgtagcgaatattttcgacaagtaggacgacgttgcagacatgcttcgacgggggaggtgacctcagaagcaagcgtcttgcccgcaagcacactcaggggaccagtagggtgcccgatgagttgggagacgccacagaaaaaagctcgacaacgacgtgatgtgcccagctcgtagagcggtagactcaccggtcatccgctgacagctagcgctgcaaagccatctctagcagctttcggaaataaacaaagcgttgcatcttgcatacacggttttcgttttgccgtcgcttcagagacagcgaaattctatctatcaaacgcgtgtacgccttcacggtcagagactgtggaagttgtggagagaggtggccaatctcgatgcaagagaattatcgcgtaatacca

SEQ ID NO: 2859 - DNA, 1199 bp, Toxoplasma gondii
  source 1..1199: mol_type = genomic DNA
gagaaagcagaaggagaagaaaatgtggaaacacagacttggccctcattttccgtaagcagcgtgcgtcctccccttcgttctcctcctccacacggacgaggttgatgttcactccccatgttcaggccttcgctttttctattgttttttctgtgaaagacattgctttctctttcatggggatccgagaccaccgcaacaaaggaggccttttctctcctgcctcttagctgcctccgcccaacagcgtctcggaatcatcgtttctgtcgcgacgctccgcacagctgaggcgccgacggagcgcagaacagacggctacaacgcttgaggagatccgcagtcgactgggacctccaaagaagaagaggcgaatgcagcgcggagcaaaaggacgacacagagcagacagatggagaaaagaagagcacagcacggcaaggaggaagacgaggaccggaggatgaggtagagaaggatgcaaaaggaaaggggagaatagtagacaggggacaaaggaaagaagaggcgaaggacgaagacaaagagagcaggaggaagaggtgaaagggaggaaagcaaagaaggaagaaggaggcgacggagaatgttaagacgtggaggacgaaggaggaaggggaacaaaacgaggaggaggcggaggagaggcgagaaaagagacggaggaagaagagaaacgaggcaagtaggggaagaaaccaggaagaaacgcgcaaggaaacagtttcacttgcactggaaagcaggaggccgcttgtctttgtacggaaagagtgaaaacgcgacggtcgtcgagccaggaaatcgacgcaagcttagaaattcgagggaacgtccgacggacgccacttgacaagttgaagggaaaaggaaactcaaaaacattgaaaagagtcgaaattcttcgcaagtctctcgaggaaaaacgacgccagtggaatctcgcaatctgcagtctctctatttttagcgctcacgcagttctttcctcccattttctctgcactacactcccttttccacttccgtctctccgctcatcgacaccgagaggaagagaggacgccaaatcaagaatacggcgtggatctctctctccacacataagcaatgacgtatatgagtgcacagctatatacaggtatttttataaacgtagatagatgcgtaattaa

SEQ ID NO: 2860 - DNA, 3618 bp, Toxoplasma gondii
  source 1..3618: mol_type = genomic DNA
caagggtgtgtagcctccagacgagtacttgtagctgtgcaaattttttagccccagagggggaatgtagtgtccaaacaccatctcggcggttcggtgaaggactgaacacgaaggacaggcgcgcggaggcagcggaaacgaaacagaggacgatctggggggacgcagcaacggtcacatccacccctcgtttctccccgcggcgcctctacaggcagtagggcgtcttcttcgatgaagagtcaacaacagggccgcttcttctcagcaccgaaggcagtgcacgcagaggcttgaaatctagacaggtgaacgtttgccggagtggaggggaggacagggactggacttgtcgctattcacgaaaccccgcgaaggagtgcgctgttcgtcgactggcacaagcgacaccggttcgacttcccgtttgtcggtacagcagagttcactcaacggcgaacgcctgctcagcaacaagggggaggaaattgtccaggaaggccccgcccctttgacgccgtgctccacggtttcttaacacaaggcagatgggactacacgacgacccaacgcagagcgataggagaaatcatacatgtggccaggtcacgaagaaagagatgaggcaggctcacagtccgactgggggtctgcgagctatcgagcctcttcaacttagcagagagaagtcaaaggaattcacagagtctcctacagtagcatgcttgcatcgggcaggaaacaattgacactggaaaagatcgaacaggacacccccgtcagagaaaaactgtcagaaccacccggagaatgtcgaacccatgccgcacacaaaaagtgacctagaatttcgcagaagggaagaaccaccgcgacaaacagagggccgcatatttatgatggacgaataccgagacgataaaaacaaaagaaacacgcggtctccccgagaccacggaaatggggaaagagaagggcggcaattcacgggacgagttcggcgaccgcacatgcactcgaagcgtgagtttctgaaagaaagaaaagcgcagcgcttctcaccctgaaacaaattctacttcggaaaatggtgtggaagaaagccgggatgccaggaagcttgtggcacacacgaccctatgcagcgcgtgaagcaaaaaagtcttgtcctgctgcagaaagtacagagagcgacgcagaaaaaaacacatgcacgcaatcagtgtacgcacggaacagctggtgacgatgaatgggggggcgggggtagcagagcggccccagcgcaagaaaaaaaacgattttttgtcgcttcgagaaatgaagcttgcaatactgaagctcaagctaaaggatgtcctgaagtcacagcggtactgtttccctccctccagcactgctgtccctttacggctgttcacagccactcttgtctctgaaaacgcagtcccaatagacttgattttgttatcttctcaatctttgtatccgcgtaggcgactaaatggcagaaacaaagctagatcccataagaagagtaattcactgcaactccaccgagaacagtttttggccttctctcgcgtccactgctttgttttatatgagcagtcggcctctaccatctctttctggattgtcttgccaaaaccacacaaatagccactatttaaaactgtcccgcatcgcccactcttcgcagcacacacctcctgactctacttaatagtggaacttgtataaaggagtgccaccagtaaacagacatcacttctgaatcggaagaaggccctgttgaaaaacgccgtgcctcgacccgacgcactgcattgtatgaagcgtgaacgtgtgacatagcgccatagagagaattatggccctcgaaggcgggacgggactcgagagcacgctgctggtagcggggttgttcgctgcagaaccccctgaccctgattattcttttgttcctagatctatcgttggttacgggagtaatttcaagcaggtgtggcatactcacagactcctttaccaaccaggaagtccaccacttctatggagctccatgcgtatccctgagcctccaaatcagagcaggccatccaccagtctgcggctgtgttccagaacactgcgggtgcaccgctctcttcgtacatcgtctggaccttacacagaatgcgtggttccttggggagtccagcatgcagacaacgaatgagatgtatgagaccgttatagcctctaagtatctgctgcaggaacagccacggtttcggcggtagcaatttatttttctcatgaccaacctgcctttcagaaccgcccagcagtcacgttactcactcggttattcgctgtcacaaatagcacaatctcaaccgtcaataccccctgttgttcagcttcctctcacctacgcacaccgaagttatgtatgtatcatagatttcagtctccccctaccgataaagtcttcagctgcagcgacgaagtgtaaaacttgctgctgttgtaacactgaattcaaacattataccagtgtgcttaccccggagataatggccccatactccgtctcgcgacgaacgctgtcaaacggggttgtgatactcgcttacacaggctagtcggtttcttaattgtaattacctgtccataagtactaatttcgtcgaacgtttgaaggggagcagcgaatgtacacaaaccagccgccccccttacaacagagcttctttcttacaaaaagagcttgtgagcaatacccctaaatggtgaccgcaaacgctcaacagctcctgccgtaacaggattcccgcttggcatacggtaccgaatgcgaatcagcgaatccatcaacagaatttaccttctgatttgccctgtttcgggactgctggtatctactttacactgttgccaacagcaggtgctttcttttattatccctgccacagtacacggcgtgctaaggtttagaacatgatttccgctgcatcaatgagtccactatcatacttacagcacgaaataacttaatgccaagtgcacactacagctgttcctacagagtcttatcgcacgtcgaggaaacatgccaggcttctgatttgaacggagagaatacgagacccgcgcgtgagtcgcagtgccccagttgacggttgtctcttttctctgtctgaggtgatgaacacgtcttgaattggcttgtcagctccattttattccaaattctgtcgattctcgcatgcagcgctggcattttccggctctttgggtgcgtctcatttgtcgaagccgacggttcaaacccgtctttcagggcgttgaggagctataggttcaggtgtaaatgccatgtgtatagtaaatgtcgtgatccacgtcccagttccatgagtcagcttgatttaattgacttgcgagtgtttttttgtgggtgcgtgcaatttctggcccagggcggatcgcgggatgaaaacaaacgcggcactcctattgctttgccggcagcaactcttaagggcgtctcttctgaagtttttgtgttgagatcccgcaggtggatcgtattttaggaaatagaataacggtcgcttggtccagcga

SEQ ID NO: 2861 - DNA, 1889 bp, Toxoplasma gondii
  source 1..1889: mol_type = genomic DNA
tttcgatagccgttcagaggtttctttttgtggcgcatttggtaagcattaactgtggttgtgggggcggcgtattctgaacacagttcgtcacgaagagctcccgtttgcggggcttaaagcggctgtcatcgtcagatccagtttcgcattgaagaaacaaaaaagccttccaacaaagcgcttcctgattctgcattgtctaaagcgccgaaccatcgcattggcctctgactgcatggttcatttcccgagtcagttttcgacacggctaggagagaacggtgaagtcaacttcttgaggcatccagttggggctagtctgtttacatggataacactcgactctccgacacttcactcgctactgctgggagtttatggactgatgctcatctgctttcggcatcgctgtaattatttcgaataaacgaacagcatggattctcgcaagtcaaggttttctggtttctgtgggtttatcccgcacgcctgggtgcgtcttgacaggcttgtggcattcaatcaactccttcacgaaatttgaactgctaactcttttctcgtgccgcgtctgtttcgccggttcgaatgcaatgctgcgtgaggacactcgtactaaaatggatgtttccgttggtgtggcgaccggtgttttggcgtacacgctgtgtaactcgtacaatgtttgcagttgccctcggtggttccgatgccagaacattcagcttagagcttcaactaggcctcagaggtgggaaaagggatcagatccgcttcgggccttattagccgtcgtgtagcacagtcatgtgtctgtgtcaagaatgaagcatctttggaatctgctcagtgaagcacctgtaaatcaaacaagaaacagcaacgggtgtttccccatgctttttgcgttgcaactagcaggcactatccctgccgcagcctttgttggcatcattgttatccttgtttcctgcattcatttttttttcggtctgcatcctactaaggcgcttggtggtatttcgacagactgttctgccgtctaggcaacgtaccacgcagcaagtgcgcgatttttgacgttccagagaagctctttcactctggtcctctatcctgtgaagccttgtgtaaaagagaggttttgctgtacatttgtcgccacagaaaagctgacaaagaatgcttgctgcgcaggaatcgtgaaccacaaaatagggtctagagtcgccgagtactccgccgagacgaaggagaagcgctttctaaggcatctctgctttcatcagccgacaaagatcgtcggcaggattcgtctgaaagcacctcctcacgctttcaaggcactcggtgcgcataactccgaaaacagtgacttcgaggacgagcgcactcggctgccaggggcgtctttgcgcaatttctgtagatgaggggacgcgggtcttttctcgcggttatttttctcaagtgaaccaacaagctagcgttccgcacggaaaatgtgagttgcctcaaaaggaggatcaatatcgggtgccagattcttttctcaaagaggctgtcacatcttgcatgtgctgggccgcgtttggctgctgccccgtcgtgacccttttccctgctgcttttccaacgcgctggctgcttaacgtcctcctttccttgttcgttgcgcaacagggtttttcgatttctgcctcagtcctattaaaaaccgcgctgcgcgagttaccgacgtgtctgccgccgtcgtttcgccctccacaaccccccgctccttgtctacgttgcgcagccgctttttcctggcttctcccgcgaaaacctgtctttttcgccttttccagcagctggacggaaagtgaaagggagtccagccacga

SEQ ID NO: 2862 - DNA, 2037 bp, Toxoplasma gondii
  source 1..2037: mol_type = genomic DNA
gaaatgttggcaatccttctacgcgtgttagttcgctcccggaatacggagggactacggacagcgctcatgaaaccccacaattttgtactgcatcaacggaaacatatctgtacgtcattgtacagtcaacgaggaggagcttgtatcaatcatcgcatgttccagcaggaatgcgacattaggggtaccgcgcctctgtccgacagatttgtaacaacgtacgttttccagatgaagtcgaagaggtcttgggcctcagcggttactccgacaccaattgtgtacttccgtttctcgaattcagcgatggcaactttttcgttatgatccacggtgcctctttcaatgacgggaggctttgacagattctgccgagcttctccattttgtctttcggacactacatctgcgacaactcctcggcgaacgacgtgaaagttggccttccctggttccgtgtcttcctctgcacaaacacagtgtaggaaagaaaccatgacattcgtccgtcacctccgcgtggtgcgagctggaggtagacagcagcgtccgtgcattcgcgcgacttacttagagtgaccaggcctgtaggtccattctcataacagtacagttctccccgaaacgtctcccctgtcgttgtccggatagtcacccgataccccagatcggcagagaagtcgaaagaaggaggaagcgtcggagtcgaagacggcattggagtagaaggcgcactcgcctgtagtgccatattaaagagatacgtggaaccccaacatcggccgcacaggcgcagcacctgccgtaagacagcgtatgtctcctttcccccctgatttcgggtggtaagaaaaagtcgaaattaatagtgttggttcgaggtggcgttcatccccgacacaatggcgctggatttcttccacctggggcagttctgccaggcaacgtcacggcagcgcacacagttcctgcgttcgaatccagtttatccctcggttgtcgtcaaacaaaatgcgaaagcaccgtgacctgtggatgtctatagcctccatccaagctgatagtgcctgctcctccgtggaagcctcggacgacgagcacgtgatagcatgcacgtcaaatgcagtaggagttgtgtcgcccgaacacaaagagacggttcataatcggaccagctgagaaagagagcccctgttaacgcagctgaaaactgaaaattcgcaggaaacctccggctgactctgctacagtgtcatgtgaaagtatcgtagctgaaacagcgaagcaatgaatgagggaaatgcgcgaaaaagtggcaactgtttgcaactcccgtaaatacaagttcaatggatatccattttccgtcctcccccacgcttccctgtttcatcgcgaaagggagaaaccagctggattcttgacgaaaacagtaaagtccggaacttgtccgccatcttttcgtatctggccgggaggctggttcctggcttctatactgcctgctgtcgcactacagacggtagtggcctcctctgcctgtttgatttttttacaaaatgacgtctgttgtcttctcgataaagcacacaggataaattgaggcgtttctccgccttgcttcccctgcctctgtttgtgggcgtgttgggttccaacaagacaaacactttttttcgatccagagtcgggatcctgtctcctacatcggtaggaagcctcgttcagagttggtactgtcagacaccctgacagcgcataggagttttcttcaaagagcaatgtgtgtattccttccgttggtgacgatggtgattccattttagccacatgaaatggatactgtcttgctgtggctcttagtatgcgcgtttcagtttcaaagctctggctgacgctttgttcagacactgaccgccggttggcagagctgtcgaagcaaggtgccgaggacgacttgacctgaagtacgcagggcgtatcgattctagctttgacagactgtcctaaatctgtatacgcgtcggctcacaa

SEQ ID NO: 2863 - DNA, 2234 bp, Toxoplasma gondii
  source 1..2234: mol_type = genomic DNA
gtataaatatggcgcaatactgacgtgagagacatggtggaccgaccaccgtgtcttgatggtattggcacaatgtctgcctatgttttctgaaggaagtaacagtgagcaaccgagtggatgacgcaggatacgctattggcgcatcactggaggcgcacgacttgccgtagcagaagaccttcaaatgcaattttgcacctttccctgagtgagcacatgaaccacgtcagaactgataacatagaagcagtgcaatgctctgaatacgttcgtacggagggacaagcagtaccagcggaagcaggggagatgcgcttccttgaaagcctcacagaggaactaccctgccggttacatgcttaagctataccaccgagcaaaagcaaaaatgttcgattcaaacatgcgctggaaccactatatcttatgcactcctgaggatcatgcacaatgcattatgactcaaaaccgggtaaaaggctttcaagttatataagaaatgtaaaagaaagaacaggaagaacttgggtgttcttgtaacagtgtccagaatatgcacgcaactgaaacccttcgtagatacgtggcgcgacactcgtgaactctgcaagggaagatgtgctcggatatcgagaggtcagtcgtgacacgcaagatttcaatggagttggttctacgagacagccggtgaacgtcacaccgactacaaaacgtctggttgtgcacggtccaacaagtgccatgcagtctctagcttccgtgaccacaccctaaaccttgcgaacacattgtatttcaattcaccggtctccgcgacattacgtaacatgggtcgtgatgctgagaagagcaagggtgacacatgagagagaatgcaaaggaacaagtttctacgaagaactaacgaaacggtagcaaagtgtctcgacaccctgggccccggcgaaagcgggcgtctcgccgcaccatgcaccctccacggacaactcgttcttaaaagcatacctacaacaaaacgaagtgtctaatccactctcatgagttcaggaaacgggtatattaagacctacaggtatgtcaggtttgctgtacagcaaattcgtaagactttcatgtcgaggatgagcgtggtcagaacgccgcagccactcaaagacaaaaaacagctaaaatacactttacccgcgcgccgtttcaagctgagatgtctgtttcctgttcacgcagttcgtctggaatttcatgaactcgttcgctgcattcactgtctttctcgggttttcactcgatgttcgaagacgttgcgtcggctgtcccttcgattgtgaggcggcaagacgcgagcgtcttgttatgaatcgtcagccctgcaggtctttcgcgtcggagttaccctggcccggggacgcagttttgtccccgtcttttcaagagaatatctattttcggagccgttctcttcgctgtcagtgacagaggagaactctacgcaccacatgtttcaccaagggagcgttccacttttccgcgagtggatgagatgggcggtcgggtcctccaccattttcgtgtgcggcagactagaaaggacgaacgcggtgctcatcgcacacagtctcagagggcgctgcgttgcggtcctagaactgcattcacaacaatccctgctcgtgtgagtatcatgttttgtggaaggacgttctttcaggatttggttgggctggcgcggcagaggactcagttgcacatggcgaatccgctcccttgcgtactttttctgctgttggcctgtgcagaggggacgacgtccacgcggcgcacacaccgcgcacgagggagatttgtctttctagaaacagtggagatggtttgtaactgaaagctggccgaactgcacagaagtaggggtgtctgcattcggcagggaagcgttttacgctctttgcatatcccctcttctttttctgtcccgtcgttttgtgtggtcacacgggacggggtgcccggtggttcggcgcagtcagtgtgtaccggtgcgggaaattgccttttttttgtaaactgcgaagtcctgagagcaggaggacgcatttgagctattttttatggtgaggtaatttccgatcctggagaaaaccagtactgcactgcgtgattcgcctccccacggttctttgcgtccggtgtcggtaaagagggggaagacgggccaccccgcccagcggcatcca

SEQ ID NO: 2864 - DNA, 1924 bp, Toxoplasma gondii
  source 1..1924: mol_type = genomic DNA
cgttcccttggaaaaggactttagcatttcgtgtagcggtgtcgttggtgctttgttgagactaggggccagctgagaaggtgcggaagccattgcgcggaaccaggtttgtaaagacccttgaagaaatctcacgacgggcctccatgccaatacaatcgcgacaggggcggtgctacggagaacgcgatcttcctgtttcctctctcgccgacccccgacgccaaagccgtccttaatccacacctgagtccttgcgctctgtcgtattctacgatgacgcgggaagttaaaactcgaattcagtaggatcgccctcgattctaagcttgtcagatcctttggcaaagccagaagcaagaatgaggcagggtattttctttcgtatcttcctcgcggtccgcttctgcctaataggcagcctgcccgtgaaatcttcccgattgtcgacggagcccactgaggtccgaggcctacagccgcatgctctgaaaacccgagtttgatacaggaaagaaaatatgcgacattctggagaactaggaaaaaaaagcaaaacctcgcaaaactgccccggagaaaaggaacagatggacgggacgagtacccttgtcggggatatccagttttcgacgaggcccctggtctgctgcaaaaacaaggttgtgaactaccgtgaggcattgcggagtttaacagaagtgtttgcagacggcgacttcgcgtgtgcattctttcactgatgcggcgtcctcattttgaaaaaaagaaacggttcaagcatgcagactaccggcgttcctgtgtttgccatgaactctagcagcaagcttcatcgagcagtcgcgtagtgaagcacacgcactcgtacccacagacggaagcacaaaagacagaaagctcatggacaaagcataatggctggtgggttcacaaagaggcacagataccataccagagttgcatttttacaaaggatcatctggtgcacggggaaccataataacgacttcgctacacgcccggcctaacggtcagtgggaaaaaagggacgagcactgatttggttgtcggacactacgccattttgtataaggaaactgctgaaagccagcgacatttggaagtctcgaagcccgatcgcctcagcgtggctgcatgcagttttctcgaatgtgtcttgatgcaggtaccaccttgctcctgttgcggcacaccctttcccgcttgcatgctagctattgctttgacgaattttcaaacaagccatggacgacgagttcctccgtcgtcattcgcaagttacggcttacgcgaataaccggtgactggtatacactcccgtgtttccccaatgtcgggaccgagttaaattcgttgttggtattctttcggttccgcctggtctcggggaggtgtacgcctgtggccgcggtgaacacagcgaaattttgccgtgtgccagttgcatacacacgtttctgcgcatccgtaacagatacccccaagtcgcaacgacaagaatcatgactggcgcatagcctgtcggtttcgtctgtagagtatggaacgcgcttacccatcatgtttcgcatgctaagcacttgaagaagttttctcattacagtgtctctctgcaaaagtgtttcgatggaagggggaaactggaggacgcgtgcagcgtattcgctagccacaaagacgccaatgtggatatatttcaatactaacagggatggtaaagataggtagtttgttgcagggaaagctcaagagcaacatcaccttccgcgattcgccacactcgcgttgcgggcaactctcgacttaccgtttctggcaagaacttcagctacagctgggaacggcgaatgtgcggtttcactaggctgcaagtttgtttaatgtttcaggttatacacga

SEQ ID NO: 2865 - DNA, 2432 bp, Toxoplasma gondii
  source 1..2432: mol_type = genomic DNA
cttgtcaccactggagttgctcttgagttaaatccgcgccggaattcagtcttattacgcaattcaggaaggcaaacaaacaaaaccgcgtagaatgcgtttcctggaaaacggataagactcttaatggcgtggcgcgtgttagtatttacgtctagtatgtatggctaggactcgaccttactccagcacagctgcccataactctgcgactaggttctgcgacgccaacaccacttttattcactaagttgcccacatatcctgcgagttatctcccgaaggttgctttgtctgacacttgaaaatcttaagagtgtacgtttgtataaattgtatgcaggttgtagaaacgcacggaatgccaacaacacagtctttcgcagtgccacgcgccactttacttcttccacaagccgtcagagggatcgcggaatgtcggaatgccactttcggcagagacccccgcgccggtgagagccacgacatatctgaagagaaaaaacagtggagagaaaagatcgcaaatgtctctgcagcttgtcttcgttgtttaggccaaccatccctagcatgatccgtgaaattaacaaacccccagcgaaactctctgcatgaaacactggcctactgccgcggcaagtgacttcccctaggtcgtaggaggacgcagcgacacagacgaaagtcgtgttctctgtagaggagagaggctcaacccattatttggggaggaaaagacggtttgcctataaattcacttgagagagcaacgacaaaagtccatgtggacctactttgccttccgaacgtcatcggcgaggtcttcaaaagagatgaacgtcgtgtttttcttctggaaatatgttgcagcttgccccatgtcgtctctctggtggtagtcacttcccgcaggttctgttccggacatgagggaatcagctacttcactcccataaactgagtgcatccagacgattcgaacgtctgaatggaagtgagagaaggtggccgttctctgttttctcaagtgacagctcgctttttgaatcggctgcacgcgtagagttgtagacgctctcgtaggtacagcgacgagaaactgttcatgaggctcaaagaggcacgcaagggtgagcagaaaacaacacgaaataaccaaaaggttcattcgttgttggttttttcacgagagctactagaggaagaggggccgctctgcgactgcagattagcgtctttcagggacgcggaagaccctgcagacgtcgaaacaggcggtttccgaagtcgtaacgattctggcgatatcgcgtgtggagacacccctcccttaagcgctgtcgtagactgcccagaaagagtgtcagggtagagcttctgcctcttaactggggccgatttcacggacggcaatttcacggacgctgttttgttcgctgcaagatctttcaagaagtaaaacagccaagcggcaaatgcaagagcgtggcaaataacgatcaatgtgatgaacacatagaggaaaaacggcatagacacaaaattcgtgctggccccaccttcaggtcgcttttctcgcggtgaagaccccgctttgtcaccctgaagcacgccaccaacagtctcaacagcgttcatcttactacaaactagtgaaaaactgatttgcctgctcacagttcccccttccgctttgcacagaaaacggccagatgaccgaccaaaagaacctcgagtctacaactgtctaggcaaagcgcatgctgcgattgcaaggaccgagggaagaagcctgtacatccccccaaattcgtggagaaattacggcagacacgaatataaaaaacacaggaaatgttacagttactgtcgaaaaaacataccttcctgacggtcacacgccgctccgtgtgcagcaagcgtccagcgtgcgcgcctgctgttcacgacgtttgcagaggcacttcagagggttgagggtaagaggtaggaccttcctttctaagtaacctattactttatgtgtgaaatgaccttctttcaggacaaatggtttcaggcttacacacacaagtgacgggcagtttagtgggcgatcggcactgagtggtcctccacgttgcagggaagattctgggcattctccccagcacttcaacacaaatcaaccagaactgctacgttcacaaggaaactgcggcctcaggtcacatttccaagcgaaatgacccaatgaccaacggatcctgtatcatagatgacacttgttggcttcgcactgtacgcacacacaatcagcacgctgtttcctcatgacagtgcctttaactgcagtagccttcagcctacgtccatcggtacaacaaactcttcgtctggaataaaatctttttctcagacggtgtaggcaaattcgcctcaggagagca

SEQ ID NO: 2866 - DNA, 1952 bp, Toxoplasma gondii
  source 1..1952: mol_type = genomic DNA
agctctcgtcgtatattaactctggagatattcgcttgtgctttttagaaatacccgttcgacattcctcacaagaaaagagaaagctgaactgattgagggaaaaggcgaaaaatgtgccagtgtccattcttcacttctatctgtttccttttctgaaaccatcaagaccgcatacatgtgattgctgagcttgctaatatcaatctgacacgagagatatttcagaaggaatgcattgacgcagacacattttttggacaaacgaatctgtgatgaatttcctttcgatttcccagtacaagcgtacatgaaaacgatagaatcgcgatgagctggtagtgtcgccttcgtgtctgaagggttccagaaatccaacacaaccaataattacccgggattttctagacagtccggtagcacgggtctgttatatgctatatcgatctacacttgcatgcctccatggatttctcttttcagggtagcgcgaacgggaaaattgttgcagtgtctgctgatgtcaccctgaatcccggcaaagtcaacttcaccagcggttgagacagggagtgccagatcccacccgtgcatgctcaccaacattattgccaagaaagttatgccgccaaatattccatggtttccataaacaggaaaaaggccaaataacacgcttagttactgcaaagtgtcacgcgatggggagagagccttacgccgcatgaaactcagcccaagacagttgcggtacccgagcaagaactggaagcggaaccgtagaaggtgccgcttccgtgtttgtggctgaacgtgcacacagaaaaggagctgtaaccgccgttcgcggcatgacatatgactagagggaaaaccgggcgtgtttcttgctagaatacaggtagtagtcgcggccagatgctgggcgctgcctttgacggctgctctctcgccgccgccgtgtcatccttccccaacagcaatttgtggaagcactacactgccggccctacgtgcaaacccacaagcttaatgggaaacggcgttcggtcatcattcacttctgttgctggtgacccaaatgtaaccatttcaggctgcgggttatatagcatcacatttatgcccacctccccagaaatgccgttgcatgctccgggtgcatgcgaatcgtcttccatgataaacttcaaatgcgccagccccggtcccttgctatcaaccgtttgtctcgccttctagcacttgtggggctcagctgtaaaaacgtactccaagagagatgctcagctaaagggccgttttttcaggaaattctctcttttatctgttatgctcatttccgtaatctgtgctctcgaaagagcaactggagacggagtttgatacggtctcaccccgtgatgccaagtgccgctatgttcgcttcttcacagcgcggtgccgtttcattacgaattcagttctcacaacgacgtacagccgaaattttgtgcgtgttgtgccggttctcctttgtgaggctcagttcgttactgttgcagtgccccctcgggacgataccgttgcttgctgttttggcggatttcgtgtagctgatgcagagctgcaaccgcgtttttcgatttgcgatctgtatttgcgctgcagtagaaaacgtacttcggcgcttcgtttttttcatgtgaacgaggggtctctgggtgttttctgcctactgtatcgcagggcgtaccccgcagttggtgtgttcggtcgttgctagtcattattcagaaaaggaatttgcgtcgcctgtgtgtgtcaacttttccaatccattatcagaatttgggagttgttcatttagtcagttggtggacttgcagctgttcttccgcggtccttttcagacgaatgctgtccacctgcctggtgtaaacgtcggtggaatctgctgacgtttcgttata

SEQ ID NO: 2867 - DNA, 3193 bp, Toxoplasma gondii
  source 1..3193: mol_type = genomic DNA
ctttctgtgtatttagagaactttgcccggacgcttgggtcccgagagcagctagccatcgcagcgtttgcagaggctctgctgatcattccaaagaccctcgcggtgaacgccgctctcgatgccacagagctcgtcgccaggctccgcgccgtgcatgcaaaggctcaggggcagttgcttgacgcggctgggaacggggacgaggaactcaagtggcatggcttagatctaacttcagggaaaacgaggaacaacatggctgctggagttatcgaggctgctgtgagcaagacgaaggcactgcgctttgctacagaagcagccgttaccattctacggatcgatgacttaataaaaatcgcccccgaacccgaacggggccaacaggatgactagagtaaactctacaaaatgatggtagaaaagcgaacaaaaggactagagaaccgcacgcgggacttggggagataactgacatgtgtgcgcttcccgacacgttctcgcgaactttttgtattgcgaggaaaaagtccgtcggttctgttgactgtttccaccaggaagcagcgggagatcgtgtccactggcacctttgttttcgacgcacgcgcgtggactcgtgcttcgctctcgactgccgagtcactcggtttttcttcccggtttgttttccagcttcgctgcttccgcttctctctgaacgacacaacggtgtagggtagttcacaccgaagaagtgccgctgcctcgattcctagctccgtaccatttcaaggacgcaaactgatcgttatcatgtgagtcgcctgtctactctttgcgcattcttggctgtactctattttcttacatggttcgtgaaaaactgttctccgaactcaactgttcgctgcgaaaaagaacatcgaaacaaaactccaaacttcgaaaacgtatagatacttctctatatatctatctatctatctatatatatatatatatatatagatatagatatagatatataaatatatgcatatagcgctacactttctgcttgagacatttgtggaagcgatgcggggccatcaacgtatcgtgtcgttggaatcgggtgcatgaggaagcatggtcgagcctcgccacataatgctcaatttgggcattagagtgatacgtgtaatcatcggaagtgcaaagaagccgctgcaactaagaaccggggtttcgtcgttactgtacacctttttcgggggggcgtatcgtcgagtcggacggctggttgagatctttaaggcctttgcttaccacatccaagttctactgttagcatcgtgtcgagaacagttaccatagatttaatatacgtctattttgagtacatgcagtattgactcggtacacttcaaatctaaatttatactgtcaccctgtagtatcgtgcggctgctttgccctgcattcgttctgaaagtttcgcttttgggagtggcgccccttgacgacattttgcgctttatatgacgggaatactaatgcatcacttccttttaacagcgcactatatcctacagcacaccattcaaacaagagacctctggatagaggtgagggtcggggagactttgcaattcattcaccggtaagaataggtcaacacgaacatgataccagtacggataaaaaacaaagtcaatcgggtttaatcttctgtgcaagacacccgatggtggcagctggaacacggaagttaaagggattgttcgaatacttctgcgtccaggcttccaattgactaacgaatggctcgagtagttggaaccttgacgcatatttggaaccgtgacgcagaggcggatgagaagaactacgcaatgctctttctgctcttcggcctacgccgttcgagtgtaggttccaagaaactcttctagcatccttgttgtccacacaatatatgcgagcaaacagtgcttggcatgtcttgtgtgggaaggaacgtttctacggcgttgcaactcccgagttttcgaagctggactcaactggagttccttctatcccaatcagacaggcgagttcttgacgccacttgttaagtttcctgtttctttcttgaaaggcgttgtgtgtcgcccgcttctcacccttggcgggacttcgtcacatgccaccagagttgctctgaatccactgttacaaaatcccggcactttcaacacgattctgctcacgctggcgacgaggtggaccgacatgccagcctgttcgttccttccaaggacagcagtcgtgcaggcagtgtaccagcaaaacaaaactctttactgacgctaagatctatggatcagtggtcctttgcttcctcacaccggggacacgacgctttgtcaagggcggaaaacttctcgagcttgtgaacggttgagcgaaagactggcttcgttgaacacgcaacacagcaaaagatcgcctctgacccataaaagacaagataatctgtaataccaagacccatttcgatgttacatcaggtatgctacatcaggcaagtaaatatccttcaagtagcccaggtaaccctcagggaagggtcgcgtgtttcatcatctctttagcatcgacactttagatgacggagagagcctacaagtcacaaaataattctcgcatttcgtgtgacttgatgacgaaaaagaaaagcatctctggttacatcaaaacgagaacagagcagacgaagaaaaatttgtccgaaccaggaatcgaacctgggtttacacggccacaacgtgttgtcctaacctctagacgattcggaccgaaagtcggtgacggaccagttgccctatcgtgtgagatgctattctgtcagccacactctttcaaattcatgcaagaaatggtgtacttctgcttgccttcaggtctgaaaaaactgtatgttcgaatatcaatgcaagccgaaatgaggtgggggggatctgcaggtggtgcacgcaaccgctctctgcagcacaggatgctgcagcgctactggcatggggcatgccattcgttttcgagaatgttgaagtgcctgctcacaggagattgctttggagagagagtgaactgtagatacgggaaaaggagtaatagagcagtggcattctaaaaacctttggagaggcggcagcaatggtaccctcgagaatgtgtggagacg

SEQ ID NO: 2868 - DNA, 1493 bp, Toxoplasma gondii
  source 1..1493: mol_type = genomic DNA
atctagagccacacgagagcgcaagtaaacgacacgatatagaaacacatgccacaggatctcgtagattatgtatcggtgagtgatccggtttaattttcgtctcgcctcttcatctttaaacgctgcttctctcagcgcacttcgattgatctctgtcgttccaggtaccaggatggactggccgaatacagataccacttgcctatgagccgcgtgaccgggatgcaaaatttcgcgtgcgatcacgtctgcatctataatggtaaaccccaaatcgtttgctaggcaacgggaaagggtggactttccggaggcaatcccgccagtgatcccgtaaacgcaaaatcggcttcccaagcttataccaaacagaagtatgccggcacacagcttcgcaaccccagtctgagcgaagagttgcactccagcaaggcctgctagcacgaaggcaatcaagaacgcgctgaccactctcggtcgcttatacagtctgctcgtgtgtgcacatttgctagctagcaggccggagagaaaggaagaacaaaatgctagaagaagaatgatacattgccaaaggaataacaccacggcggtgatcgccatttaggaaactgtcggaagaacaactcagccgtactacctttccgcccaattagaaaagttgtactggactctcataatcacaatggatgcagcacagatccagaaattcgacacgaggctcgagttactgataaaaagaggtcggctttttgggcagcaatgaactcttgcgacagagctgaaacggtgatgactaaccgcgaagtgtcacgttacactgtgctgattggacgaaaagacggcccgtgaagaacaggacttagctgggactccgtaacagcagaaaacacaccgagagtaacaaagagagtagaacagtcacactgaactgacgaaaacgcatgcgcgtacgtctcttgcttcccacttacggtacctcgttcgcaagacacacttgccccgttcgttgtccgtctcacttgagacacactgaataaacaaaattggacgaatgaaactatgcgacgaaatagtgatgatgttcgtagtgggcacgcatacataggtgggcagcattggcaagccgtaactgagcccccccgtcggcgcatgcatcgatgcatgccaggattttgatggtctacatccgtagccatgcggaccaccagagaggaaacatattcttttatctccatagctgacgaacctacttgtccttcgttcagatatttttcggcttagatctttttgttgagtcgactgctttccatcttttccaaaactctctttgcgataccccagacaaacagctgcatgctgctaccgcgctcagccacgcgctccttcgtaccggaaatatgtaaattcgtcgcgtgcgtcgcgtcagtcgagtaataagggggataaggggagtttgacagtggaaatagacgcccctttcttcccta

SEQ ID NO: 2869 - DNA, 4931 bp, Toxoplasma gondii
  source 1..4931: mol_type = genomic DNA
tgcacactgttggacggctggccacatgtgcgttgttttccatttgctgaccgggtgctgtctgtttcgctcatctttcccctggatcctgcatctagcccgatccgttccttgccccttccagagctgctgcgcagcgatgtgcaaccatgttgtggcggagccgtgagagccgctgacgatgtcaacgacggtgacaatggcgattcacaacccgaatcctctgaccgcgtgcttcctgtactatcaactccgtcaccatttctggacaggtggaagtcactctcagtcttgcggaaagcagtttcgatgctctccggaccctcgctcgtgaaccgggaaccatggttgcctgtttgttgaggccacagatgtatctcctccaaattggtttccgcaacctctcgatgagagtcgacggcatcctggccacatccgtcctgcagcaggctgctgtcccctgttaatagatgaagggttgcttcgggaagcgcgctcttagctgcttcaccgcatgcgcggaagaaatgtgatcttgccactgccttcagctgaccactagagttccgtccagggatgtccagatgctcctggagagaagcattctcacggctggtgcgcggaacttcagcaagaccatatctgtcctggcaaggggcattcccatcgtcgagaatgcgctcccctgaaattccacgttcgtcatctgcgtccatgtatcgacggagtctcggcggtcttgcgggtgagcgtggcgcttcatactctaggctaattccctgttccgtccctgtgcacgatgcggtcgacgtctccactgagttgtaacctagaaaaaaaccatgcgacgaggacgattttagccattcctctgctacgaggtctgaagcagcgcgcggcccattgctatcatccggtcttcgaacagattggaccggttctcctgtctcgtggcaaaagccatcgtcctcccgctcgcacatttccatggcatccactatcataataattctgtgccgcagaagagctgaatcaaatgtctactacggttacctacgtgctgacatccaatacaacactcccccagtctgtcgttgcctgtttactaggagacgccaagcgctaaacactacactctagaaagcagatgccgcctgcagtggaaatcgaatggatcgccgcaggcggtccagactgaatttacagaccggcgaagaacgaaagctcactcgctggagcaaggtctaccacggaggcgggatcgcttggcaggcgactgcagcctggctagatatgcggactgcccacggcactagcgcacacggttggatcaaaagtgcacaagatggccgctaacttttggaatccagcacagacagggaaacggtctgcccatacgaaaatgacgaagaagggccactgtccccgctgtgtctgaatcagccacttgcaagtgtccacctagtttggcttacaatagtggtcggcagcggaaaggagacgcactaggaacccgcagcctatttacggaacactccaactgatttccgaggtgtaaaggatgaagaagggaaccaaaacgaagaacaatcgaagtgggatttcctactgcgcccgggggccaaagcgttgagaggtttctgtgaaaaacaaaagaagattacgccacggatacggaaggtggggacaccgtcaacccgcaggctagcgagacggcaaccgcaggcagaaaaagtcactttatcagaaccccacaggagtgaggcagaggggacgcggccaaagccaacactcctgaggctaccttgcagctttatcctccgaagctgaagttcacaagaaaacacgtaaaccatgcaaactcttttatcccgacagggttgtccgccacgcggtgacaatggtgatacagagagccaccggaaggttgcggacggtggacacctagctgaggcagccgaaccgtgaggcggacgagggtggtacggaaggtggtgacaggaaggctcggcggacgtttgaatcgcggcttatatatttgctgaaaaagcgcagagtgcaccaactccttgtagatttcatagactcaacacaaaaacagctgtcaaaagcaacgcgacatcatcgagggcgtcgaactcagccgagcatctggtaaagctggacggattgtaccgtaacgttgtgagtcagaggggggtggcggaacggtatccgacacaaagcgggcgctggcgcctgttgcaagtaatccccaaagtaaatctccaaacagcagtgctcaacgggtgaagggacacatgtaccatacttcgcactaaaggttttgttggattgccctgaaaccgacaatccgtgcggtgccattgcaggtgcggtgctctggcgtggtgctaatgaaacccgaggggagacacgcgggtgattagcggcccgaggacaagctaggatcgcctggccagctgtttagcgagagttcgtcgcgactggccgagtcctcatcaatggcgactgcttccagcagccgcgaccgtccaatgccctagccataggcaactgcctatgacgcaatacgtttaaaatccgttcctcgaacggtttctctgcgagaaaggagacgcgtgtcaggttttttagaaactcagagtcggcgaccgcgctacagatggggagcaaaagagggcgacggaccactgaaagcgagcgccgtccacgcaccacacgtgaaaccacatgaacataggaccttagaagaatcggtaatgaaactatgcatatacggacgccgcgcgtgaaagatgagtcaggggtgtgtggaccgacgggggcgcggcaacccctgtagctccgtacaggaagtagtgtaactttcctaggcggctgtggtcggttacacgtggttgtagggcacaggcagttaggaccggattgtcaacaggtgtgaacgactgaaaaagaaggattcaaccagaggtcagcgttgacaccgctggcaccccgtgagtctttggttaggtaagttgtgtgtaagtgcgggaccatgaaatccaagaaagcctgctgcgtgtccctaatcgaatcccctcactacgaaaactgcaccagtcgggacggcaaacatggttatgaatcctgtgctccaccttaggaagtagtcaaccatagcaccagcttcgctgtgacgagtctaaaagcgaagccgcaggaaatagttatgcaccagtttcgtgtgtagtgtgcttgagggggcgggacgactggggcggccacagtaatacggcttaatcgaaagtgtcggtgctgtcgcccgtgcgtgggcctagctggttgctttccccgacagacggaaagatatgaagagatactccaaacaatacaccggatatctggttattaattgtgtagtggccgaatagaactacattcttgtatgacatcgcggctggagcaggtaatgcgcaaaggacgccgtaacggtgtcagcgcagttattgatcggtttaaatggcgagtaagtacccacattaggaggggttttcttgtggttactatggtagcagatgtttcgcgtcgtatctaaattcttatgcaaccctgcagttcatcgctggaccttgatgtctgaccgcttcggcgggccacgttttggccgcctatacccgtcaacactcggttagagtggaattctgtgctgatcagcttcacacgaagacatctgtaagcgagcgctcgtccaaatctgtattgtcaagcctgctgagcggaaacgcaggatgcaagggtggaggctgatcaccgtcctgtaccgtcactgcgctgactgttacgttgcagatgagtaacagcatgcgacacattggccctcagaagcatcgctaacacgtgacatacccttccacagttaacatggtccaaacgattttgcgtacggctcctgcaggttgacgtgtggatgaagatatttaagaaaatgtgtgggcaattcgttctgaatcatggaggtgtacacagtcaaggagcggcggatatagcggaaaagaagggaaactcttcacgggatgcttctactcgaaaatatgtccatcgctgcatgctggtcatattctgtttgctggcagacccttggcgaaccgtagtttccacgtgttgatacaaaacgagttttaactggatggtggtgcgcgggatctctaatggtaggcgcccctatttcagacctgctagccaacccggattacgtttcgacacgccacaacgggacagtgcccattataatgccaaggcaacttcgaaacccataccactgaaggcactctgtgacgttccatatggtcttacggtattcagcgactgtcttaaaacggttgaagttgaatagcgattgacacaaagcaagaaaccagtataagtgtttaagatggttcactccgtccgtcagcggcgaccgtgaggtgcacaaaaaatgctgactctgaattcttcgccttggcagtcgaaaagtgtggaaggacggctccccgcactcccgtgaccatcgaaggagtatggcgtcttattgtgagtggttgtgttttagtatcgttggtgctttcgctcactgggcttgacgacgatgtgctgacctactccggcgttccttctggccgagtcccagcctcgagacctcgagaagtactcaacgataacgccttttgatgctgtattctttctagtatacatttcagtcatgtcgctgtcggtgctatcttgggattctttaatgaaggtgtgtatagctccctgctctcggcgtagcatatggatctctggtgtcagtgacattcttgtcggtagaccgtatggcttcaagtaaatgcaaatgcacgaggcaaccgcactcactgtccagcttcatttgtgacggatgcaacgtggcatttcgcgactcaaca

SEQ ID NO: 2870 - DNA, 1749 bp, Toxoplasma gondii
  source 1..1749: mol_type = genomic DNA
caaagcttacctctttggtgaggagcgcgagaagcgcaagactctcgaaggagatccaacgcctctttccagcaggcgcacccgccccagtcgacgcggacagcgcaggcagcgagaaggagaatccgaatgtatgtcctcctgcgacgactgcggtcgacgaggcggcggctaggcgcagaagatcctgttgccgcttcaagtgcagcatcttgaggtagcgaagcaggacagacgcgacaaagaagacgaagaaggtgaggagcaggagaaagaagaaagatggaggacagacgaaggggacgagaaagacgagaagcgaagacgaagacgaccccgtcgtcaacgcagcgcccgccgcctctgccgcctgggcagctgccgagacagcagccgccggcaagctctccatccccgcctgcggaaaaacagagggggagacccagaagaggggaaggaaagagacagatcccccgcagaagacaggggaagagaacacggaaggggcacacactgaagaaagccgagacagccaggatggaagcctgaatcatgggcacaagctaaagccccgaaccatccagttgtctcttcagaaaaaggggaaagagaaaagcgctacctctctgaaaagaagaaggagatgcactatctcagcgcgaaaaagagaagagagagcctctccgaaaaaaagagaaaagaaagatgcaccaccaactcccccgaggaaaaatcaccgtccctctaagaggcagaagagcgtcctcggcgtctgccaggctggcacacatgagaccgggcgacgcaaacctggcagcgaggtgtatgtacacccgaaggggacggaaccattgtcgacgcgggggcgagagaggagaccgcagacgagagcccagggcgccgggaagaaacgaggaacagagacgcagagcagaagtgtgaaaagggagttggagaagaaagaggaacggggagacagagaaccacctggaggcaaaaggagacgtgacgaggaaagaggaacggagaagccgcagagaaggaaagaaacaccgcaaaagaggaaagaaccgccgcagagaaggaaagaaccgccgcagagaaggaaagaaaagccgcagagaaggaaagaaacgccgcagagggactgctctccgttgacgtccgcaaaaagaagagcctggcgatgggagcagcttgcagttccgctcggcaagacagcgtttagcaggtggaaaaagaaaaatccacgaggaaacagagacgcgagaaaagccggcggtgttcgggcacgctgaaggaattctgtcagagaaaggcgatttacgagacaaggacgagtccaaaaagcagacgcagttcgttcatgttctcctcgcgagtgacaccgaaaacagggaaaagggcatttgcgttttctacgaatgggtgactccaggctgtttctcttcctctcacacctgcatgtcgaaaagaaaaccttgcatgtattgttccgtgcactctgtgacggagtcggtagaaactcgactggcgaaaataacaacggaaagggagtctcttttctcgcttcccgtttctcttccttcgtttcgcctgttcagcgccctttttctctcgcagagacgcacgctctgaggtgtacagacaccgagcgcatctcgccacgcgccgaaaaagcagtcgtcttttttgtcgcgcttcgggaggaaagacgctgggggagaaggcggatttcgctccgacgca

SEQ ID NO: 2871 - DNA, 4806 bp, Toxoplasma gondii
  source 1..4806: mol_type = genomic DNA
tcttcttcgggtgttttaagctcacttttctgtcttgccgccgttcccctcgggaggcggcccgttgtcttcgtcgtcttcgtctcgacttccgtctgcgtcttctttcttctgcgtcttaggaacttctgaagccgtcgcggaggtcgcctgctgcgaggctgatgccggcggcttatagtctgggttgaaggctcgctcttcttcctctgtgagttcctcgatcttgttcaccctagcgggtcggctggaggccgcagccgcggctacgcgcttctcttcctcctgcttcttccttgcctgctcagcctcgcgctgtcgcttccgctccaactccttcctctcctcggatcgtcgccatccctcttcaaacactttgtccataacctctcggcagttggtttttcctgccgagaagaaatccgtcttccgctgaaggaagccgaagaagtagccgaacaggccgtcgattccgccagcctgctgcgccacggtcgtgaagaggccgtcgaaacgcgaatcggtcatcgcctcgtccagtgtcggggtgtccatctttgtgcgagccggggggggaggggggcaccgcgggaaaccggaaaagacggggggctcagccgagggaaagaatgggagaaaaatcggcgacgaaaagatgaaatggatacttctgcactcgaggagccacgcaaggaccgaagaacgctgggaaaagtctcgacaagatggggagtacagacaccttggcggctggggttcgaggatgcctaaaccccggagactgggcacaaaagaaccgagggcaaagaggcaggaaattcgcgaacgtaaaaagcagacgtctccagagtcgtcgggatgaaggtgcgagtacttagctccgcttgttgtcttgcgcaaccgggcgaaaacctacgcgaatgctcctcgcgggtgccctcgtcccgccactgagacgtttccagtgactctcgaccgcagaagaaaaaagatgaaactgaggcagagaaacgagctacggagcaatccacgtgcactacttgtgcactctttacacaacaagagcgtacgtcgggttcttcttcgcggacgcggcagacacgtgggcgttgaggctaaatcggagaggaacaaacacttcgttcgacactctctgtggcggcaaaacgcgtcgacaagggtgggaaagggaaagaaagaaggtaatttgtaaagagttccaagaacgtagagaaataggtcgtgtgctggctgctgcggcgacccacgcgcgagaaaagtcgccaggcatcccgctgcactcgaactgcacagaccagcctggttgtcgaaacctcacaggtggtgagacgctaaatgttggattgcgccgttgggtgtggaataaagattgaggaaatggtctagtgacggaaggtgatggcatgcgagcggtcgtagagcggaattcagcagcgtagacgcaggagaaactggacacttcatggtcaccggtcgatcgccaacagctgatgtgcctggtccgttctcggaaagagctgaaggaacagtagaaccggcgcgacgccttatattttacgagtccagagtgttgaactgtcaatccttctagcacgtcgagtgtaacaagcagatctaggcgcaagtcttcgctacactcaggggaaacggagctgcctgtggcttcggtcggtgtgccatgaacactttctcctagtcgctacgtttcgcactgcacattggctcactacaccccgttcgcttctgggtcgaaatggcagcctgctgaaccgtgtcagcagcaaggatgcccttgcgaaataccattcacgttgcacgatcaggtcaggacacggtggcgtcacacgtggaccctgatccctgagtcaccacaattgtaagccttgtcgaacttcctggaacatctcactttcagacactggcaggctgaatcgtgaaaagacggacgggattctgacgaggcgatagcaaatgacaccatggtagaaccgaaggacgatgaacatgtgcgttcctttctaagtcgtagaacgacacggcaggatacacaccgatccgacaatgacattcttggatctcagcttctctgcgacgaagtcgctcgttattctcttgtttgctgtcgtcctattttccagcagatgtctcgcacgttccagggatgtctggcggcgacggcgcagtgtctgtctccctgtgtgtgccttctcaaaaacgacccggccgtttcggaacaactctgttgctcaagggtagtatatgcatatttatatgcacatttgtacgcatcctgcgatggggcacacggtacgatgtcgaagacaaaggagttggtggtgtactgctagcgtgctacggccacggccacatatggggctgaagagtcttttttcctgtgctctcacacgcgacttcagcgatgctggaaaaagaccatggaagagcggttcgtgtcaactggtgcagtgtcgtggcagaaccggttcagagggacacacccctttcaacgcgtaattgtatgacttccttattaccgcaattttttcccttcttccccaacgatgaagtccaagccaaggtgaatctcgagacaactctgcaacgacgtgaggactctgtatgacatcgccaccagttgcgaacatgaagagttcgagcatcggtccaaggggacagcgggggggggggttggggggtcgaacaaaatagtgaagctggatgcagacttgacaattgcgtacgggagttggcagtctacatagactctttggtggcaggactgtcgagcctatcggggatgaccaacaccggcttcacaacaaaacactcgagaataaaaagcactgccacataaagttcgagcatttcgggtgcacttcgtcatggggcgaacgccgtcgataccgtctatggcgattacttgtctccagccgatgatttcattttttagaaactgcctctctccacacttctctggcgacccagaatgaaggtgctccttaggtcagatttatgctgcatatggaagcgtgagagtttcacgtgtgtgtgtggtacttgcaatacatggcctagctatatctcaaaaagatttgtatcacgtgaagtatctttgtagccccggcactatacttctgtattagttaacaattcgtcacgtgttttgattaatctcacataacaagcatcactcgcgtggataagcacgccttcaatggttatggaacctcgcaatctcatcaccacagttgcacaagcatggctgcgtttcaggcgcgagttgatgaaacacaactcgctgtccgttatacatttttggtatctgatgtgaagacttttgccaaaaagtagatgctcttcatctggcgccgtatcccctctccaatgcactgctgtacaacatcgacttccggacggccgcggcacacaaaccgaacagagggggagcagacacgcggaagccacacctagagagcaaccaaaacagacgccgctgatggagaagaatgtcgagaggagtagggggcgagcgaagcctgtgtgtcgctggagaccagcttctgtcatacacgtcttcagaaatatggaaaagaagcccagaatactcatcataagaaccgctgcagcagagcgctccttcacagccacttgactggaacgacctgctttctcatacgcgacaatgagacgagaagtgcgaaggactggcgcagagtgcgtgaggaagaagtcctttacttctttcaagggggacaagtgtgttgaaatgtcggaacttccgtgtctaccaagatcatatgccatggaatggtgtagaccggcaagacaacgggggtcatttctaaagtgactgcaagtgatgaggtgaccgacaggcgcgtgggttccatacaaatgagaagggcacccgtccttctaaaaggagagccgtggcggtctgtgacatacactttagttcaacctaaacgccgtcttcgttgaagtacagagtatcgctaacacctggatgtgaccaccattcatgtacgctgtaagcaaatgcctgtgaccgtcccatccacaccctgacagggtactctggacgaagagcttttcggcctcgatcatcatcgataatttcgcgacatcgatgctcgtgtagcatccgaaggaccaaagagatcttcggcctgcggcttttcaaccgcattccacacggaacgccgtgcagttgtgtgcgtgcctgtgtgcgtttgcccgcatttgaagaagtggtgcagcgcattggcacagtcgaaatgtcggagggcagcttgacgaggcaaagagagagactagacactcgtgacaggaagcgagggacaaacgacggtttcggtggagaagatggagcttgaagatacctttttgctggcatctgcatgaaacgcgctcctatatcgctgctctgttcccgtagtattcggggtagtcgaccgaggacctccccggcgtgcaaaccgtccggcgggtcggaagggtcacgcgcgtcgcggcggcggttgagtgcgtctgggggctgtacgagcaacattcagaccctttgaacttttcacctttaggttaattgcgggaaagtgccgtttccaaggtctgttgggctctgtgcaagggacacccgttctggtcaggttgcccaggaggcgcacgcatacgtttaaatccaaatacaggtgctgcttttcctcacctctgcttcggtgccgctagcggcaggactctgtccgacatttagtaccgcagctttgtcacaatgacctatcgcca

SEQ ID NO: 2872 - DNA, 1937 bp, Toxoplasma gondii
  source 1..1937: mol_type = genomic DNA
gaaaactttctgaatgctcaactcgcttcttcgcgtcagcattcctacatacatgaacatgcagaggctaatgcgcttcacttgccctcgcaagtgtctctttcaaatcagtcgcccttctcggttgaagagtacttctgagaaccgggaaaaaggtgctctgagtgttgactgcagtgacagcacgtaatgatcgatggttttgaggattttcgctcggaagcattgtttccgttccccgcccaacagccaccgctcggggacgagacgcttctgaagtggactccaagtccaacacagcgattccagaggcacatcagctgtcactcggtcgctttttcgacaaggaggaacagctagcgttgttacacttggtgagatattggaaagcggatttcgtctatttgtcgccattcagcaactcttttccgaacaactcgcgctggctcttccgtgggtattcgcagcttcagcagcctcgcgcgcagctgtcgcgacacgggggaagtccctgcaaacttgatcgaaggatttcactgtgccattcctttgcttgccacgattgaagaatccacagagaacacctacaataacgtgactgaaatgcacaccagtgagaagacacaggccttaaccaaaaccatcgccacctgcagtggccataaagacaacgctgtgttcgttatttcgcgacagttctgttgttttccagcgtctgcgtatgcttgagaagcgtcttgcgcatttgcgagtgtcttctcctaactcagtccaaccggaagctttgtccccaccgtcgaatccggagaggaaatagctgaagacgaagttcctcagaatacggtgtacgtacacctcgaatcaagaaaacgacggctcttcagccccactgtccccttcgcttctccctccttatcagtttttactcattcttatgtgaccaagcagttcctctcttcgcttcattttgtcagacgagggtctgagtcaagtgtttcgcttttcttcccccttgttcttcctgtatgagaagacactgcctatcctcacttctgccacaacgcaggaaaaggaaggcgaaaccttttctccttcactgtcttcaactgtccctgagtgtcccgaactgtcaccaactgtcttcgagtgcctccagatctttccttttcggagtctatgtatcctagcctccttcgttctgcgttttccttcctttcgtttcactgggctctttccgagccgttttgtgtcgaataatccaggtttgtgtgtcttgttttcctggcgtggtgagatcatcgagctctagtacatgtgatcttcatcaacaggacgcgtttctgtagaaacacacttcctgtgcgcctccaatcaacctgggggggaagcgaggcctcaacttcgatgtctgcattcgaagtataaagcacacatagagaagagcggggaaggagctctgttgcgctttttttacgagaaaaaatctccaggaattcctgcgcgtctgttgcatggaccgccacgcacacatcggccgagctgctgcgtaaagttgtacctctctcgactccggaaacctttgtgagaggcgagagagagcgagaaaacgctttcctctcgaaacatctttgttctcggatgaatactcttcgtttcctctgcaggcgactagggacagagcgaagaatttgcttcgtggactcttccgctctgtttcgcctggtgtacatacactggagaagagcgcctaccaaacctcgagttgacaaaggcggactgtctgcgagggccgcgcacattgcggactcttggctttttcccaagcttcgaaaaagttcttcccaagcttcgaaaaagttcagatcacccttttcttcaagtttttcccccgaacactctctcttccttcgctttctgtcgagtcacctccaccacaa

SEQ ID NO: 2873 - DNA, 4126 bp, Toxoplasma gondii
  source 1..4126: mol_type = genomic DNA
ttcagtgcccttcgacgagtcgacacccactgcaatccatctgaatctgcggcgaatggaagcactgccaaaaagcatcgagccgttctcactcgcataggtcaagaccctgaggaaaacgtggttgcgtatgtcgtctgtcaccctctcgcgttcgtctctgtcttttccctctctctccccctgtattccgtccatgtttccttctcctctctttcgcctcttctccccttcattgccagtgctctccctctgtgtgcctctgcttgcctcctgtccctcgcttttccattgtgcgggtctgctgcccagaggcggcgtctctcttaccaaggaagacccggcgaagaaggacgcgtccgtgagactgttgaggactcgcgcgtctggtgtgcgcgtctcgtctgttctgagatcgctttcagggagaaactcagaaaagtcaaagtcgtcgtcgacgtcgtcgggaatgaaaatgaaggagtcctccgggccgcgggacgcgtcttctgtctcgaacgcggtccgctgcgctgtagctacacctgaacacgccgcggcgggtgtcgcagacggggcactcggagcgtctgttccgaggtcggaaacaggggacagacagcgaagagggggagcaaacgagctcggcgagaggcagaaaggaacaaggagaagaacgaagagagcggcaggcggcgggcgtcgaaaccggcgcgaatccagagagaaaacggaagaaacgcgggagcggagtgcagggggaggtgtatgtacagccgagagaggcgacccaccctgcatgattccgcaagagaggcacatcgtcaaatcgctctcacttcattttcttttgagggagaaaagccagagaggagacatacaagcaaaagccgggacgaccatgtttgctgcagagcagctgtcgcagtctgcggcatgtctccgcaaaaaagagaggcgcgaagacacccggtgcagcgagaaagggagaaacacgagcccacgggaggaggcgacgcagaagagcggggcgtctctgtccttttcgaggagaaaaagtccagaaaactggtcgtcacaaactccgaaacgcgctggcctacgagacagccaagaagcttgggacggcgcccggtgaggaacttttctgaaacgggaaagagagacttctcggatttttctcgacgcgttttcgctgaaacgtcgaggggaaatcgtctgggaaacccggcgaaaaaagctggagaagccagagaaaaacagtgaagttgccactgtctctgggaagaaacgcatgcacaggcagcatatatggagcggtgtcgcacactctgttttcgacaccgaggaaaaaaggaaacagatacacctctacacgaatgatcgacatggaaacatcttcatcggtctgagatccgctttgccgagatggaagtatccgcggagcagcgagtaaaatcgcgcttctgtgctgaagcagtcgaagtacacccggaccgagctgtattatacaggcagtagacgtagcagcagcagctgtttccgtaggaagactctctttaagatagtccattgtacatctgcatcgtcccttcacgcgcttctcacaaaccactttcgactggctttctccgttgtccaaaactcttcactttatgccgaaacgagtgtctgcacatggttagctcgctccacaccaggaaagaaggaaccatgcgcgccctaccttttgagcatgaaggcagcgagagaagcaagttcaggttcttccctgaacgaagggactcgcgagaggaactcgctcccagagactgcactaactctctgttcaaaccgtccagtgaggacctgggagagcgtcacgcagcgcgtcgtcttcgaggcgtcgtcgacgaaacgtatttctctcagtgttgacacttgattgccatgtggaggagaggaagcatgttttctcccagtcgaatgtcgcggggccggggcgcgcaacagacactgtcttcacgtcttgtcggagtaagaagcagagtgcctcgacttcttttttcgctggggcattgtctcacccgcacagaaaagacagccgtcttcggcaagaacatgaaagcataaatctgaaggcgccctctgattgaggcgtcgccgtcgacctctgtcttccagagatgtcgtatccgcagctgcgacatctcagtgcgagaagcgcgacggcggtggaaaaagagagagaaactgcagtgcccagttgagaagccagctgttgtgttgtcgctgcgaaaccgggaagcgaagcactgaaaaaaagaggaagcgtctacgccggtctctctctcttcagtcactcgacttccctgttgggctcgcctggctgtttggctggacgatactgagatcgaactctcggtagttcgccacctgttcaggaacagaggccgcgcaaagcgcgagggaactgggatttggagaacaggaaaagtcgaggaactagcagtccagtgcgtgtttctgcgctcaagaaaaggagtgaacaactgtgcagagatggctgtggagaggcgaacgcgagtgcaagagagaggcgtcgcgtgcgagcaagacctgcaaggcagagaaaacagttgggctgctgttggaggagaaccgcaaaaagaaaaaggccaaggggggacgttgacgccgccttttcacgcagagaaactgatcttcagtgcccaaatcacctctctctacagacgcgcgtcctgccactatgatactctgttcctgtcaactacttgttcattcttcatctctgtcgatctgtatgcatgtataatgtgtgccggtccagtagtctccatcaatttcaggcctcctgctgcgcatctcgagtggttggaatccctggtccgccgttcctcgatttctccctctcccgctcgcttccactgctctctctcttcttctctcactcgaaaatgtgaaggctgttctgaaaaaagcctctcccaaacgagaagcgagaagacaaccaacgaagtttccagttccctcatttcccgtgttcgccctccgtccgcttgcagcagaattccttttctctcctcttcgctgagggtgttttctcgtttcatgacaaatctcggaagagacaagaaaaaattgactcaggggaaagctgcgcctccgtttcttccgggatgtctctcttcatttgaagaaaacgagctcggtcaacgctctgcttccacgcccccctctgcccgcctcgctcttctccttcacgcgctcgggcgtccgtacacctcacagacgcgaagcgaggccctctcgtttcttgctggaaaatagcggagtttcctggtggagttttctccattttgctagaaaaacgaccatttttttcactcctttccctgcatcttttctcttcttcctaacggtgaaaggcccttggcacttcgggtgtctttacgcggcagcctcagactcaccttctctgctcttgtagctcacttcttcgcggctctcaggcttagctggtcgttgaatctttccaagcgtttctcactttttttctcattttcgtcctgtctctttgtgtcttccttctctcgaactcgagcagggcctctccagtctctccctgctgcttctctctcccctcctgccgaccttggaagtccgcttttctcccgctttccttcgcttcttgctgcgtgttcttcgggctgctcttctgcggagaaaaagaccgttttcctcgttctgtactgcctccgagtctctctttctacagagacacagacagacgcttctcaccttcctcttcctcgtcaaaccggagcgcggctctgccgcgcaggcgttcctcccctgtctttcccctcactttctcggtctcttccgtaattttctccattctgccctccttgttctcgctctctcgctctcgctctctcccttgttcacctgtgtctctcgaatagagagctgcggacttctaggtgtacagacagttcgagcacgagccacgaggcgctgcttcctcgcttctcgcctcttccggccgtcctcacttttctaaaaactccctctgcatgtggagggcgagggacagtcggggagttttccgcgagagcaacga

SEQ ID NO: 2874 - DNA, 1670 bp, Toxoplasma gondii
  source 1..1670: mol_type = genomic DNA
acatctgtacatacaaacagtgctaaagttcagtacaagcgtatagccgtacgtattcgcagaacgaaagcaagttcctgtagtcctcgccactagaggattgtcagaaagatgagcgctcctgagggatattgtcacaagtgggaaaagctatgttgcatccccttcactttgtggcaaatgcttgtaaccaggcctgttgccagtcccaggtctcactggctgtacacttccgtgcgggattgacagtaaacaatgaaaaagtgggcgaaggatgtctcgcaacagaagttgcagacataaagaactgaatgaaattacaatatcgttcttggtcagttcgtgagggattctgattgatggtgggtagcaccatgcaaatactcacaggaataccctatacaaatcagaacaaggcacaagatttcagttcagagaggcataccagcatcgtcaacatagatacattttgactactgggttagaaacacacgggcagcgggtggcaagggcgctggtgcatcgtccagaaggcaaaaaacagcactcaccacagcgtcgttgaacagtgatggcctaacaggacagtcaacagtacgtcattgagaggaaggcctgaatggctggctgaaagagtatttggttgtggctcgggtctttcgagcttcctcgctcaatagcctggtcagaagagaagggattctcgtcagttcacatgttccccgttcagccaccgcgcttgagttcactaaatcgacgagtgtgtcgcgaactccatgtctgccaaaacactctggacgtgaatgctatggattcggtgaggcagatgatatggacttccgttctaatccgtcttcgagggccaggacagtccagtttcctgaaaacctgaaaacgcgtggtctattatcaccacactcacaagccctccttggtagagcgaatagcgaaaacaagcagtcgattgaacacgttttctgttactaactaatgcacgaacccgcttgtgcagcacattcgttttgacgcattgtgatgtcagtgagcatctcgatatgagagagggtcacacgaacgggaagtgcgattctctgtgctagctcttgtctgccgtctcccgccgtgcgtgcatgcgctgctgcgaaaaatcaatgcagtttccagcaggagagagtgtcggcgcgtatcgcttaccaagcttcgagcacaagcctgcatactttgtgtttcttatcgcttgtatttctcattcttgccgggacaagcttctgttttcgtagtttttacccagtcttcgggccctgcatgtcttgcgggcgaccgcgagcgtgggaaaaccagcccacgtctccagctgtgcgccgcggccgcgaagtagttgtatttgaccgattccgttgttttcctcggagttaaaaccacaaaggaggggctttgagagttcttgaaagtgtcgaggccggaacgcgccgaaggtagcagcgagatttccgggtttgctgccatttcaggcgttgtgctctctggcgtgggttgagtttaccaggcagccccgacgtgatcttgtgagggacggtgtgcttttcgaggcggctcaaggcgtcttctgcgggcgaagctggattttttcatctttcaggagcttatatcgcctgttctatccgaagcca

SEQ ID NO: 2875 - DNA, 1927 bp, Toxoplasma gondii
  source 1..1927: mol_type = genomic DNA
cttcatagtctgcggacggaaaatatgcctcgatatgcattgaaactgacaagcactctccgcatgtgacagtgtttctcttgtcaagctcatccaggctgcacgcccctatttaccacaaggccgttgccaaagtgttacatgaggaagacatccaaaaacgtttctggacgtcttctgtagcggggtgggtcatgtgtgaggctttagccggcagcccttgtcaaggcaattgtctttcatgtatcttttcaccaaaggaaggcgcgcagtgaaaacacacgcagctggctaggttcccagagatgcaaggcttgccgtttccccactggtttttttcggtggcgtcgtggaaaacaagaaactcatcagttcggttgcgtatggctgtgcctgatctctactcccgtctgcaactgttattgtttcttgtcgttggtgagatatctgtgctgtgtcgaatgccttgactgtttatgtacctatcttttctcttcctcgatcacgaggagttttccatcacccccgacttgccacggcgtcttttcgtgtctcttctcccgtcgtctccgctttctcttttcacggtttttgttcgtgcgtcccccaactttcgccgctgtcgaactgacggacaaagccgaagtctcctgcagaaaagcgagcgacggtcgcaggtggcacagcgaatcagcgaaactcgctgtttcgcatctctcctgttagccccggctcactttacggccactgtatgatttattggtggaagaaaaactggatacttataaatgccgctttgatagcgacatgtttcagcggacagactgccgacagcatcttgaatgagctccagtccgtcgagccccgagacagctcgattcagcagtcgtccttcgttccacgagaaaaacagaggacatacaaaagcaaagaaggcagagaacactacagggaagttgggaatgaacagcggtgtatgtttagctcgattcctcatcctttcgcactttccccgtctcctgtctcaagccagaagaactttgagtacattcaatcgtacacaatgtaagactttctcgtaaccatttcaccatctgaactgcctctcaatcgtacgtttctagctctcgtacgataattcaacgacatagtatcttttttgcttacaggtgtgttcttttcttctctgcagttcgcatttgacgtcgttcctttttagagggggggcgacacagagacaacgggcgacagacagcagatacccttccggcagagaaaaaactaccaccgctgggctgtggctaaacttcattcttccaaggtattttgttcgctccttgtgtctgagtaaactcgagaaaacgaaaaaaaacctgtttctcttttgtcacgcgctgtgtgtcggcagaaatgcctgctttgcacacgagcgattttgggaggtcagcgtctttgcatgcgccagcgcgacctttcttggatccgtttctgttttcttagcaactctcctgctgtttttctggaaacctccacttcttaagagttcgaaggacgctgctttttgcggcgcggtcagccgagttcacatgctgcttctccctgtcgttttccttcgctgctcttgtctgccgtctcgactgctccttgcctttgtaggttttaagtgtgctttcccttccagttctccgtgtagctctctttctcttcactgtctagacaccgcagctgacgactctcttttctgcgtctttggacgccgtttcggcagggccgcaacttgcgacagataagtctcttgttctctcgcagccgcagagtgccgcatttgtttgagactttgcactgccacaatgcaggttcgaagtcgaactttgtagagactgcatagcttccaagtaaatccaggaacgccatcgaagggagaaaa

SEQ ID NO: 2876 - DNA, 2623 bp, Toxoplasma gondii
  source 1..2623: mol_type = genomic DNA
catcgaactgctgcgctggaaaaggctgactgtccctacgtcgcttgctcacctcgcgaggcctttgtctgcaatggcggactgaacggcgcgaatcgcctcgagagcctccttgactgcgcctctgaaacgcgtctctcccatttcttccggaaacagagcgtcgacgtacgctgcgacggctgcgtcgtttttggagggaaactgcagactgaagctgtcgatggccgcaggcagacaaggcgccgaggaagctgtagctacacctggaggcgcgaacgcactcgcgcctcccgcagcggcggagggcgcgtgaggagaagcaaaggcgggcagaccggaagtcggcggagaagacgcagaagtcctgctctcgagcggagacagtttgagcgtctccggggagacaggtggaagagagacactcggagcgccctggaggagagcgaggaaagctgcgcagatagcgtctccattctcgttgtttccaaagactcgccgaaccttcaagatcttgaaaacgcgggaactcgcgtcgagaatccccgcatggcgttgcgccacctcgacgcagaaggcgcgaagcggcgccagcgcgagttggaggagacacaggcaccggcgacttgcgctcttctgcagtgcgtcgttcagaacgtagaggagaaagagaagcttctcgctgtcgctctgggctttgaacgcgtccatccaggcgccgaggaggcagtgcaccactgggtaattccctcggaacagcagcgcgtcgcttgcagccacgatgctctccatcgaacctgtcaaggcttccagagacacccgaaactgagcaaccaagcgacggtcttcctcactcaaactctccagagaaacacaggcaggcagcagcgacagatgcgcagcagacagcgaacaagatgccagcagaggctgagacgaagaagcgggaggctgagacgaagaagcgggaggcagagacgaagaagaaggaggcagagacgaagaagaaggaggcagagacgaagaagaaggaggcgaagcgcaagcaggcgagaggacgtatccactctcttgcgagggggacgcatgagcagaggagacactcatgttttcgacgaacattgttctcggggaagaactcgagtacagagagaaaaaagcctgcgtgggcgacgagagcagagaaggcaggccgaagaagagagaagggcagagatcggagagaggagaacagagagagaagaacagagagagaagaacagagagagaagcgcagagagaagaggagaagaagaacaacggagaaaagaaagaggagggaagaaaaggaagaaacagatgcagacagagcgggccaggagcggtcttggcgttgcggtggaagtccaacaaagaagagagaccccagagagttttagagagagaaatgcctcagaaaaaaaagagaggagagaaaggcgtcgcagctgacaggggtgtgcagatgagacaggccagaacagcaccagctgagcagtgaaggagagggcggggagagaaagaaaaagtccttccaagaaggagattctgaaggatgcagaaagcgaattgccctgcaaaaaaagtctgtcgagagacgctggagttccagcacaagagttcactcgagtgatttacgacagccgcagcgagaaaagaagaacgcgtaacactcagccgcgcccagctcgtgaggaagaaaagaagaaagagaagaagaaagagaagaagaggagaagaagaagagaacaagaaagagaaacaggaagagagaaaggaagagagaaaggaagagggaatgccgataaatagaggacagagaaagcctagagtccaagacttccccagagagagtcgagggagagaagacagaaaaacgtttaggtcttcgtatacgagcaaagaaggttctagaagaaagagacagcgcagagaaagcgaaacgcctctcctctctgttcactcccagtggggtgtgagcataaaagccatccccacggtatacattcaggatacctttcatgtttcttttctcacgacttgttccttttttttcgtttttcaatttcgaaagcaagcttttttgttgtttttctctcccttgagagttgaggggctctagtccttccctctttctgggggggggcgaggcgtcgagcgacgaagcgctgtctctcctccgctcgcggctgcggggagaggagaaggaactcaaagagaactgaaagagtccgagaactgtattttttgccgcagatgtcaaaaggcgtttgactgccttttcgtgacgaccatctggcaagccttgagtctctgtttttttccgttaaaactcgctgaggaggaactcgaagctcctcgaatttcttccgcaccttgtcaaccgcgctctcccgtccctaccggcggtgatgttcgtttctccttgctggcggatctttgtttgcttctttccgtccaaaaacgcttctcgcgtcttcttctcgtccttggaacgccagcagagaagcaggagagtcgcgtggaaacaggcgcggacagagagagcgaccgagcagaaaatggatttcctgttgtgaaggagtctctgtcctcttctccccga

SEQ ID NO: 2877 - DNA, 1944 bp, Toxoplasma gondii
  source 1..1944: mol_type = genomic DNA
cttccttctcgagtgttctgtcgagaacgcgcgtctcgtctcgcttctgctccgcgacccgctctcttcgccttcttcgcctgccgggagagttccttctcttcagaaggaaccggggagtcttttcagctgcagagtctctccagagagaaccaagagagaccgaatgcagaaagttccagctcttgagattcaggagcaacgctccataaaaacacccaaatgtctggccacagaccctcgcgtacacgaaaacgtatgcagactccgagactccaccctcacgcgtggaagagtgtacctgcgcatgtgtgggcagaaacttttcgcggtcgatgtatctctttttgctagcagatcgatatgagagtggagagaagaggagaatgcaggtgaagcaggtgacggaaaggcaaggtaaacgcgacagtgaacgtgtaatcgagatgcgagatctgttgaagcaggtccgaggaaaagagaggttctaagcaaagagaggagaagtgagagacaacagccttgtcctggagagaaaaagttgaaggactcctgcgctggatgagattctgggcgttgtctttcagcacagtccggaggagtggcggtgtccagcagtcacagctgcagacagctgagagcggtggacttcgctatctctcggcattgaggttgtcccacagtggagaaaggaaaggtgccagaagtttcggagagtctcaagccagagaaatccgcaaaaacagagaggcacagaaaccgagagagtccgaaagaaaactggagaagaggaaaactctttccaacgcagctctggacgaggcgctggccgcaaggccaagaggcgccttgcagattatgtgtcggatttctggaaatcgctcgagttcgcgggaattaacggcactgtccacgctgttgtgaggcagattgagggacttggagcttttccttgagttcacgagaagagaaccgagaagaagaggaaagaaaaaaagccagaagagccaagctccacacagctactcgcctcccgcttgcagctgagtggacgaggcaccgcacgcctcgagactggaaagaatctcacagcattgatccgcgagcagagacacgcgtttctctaggattggacgcagagagagaaactcacgaaaagcaacaaaagacaaatggcgtttctcgcgtttctcgcggtccgagacggactcaaagcgaagaaagccgcaaggcactactcaccgttgcgcgggggtgctccggcagaggaaaagctgctgcatgcagagagcacgagaaaagagaaaggcgttcgaacagtgtgaagatcgaggagacggtctccattttccttttatctcaaaagcagtctctgctcccttgatgctgtctttgtgtgtattctggtgtttatgtttgtgtgcgtgtgtcttctccgccgctgtctgcggcccagttttccaccacgtccggcgtcctctttttctcgcctttcttgacttcagcggctctgtgtttcttccctaactcctcttgggagactctccttctctaccctctcctccacgccacattcctctcgcggtttctcgtctttttctgtcgcctcttcctcttccgcggaaaaaccaaacccgacactcttgaacctgtccgctgtctgcgcgttcgctgtctcgcacactcctcgtctcggttttcctgatatagagtcatttgcgtacatgtctgtatgtctaggcatataaatgtacatataaacgtttttacgtggatatttttcctgtcctatcgcctcccaagacatctctgtgtgtgtggcactttcggcctaaattttgcttcgtcatcccctggactgcaccgggacttcttctccacaccaaaatgtctctcccttagacccccgagagcgactgtcttcacagtgctttgccgcaacaa

SEQ ID NO: 2878 - DNA, 2245 bp, Toxoplasma gondii
  source 1..2245: mol_type = genomic DNA
gtcatccactgcctccgtttccttcttctgcttaggcgccatcttcgagaaaacggagcgaagagacagacacgaagggagagaagacgcaagcgaggcagggagagaagaggcgagagagacggagcgagaaagaagagagtcagatggaaaagactacgggcaaacggcgatgcgagtgtgggacgcaagaaggaaagaaagaaacccgacttagaagaagccctcgagtgaagacaagacgagagcgcagaagaggagaaagtccgttccttagatgaggaggaggcggatcttgttggttggtgcagcagagacagtgacagaagtggagaggagtctacagttcacaggctcaaaggtaaaaagagaaaagggtacagaccgagagagagccgagtcgaagtagaaagaaaacacagcgcttgaaggtggagagaactctcggcgcgacggggacagacagcggcttatttcataacgagaaaggaggattcgagaaagctttattctccctctcaatttgatgcagaaacgtcggggacgcgtcacagaaacagccgtctccagttcagagacaggacctagagtgctcagcttcctcgagaaagtcgaggcaccaaggtctgtgcccgcaggtgaagaagcaaatcactgccgcagaattgggagtctgcgtcagcctcctgacaaggcagagaaaaaactgttgcgctgtttctgaagaggaaaaggacgaagaattggagttcaccgtgtcaaaacagacgttgcttttgtgcgcgtttcctgtttctgtggaaaacagcggccacacggagcctctgcatgcgctcgaaatgtctccgacacgcggctgatgttcgcagagacgaaacagtctccttttcccaagaagactggccgaaaagagagccaagctgaagacagaaagccaagtttttgagagacaagacacagatttggcgcatgtcagaaaagcacggttttctatacccggagcagcggaggcagccccggagacagtggggttgtcgacggcagaaaagcgcaaacgaaacacataggactgcagctggaaaaagcgaaacaaccagatatgaagaatagggaatgcaagacaaacgcggcgagagaggcgaggcgaagaagctgcgcaagactcctcggcttcccagagtcgcagaccgttcctggaaggaggcagaatgagttcgggtcctttgtgccgctggaaataccccacgctgaaaaaaaggaaattgggaatgactctgagtggcatttgctggtttccttccggattctcgagggcgtctgaaaactgcggggctgcgaaaacgtcgcgcgcggattctgttgtgcttttcgcgtggccgtcttatcggagaaaccgcggtcttttcccctgttcgcaattgcaggcagtgacacctgatacccaggtcgccagaacgcgtgtgaaaccactcttcctcgagtaaactacgcttaccgaacgggcagagtaagccaaccagacacagactcccaattttctttctgagaatcttcacgcagaaattgcctacgtctcggtgtgccgagagcacccgcctcgccttcgacgcatgcaaccagcggagtgccttgccactcttcgagcgaaaaaaggtcccgaggagtgccaatcggcgacaattattatccatttcctaaccagacccattcaagctcatcgtaaagagccacaatttctgcacacccgccttatttgacgtgctgcgatccatgcggtttcccgattcgcagaagatcggctttctgccatggacgccgcgacattcgggtcttgtggcacgccaggaccttcgtgaatgtctgtcgacgcgagtgccggactttttcgatctttgctaaactgtatctcggcttttcattcctccgtgatccggcgcatatgctgccgcgaaactcctgcaaaattcttcgtgtcttctacgggattttcgtttgtctgcctcgatctcgagtcgtctccgcactgttgttgctgcaccctggaagctgaagccgcctccttaccggcatgttctgccgtttcacacgcttgacgtcctgacggactgcagttgagagacgggaaactgcgcgccaaactgaacggggtgtgtgtgcgttgtacgtacaccagagtccgcggcggtctggcatgagagtcgcgttccgtttccgctgtattacacggcggtgcagagcagctgaa

SEQ ID NO: 2879 - DNA, 2138 bp, Toxoplasma gondii
  source 1..2138: mol_type = genomic DNA
agaaagagggtggaagagaagggaaggaagaagcgagtgaagagaaggaagacgatagtgaagagaaggacgaagagagagaagagatcgagggcggcagagacgcggaagacgaagatgcgagagttcctgcgcgacctaggagggtccaaaagacgaggacagcaagcgaaaaccacaaggcgaggcgacgcgtgaagaaccgaagagagccctcaacggcagggaaaaacagaagcagcctcaagaagaggggagacgcattcgcagactttgcatgcattgtgacgtcgcatcttcttcgaaaaaacgtaaacggatccgtagattacatatctcaaaaccgcattccgttgcgccgcaaatgcaccacagaagagacaacaccatacgccgactcgcatctagacttgttcatgtacctacatgtatatgtatacatatgtatatgtatacaaatgtattgatgtgtagacgcgtacagataaccgactttgtgtgggtgtagagagggagcagtgttcaccctcgtcggtttacaaggcctttttttgggaaaaacacaggaaagttgtgacaaaagtgaaaccgcgaatggagatcgaccacgcgaagagcaaggagacggagagagaagaaacgaaattccgacagaagacaggagcaacagaaagggggtaagagaagaagaacggaagagaggcggagagacgagacgaaaaggaaggcgtgtgctgcgacagggcgtgatcgctggagacgcgctcgacaggacaaccttgaatggacggacttcacaaaatgtgcgggaggcagaaagatgcaaaggcgaagaaagaaaaggcagaagcggtcacgtctaacatcaggctcagagaagagaggggggtctttctcgcaggccactttcctcacccttttctagaagggctcgaggaaacagcgacttgcgaggaagacgaaagaagcagaaaagtgcaacagagttcgccggtgtcgcgtttcctccctctctctccaacgccacgtgtacatacagctgagtctcggagcggggtacccgctgcctcgaattcgtctgagagcacccgtatcgttcgcttcctttccgagaggaaaagagtcgaagttccttctctttcgcctctctgccttggagtctcgctcgactttggtccacggaaagtgcagatctttctcccgttttcaaggatccgcgacggctgtacgtacagccgaggaggagaaaagctgcagaggccgcctaggagacttgcaagactcgcgcggctccttttctcgaggcaaacgcgagaagattcctcaggtttgcgaattctgcgcttcctttgcagagaaaagaacacggtctggctgaaaggttcctgtttctgttcccaggagagcagctggcggagaacccgccttccgcatggcttccccccggggccggagcccgcacgagacacgccacgaagacacgcacacggcattaccggcgttgtgttttttcgtctgttccttttcctgtcttttctttcagagggacgtttcggctggcaaagaaacactccttcaagcggaagcgattttctccacgctttctctcgttttctttctgcgtgcgtgtgcatcgactcctcccgacgtcgtctcgctgctacgtaggattttcgacttcgcacacactttgtcactgcgaaagttgccgcgccctccttgttgcctttcgcgccttcttttcctttccgtccgtttctgcatcctacttccgttcctctgtcttttctcccctctttcttctttccgctcgtttctgtgctgccgcggactctccgcctgcactcgcgcgcggtccacgtctccacctcaacgggacactcgtggggtagctccgcaagaaagcgcttcttgaagagagacacacgcagaatttcccttctctcttgacagacaggcttcctcttcgaggagagggcgactacgtctttcttcgatttgcttgcttttcctcgccgccttgagacgctgaatcccggcagaagaggaattcggtatcgacgccaagcgttgcctttttcagaaggaagtagcagcggcggagaatgacacgccgcaattagattcgctttccaaga

SEQ ID NO: 2880 - DNA, 4723 bp, Toxoplasma gondii
  source 1..4723: mol_type = genomic DNA
aagggagaatctcatacgaaccgtcgggctttctcggcagctggtggcgcgaatgcagagtcgccagtccctgtacgagcgctcctgtcatctgcaaatgacatacactggtttcacgcgctgtaggcacttgacagatagcctgatttgcccacagcaggggtttgccaagatcatcagtgaaaaaccctggtgtggcctggaaaaggtcacgaagaagcggcgcacctcttccatccgcttgctgaggctgttccgcctgacggaacaatttcctatcttcagcagctgtttgctgttcggacggcgcgatcccccgtgcttctgtgatgacaggaggaaaaacagtgtcagacacagggctgcatgctgattccagacagagcggacacgtctctagaacttcggagaaacgtacccggctgaaaccgtcacgcgcgctctggtcaagaactccctcaggagtaccagcaggctttttctttgacaaacgtttaccatgttgtccagcgtcaaaggcggacatctcccgggcaggaatgtcgaaggagccgaccgaatgctgtggatgcaacgcattcggattccatgacatatcctcgcagcctgacaaactgtactgggttccttcaaatttaatcacatcttcttcccgcaaattcctctgggagtccgcctgaccagcgacccaagaggaacccacacgccatgcacaggggccggaatcgcctgtgtcctgcttctctgactctaaaagatattctgcatccatagcttccgtgactgggtcacatttatccacacgcggggtaaaatctcccggtgcgaaggcagttctaacggttgggtgcacaggagtgttgccgtgtctggtgcacatggtcgcaaaatcagacaatatctcagtagtcaacttttgctgctccgaaggaaacccatctggagggcagccaggttcacaagacctcgggacggcggaggcaagctcgcctgtcgcttgcaaacggaacacacagcaagactcagaaggatccttaaccacgactaccggtttgctatgactatgtgacttctccatttcttgtacatcgaaaggcgagagaggaaacggcttcaacagcctaacactcgcctgtcccgcaggaacatccacgggcttcgcgaactgcgtgaacgtgagccgtcattaatatcctcaaaatctggggacaaaactgagagcaacgaggtaaatcggtaggcgacaaagtaaagaatgtccatgtcacgccgatcggtttctgcgcgagattctgcactgcagaaaggcgttcacagcatcggaatctgatttcaatgctcctcagaaaatgagaaatctcgcttgagggaaccacattactgtggaccccttccggcaggcgcctgacaccccgaggtgggtcaagaggcttctgtcgtctagcagagtcgccactatggacaaggcttgagaccctcgtcagcctttacgaaaactcataatttttgccgtacggttcggtggttccagacccatttcgggaccagaagttttccctcgcacaccacgaaaaccgtgttggtaccacgacggatgaggcccatgtcgacaacttggtagcacagtgtatcctaacgaaggtaaatccgtaaggaaaaacattcaattctctggactgtctcgggggcagtaacattcataaactgcttgacgtacagaaccaccgcgtacatcagcgttactacgcagatttggctatgaagaagagtagcgcgacttcggaaacacggaacccactaatactctcgaaacgtctcagctacccacacaatggcgtcgctgagcctggaagcaaaaccgaatgcgggtcagaaaggccgtaaatcaagatgctctggcactttaaaacagtctgtgttcgtttcggctgccttcgcggcgcgacgctacaaatagctcatatctagacaagcagctgcagacacagaagcttgaagtttcgagttactcgtccacgaagtcgcgatgtatgacaccaattctcttcagacacacgatccatttttcttcgttgcctccaacccgacttgcgtcgaaaacttaaaattgtctgcactgcaatttcttggttctgctaaccttccggttctcttttatcttcttggagggctgcctagagagttgcatgctctgactttttgaccaccgatacagcctacggccagagggagctttcgcgtttcaaacagctgtagtgtgagaaaagacacatgcgtgacggaacaagaaacggagacagacctttcctcagcgaatctaggggcgaatacacttcccctaccagttgttcctttgcaaaatcgtgaagtaatgtaattcggcgcgattgacatgttcgttaaaaaccgactctgtcgcgcagcagtaccttcgtatagatgcgtggactactgattccttcatgtgagacatgacagaatcaaaacaagtcactcacactttcatgaaatcgttttggtaaacgaagagagaaattcaagtcagtcgttatgatgtagacgcttagaaacagtggcctcgcctgctgcaacacgagctagccgcagctcccccgcatcaacccgtgaatgtgatcatcccatgttctccaaatcgctaccagaatgataggtgatccagatggttgcttcagcccttgacacgcgaaccgccactgctcagtaggaactactccatggttacaacggcgatcccgctgtgagtagctgatgagtcattcagtgcacatgtgtaacggttgggaactaaggatcgccgagtttcccatctgcgttggttcggtgacacaagtggtccgggtcatgaagacactgtctctttactgttagtagggtgcttttgcgggggttcgcaccaaccgtgcatcatctaccgatgtccaagctatttctcatctatcctgctgtgacgccaagctgttgttcggatcttgcaagtttttttccatcgtaaacttgtgcacctacgactggaaccaataatctggtggtgagtgaagtctcagcaatgtacgaagacatctttgcgaatgtggcacaacggtcgtacaggagccaatggcgctcaccgcatccagcaagcttgaagaatggctgcagccctttgaaaccatttatggcagcatagtgtatcctcatattcgccaaactgcgcatgaatggtgtgacatctggaattctgggaaggccttgtgccaagcgtctgccggagaccaaatattcctcaaatcccacacgctcatcaaagtgccgtgtgacgtggaacggcgtcatgggcaacaaacaacacagagtggttccagttcaccatgcctcaggacactttgtgggggttgtctcataccgacctgaaaagaagccggtggaccagattgcaccgcagtccgacggtcagttagaggtagttgtctcagttttgaagaatctaacaataacacaacatggaataccttagcatctttgtaagatggatcgtacgccagactgcctacacattttgacgcaaggtacttcagagtttaccatgtttactggggcgtttttcactctctgccgaatcgtgtcgggagcccttccccaccggaaagacagcactgtggcaaaggcctactcacgcagaattgcactgttttgcacacggatcatatatctcggataaaaaaacagcagcgccttcaacgtggaccgtccccgacttcatgcctttcgtaaagatttcttgcggtgtcaacaaccctcacgcagtatacagacagacatgttcaggcatggatccaaacttttcgcttagcgtccccctgaaacctataacggtacgaactggtgctttcttcggttttgtgtccatgcaacctatggagggggagcgccgaaaaacgtgtactgttggcaagcggttgcaactcgttttgcatgcatgcaggtgaagtagccagaaagaccagcaatgctgacgagactggatgcttgtcgttctcagtttgcttcactgtacgcaattatagacgtgatagatcccctccactttgccaaacacacgaaaaagcgttcagatgctgtaaaattgaaggctacagcacgtgttaccgccttgtgttcgtccgatgttaacctcccagcgagccagctgacgacgggaagtacgcagatttcttgatcgcaaacattgttccctgcctcccctttgtctgctgccttggaactggcaaataaggtgccgagcaatttatgtttcggcgccgcctgtgtatcctgtctcgtttttgtcttcactcctgcgtgtttcccgacctgcctcgattgtcttttgcagttgttctcgggtgacatgttgaaccgtcaacttccgggcgtctgtgcgcccactgtactttgaagccggatcgaactctgcaaaaacgtggccattgcctcccatccttagcaagatgaagcgccttggccgcacactcccacgtgaaacctagggttgacgcacatttcgttgcctgtctatggtggaaaccgtatccgagttgtagtgtagtgacgccatgtacgagagaatgaactccaacaggagaaacgaacaatccaaatcatggtggtagaagggacccgacaaggcacccctacagagagcccgcgaatcgccaagatctctgcactgtctggtaaccagcga

SEQ ID NO: 2881 - DNA, 2869 bp, Toxoplasma gondii
  source 1..2869: mol_type = genomic DNA
gaagatgagagaagcaaagaagagtcttcaaaaccggattccgaaatgcactcgcccctccacacgcgaggcgtctctctcgacgtcgtctacgtttccgatccctcccaagaggaggcgaaagcgaacaaagtgtgtcttgtctcgactgtctcctctgccgaggaccaccgggctgacagtggcgaccggaccttggaaggcagagaagaagacggagaacacggaggtgacggccaggaggcgcgagtctccgggaccgacggcggaaagaaggtggaatccgagagaggttctgttgccgtctccatctgtcaccctcgaaacgcggttgtctccccagggctcctcggagttatcgggtctccgccccgcagtcacgacgcgagtggcgcgggcggcgaggcggagcccgcagaggacgcatggcaggaaactctgcctgtcgtttcggacgaagacaaacgggacgctgagacgattcctgtgagcagcgactcggaggttgcgatcgaggacgaggcggaagagcgagcaggctctggcgacgaagccgtgctgctgctctcccgttcgccctcgctttctcccgcctctgctcggtcgtcctcgcctgcatgcagcttggctcgagccgcgccgaagtcgccgcgcggggacctggtgctctgtcaccagtgcaagagtttggtgccgctctcagaggtgcaggtacacctggacgagcacatggctgcgttcgttttcaaggaaactaatccgaagtgtttgccttcgacggcctcgcaggcggtcgcccaagtcgaggcgtcgcagagccagcgcgtgagggagcgcatgcgtcgagagcagcagctgctcgaggaagaaaatcagctgacgctcgacgcctttctccgtaggcaactcttcgcgaaaaagcggagagtcgatttttagagccaccagagatcccccccaaaaggcagaaaacgcttaggaaagtgtagatgcaggggccagaagggaacgctgtgggctgttagagaacaactggtttgtgttcagtccagcgcgaccttcagatgtccgaaaacagcagaggtgtagaaaggctcagagactgcgagtcgcaggtctcttggaggtctgcatacgccgatccgatttgagggaaggaacgaaattggtttgtcacttcaaacacagctacgaactgaaacagcggggggtctgctgcctcgcgcgaaccgtttcagattgtgcctcgtccagttttttcttcgaaatcgcttaaaggcagccggccggatgagacgacccagcttttctgtaaaaaaaacgcagtcaagttcctggaagagtaaccgcgaatttcgcaaaccgtactgttgtagagccaaaacgcgcgcgtggtcatgcgacgaccaccaaggacgcattttctagaaaacgatagcatataattggtagatgaaacgacgccagagcgttctgtagtgtggacacgagtcgccaaacaggaaatcttgtcaatgaaaaaccgtccgagtgttgatagtgacagtggacctaaatcccacggagaagtcataaagaacttggttgtctgtagtgattaagttacgttactggtctaccgtcgaattagcgcagaggatacccccgtcagatattgggtgtttcgagattcacaaaagaagaggatgcagcgagccttctgaggtttcgtagcgtgaacatttctgcaaaatagctcaggtcgcacgtatctttggtcgtcgtcaatttccgcgtgtcggttcctcactggtgtggaatcacgcgcctttacttgaggcgcttgtactcgtacagggtacatggaaataagatgcccttattttgtttccttctgtattaaagaacttgcaatatcagaatccttcaaacgatgcttcgaaatgggcaagaccgagctgcgaaacagtgcgaggggggttcactatccagtgtttttatgagatcgcttctccctccgtttcctatgcaaagtccgcactgagacgcttccgttccgcaaaacacacaagtgggcgcacgaccacagcttcctgcgggtttgagtcacagaaagtgatatcctcgtgagcggattcttcagcacgcacacacacttgcgtttcgaacccaggactctcgcgagcatttggctctctgtgaagtttgagattctgcatgttcttgcctttcccttgttatgttaagtgcatgtggagatatgcttcggtacgccgtgtcaaaccttgttcgctgatcaacttcctcgaaagaaaagtgaacgattgtaaacgcagggcagcacgcttctgaaagctcgattgagtcgttgagccgaggtccagagaagctgcagtcgcagtgtttctttggaagctggtttccagtgtttcttccagaatcgagcgacacttgagagtggccaaaaaatagaaacggatcagaacagtcaccaaaaagccggcatctcaaggcgcaagatggcttggtggtcggcacgttaacgagatggcactgcgtgtaaaaaccgatccttgtctgtaggaggaaagaccaattgcgggtcttgcttgttcgcccgcgtaggatacatcaaaacgtgtatgaggggattctgtctgttgaaagagaacgtaagctccaccccatgctctgtgtttttctcgagcttcggttacccctgacaagaacgcttcttctgatttttgtggcaaggcttgctcgcttcagtttctcgcttctacagggaataggctcaggaacaggtgctgacactttctcgagaatcctgtcgctgcaatttctgagttctacgattgttccagattcccaggttcctcttccaacaaaa

SEQ ID NO: 2882 - DNA, 1818 bp, Toxoplasma gondii
  source 1..1818: mol_type = genomic DNA
ttagaaatgggtcgagaatgaattttggatgtcagttccgcaggacgtattcgtgtttgcatagaagaaaataccgctgagtaatcacacatgtagccccaggttggtgacatgcatgtaacggagagtatgtgaggcccaagaagtctcagcgaaccagcagtcgcgctgtgcatgagatgcagtcgttctcacagccaccatccagtcgtctgattgacaaggcgtaggatttccgaatagaaaaccgaatgccaaggcagagcgagacttgcacatcttcgctgtctttgactcagaacggatccacccatggaacatgggacttcgcagcaaacaattcacatgggcctcagctttcactgctagggtcccagcacatccctccagtgaacgcagctcacaagcacaaaagagaacatgccctcttaactggttagatcactgaatgaaacactgagcatcttgccatacgtgccaggcatgtgtctcaacgcgaccagaaattcgaaggcggctatgtttggacaagtaccggaagacgatagcttacacatatgacgcgagaaacggaagagcaaccttattcgaaggtagttagacccggcaaacgcgtcaagtagtgtgtgggtatacaggctgcattcgttggccgtattcctgagaagcgggaagtatccggtaggtcgactgacctatttatgggatactgccaaattagaactagtaagaagacgtctccgtgcaaactatcggacaaccatgagcctttctcaaccgaacgtgtgtatgatctgtcgtgaacgtctgcaaggggggggggggttggggcacacggaagcaggggcagcggaaaggggattgcgaatgaaaggttgctaacgtgatgacagccattgaacaggagcattgtgacagtcagtgtactgttggctaggtcgtgactatctggtactcagcagcaagacgtgctagtgtggcggatgactgtctcccgctgagaggtttaccatgctttcacgctcagccgtcatcgctttgtgtacaaaggcaggcacgtacgcagggaaggcagacaaccatatgtctgctgagaaaaaaaaacctgcaagcctgtgaagacggcttcctgcggtagtttgctttttttgttggttttttttgccacacggtggagtgtccctattccacagaaatgtagcggcgttcccgggatgttgctccacggcacccatccaccgaaaagtttacttctgagaccctcgtattcggagtgcccttatctccctccagaagcctgtcatcgatacgctttccgctctgctgaaggagtggtttcaaaatgaaacgaattgttccaggggaaggagcagtacagtaaatgtggtgcatgcaattgtctttgttagtcgacgctgccagcgcgaccgcccctgtctcttcttgtgccagaccagacgcggttccgacatctgctgccaagtggacggcgcctccgccgtacagtgtcccgtatacctgcttttcggtggcacagcgccttcaagtgtcagcagtagtcgactatagtccagcaagtcggcggtgtaccgttcaagtttaggcggcaaatcgcattgtgttctgtgacgtctgtgggattatctcaattcgggtatttcctaacgaacaaccgttcggaacccagtgggtggcggtcgtggcatgcacatgccaacgcttgtttggggaggaaatatccgcggttcgggaatggtggagcagtgactttgactcctccaaatattgctctcaccttccttgagatttccgacacga

SEQ ID NO: 2883 - DNA, 2794 bp, Toxoplasma gondii
  source 1..2794: mol_type = genomic DNA
gaagcctgcgtgtcgagggcgtctgagcctcgaaaaagtgtgtctggggtcagcgtcgcgggtaacgaaaggaccgtgtggaggggtcaatcgcagatcactgaaactacaaagatgtggatctcagatcctttgtctctttctgggtgctgcgcgttgtgtacactttcttttgaatttgcggtctgaagcaaaagagagacaaggggtgagtcgccttcttctcttggggacgcgggagtgagacgcgtttgttctcgggtgcggcgcacccgacgactcttacgaaagttttcggtgaggaattgcgtttttgtgggaatcgtttcgatacttgtgcatgcgaaaggacgagtgagcagtctgtggaagagacccggatttctcaggcgctgctctcggttgcgaaaggaacgcacaaatcccgagttgggaggtcgaacggttgcaagtggaatttttccctagggtgatagaagtgtccatgtatgggtagaagtaaaggcgatctgctcttcttaaaaatactgaattggtgccgttgctacggttactgtcagtgtctgcaatcaagacatccagatgtttcgatttcatgtccttgtcacttcggggagaggacgttttcaatgtgattcccgcgacaggcggactgctcgtttatgccttcctgtcagaagagaggacagcctgacctttttttggtagcgatacccacgattctctcctttgaagaaacattgtatcttgtaaaaggcaactgcttttggaaggtccttgccgctgtcaatccaaagaggaaacgtgaattgtgacctcctaaaaagcaaacagccggctaatttagcattcgaaacctcaacactgcagtgacatctagatctgtcgatgtgcagccctctcgtttacggggctccctggacgcggcgtggttttctccgctgaaacaactgtctcatttcccgtgaaaatccgcacaaacgtcgcattcgtgacactcttgtttcaaggaccatgtttcctcctttcacgctttttgccagcactctttcaaatgcagagaactacgcgagaaatgcgctgtcgactgcagtgtgctcctccgaaagctgcacagcgctgcaaacagcgttaccctgcttcagttgaatctgtagctttacctccgaccagaatgtcgaggattgtttcacggaaagcgtgcagaaactaagccggggaagaaaaaaaggctgtttgttgggaggcgcgtactcaactgttgtcaggcgaggcttcctcagcagttatcttctgtgacacaccaggaagcctcaaggtcgagttgcccaaaatatctgacactgtttgcttcgtggtggtatttgtgacgtactccttcgcacttctcgatcaggtgcccccgtttcgtctgcagaatgaaaaggtcatctcctcatttattccctacgttgcctacacagagacgttgtgtacaggccttacttcttagaacatcagatcggaaaagctacattcaaactagtcactgaatatgccttcctggtagcttactacacagcatgggagcgaagataaaaacggtaaggtttaacacacagaataaacggaaactgaaagggcgttgtttttcctggaatgttgctcgcaccttctaaatgaagcacaggatttgcaagaaacgtccccatgtttgcttgcgtcactgcctctcttctgtctgccttgcaactttagttcgagcgaggcgtttgtcttttttctgtcgggtaaaaagtcgaacagccgagaatgccctgcgagacaaggtcggcgtgtgtgttggcgtccagcttgtctgcatgtgccacggaactcacgtcggcgattttttgacgaaaaagccgacgagcgaattgaaacatctcctcgtattggcacagatccccattcctgttttctttccgtcttttaggtggttttttcatggagaaaatccctctcctttgcacatttttcggtcgaaatgtggtgaggaccacctgcgctcgccaggccatctttcctgctgcagggacgaggttcctcctatctgtgtcgtttctttttggagggacctcgatacccctctttactttgtttttcttcttcccagcgaaggggagtctggtgtctccttatctgccctctctgcgcccacattcgcctccattccaccaccaggtacgcgctaccctctgcgtgagcttcgcggttatacacctgtcacacgcatgtgcagcggtaaagaatgaggttctctctgaggaggatgttccggttttcagcgaacgttgaaggcgctcaaaaagccagcacccaccgttctgcctgtggaaggcgtagggtaccgagcgttgagcggccagtgttctgttgagacacccgatgtcgaggacttcgttttccggatccaagttcgagtctgctttcgcgaccgcgtcgtgcttccagtcgagtttgttctgctctgtgagaaacatcggggtgcccccagaaagttgcctctacttcgccgagagttccgtggtccagccgtctcgcatatgcgcgctgctgagcacgcagctgtctactggaatcgatttgggtggtctctcgttggcaccgatgaagacacatgcagtcatcggaaaatacacaggacttcggaacatgcaacgggacaagttacagacaaatggttcctcacctgggcctgtggactcaagtaggtgccactggtcgccacagttgtttgactgaaatttactgtgcattctgctttccaccaaaa

SEQ ID NO: 2884 - DNA, 3444 bp, Toxoplasma gondii
  source 1..3444: mol_type = genomic DNA
gctgtgttatcacgatttgagcataagccaaagtacagcagccgtcgacgggacacggaagatatgtctctctttttcaatcatattcgttttgaatattagatgcgcgtgtatggacgtgaaaccgccgtagcgacgtgtattcgaacttgcatttgtcgatgtgtgattcgagaacgcgctacttctctcactgtcctccgttctccaggaagaattttttgtcaacacgtttcggaagaaaggacccgaagtcagatttgctttccacgcctctcgatatatgcatgttttcgtgccgtgtgagctgacgagaccgggcgaaacgtgtgcctgttgggcaaaaacggaatgactacgcgacttctgtgtctttttgctactcgacgctatcacccgaacaaccagagacatcaaggcaattgcagatgagaaaagaaaacgtagaggccggatataagcagtaacggcgtctcagtaggtcacacaacttgaggaacagcaccaacggtttctgtcgcctcgcagatcagtacaggagtcactttggattcaggttttgcagttgacatcgtttctaggttctgttgcacaggctccttgccgagcgagtgcccagatttttcgacttcacctgctcggtcgcttttcgtaacctctgagtacgcagaggtttgagaaacgagggcattttatgaccgttttcgtctgttgggcgtctactcaggtccacgcgtatgtctgctatgaaggactttcttaccctgttttttgtcaccttcccgttttctctggaccacaagctagagtatctcggagcagcagagtgcacacgaaggcggcacgtacagtggagatttttggtcaaatgccccgcaaataatgattcccgtgtttctggctgcttggctacacgacaccgcatagcgggtagagacgcacgagtttcatgtttccaccatttgagaagaggcctttctctcattccttggacagctaacgcctgagaaattcccatagcacctatattatccattgaactaccgcaacacttctcacgacgagcgcatgacattgttcatggggctcgagcgatacgtgtggctgttgttctggtggatcaactttgacgatgcaagactcagctttttcttgggcatagtttgaccgttttgcggaggcgctgcgatttcaggttttcttttacgttattgtagtagaatccaggactgactccggacagtggcttcaaaaggagttcttctacaagcgcgagacaaggattttcgttagaacgaacacgaactgagaaaaggggaaaggcctcgttcggcaacagagaagcatgtctcgcccggtccagccgctaatatgcaatcatccaagatctatttatcgtgggctcaatccaatgtcctgttgtatacgtactttgagatcatacggcgagccgtcctgtataaacgatcaccgatcgagacttccacaaacaaaaccgaataagcagggagacattctagtgcagagagtcctgaatttccaagtcatttatatcatagagaaaccagaatctctatgagaaaagtggtgcaccagtccaccggtgaaagcggctgaccgtacgttaacgtgcatccaagcagtagttgaacaagtgaaaatcttgttatacactcctcgattcatttgaatagaaatacacagaaatacggaagatgctactgcagcactgcttacccttctaagcagcggttcccgagatttcacattgctgcagaaagctgacatctgttggggttctttgaactttggcatggcggttgtgcagagacagtgcctacttacaatgtgataactacaacagatggcccagctatgatctttgtgttctttatacgaaggattccctagttctttggtttacatgaaaagtgaccgtgagcatatgagaatttgacatacgcttccagatgcgtgtccttgttcttgggtaaagacagacgaaaggaagacgccggcttgtgccctttcggatttcttcgtacgttctcgcgttgtggagaaagtcccgtggcttgtgttattctgacacctatcccgtattccgccccatgctcgacaagagtgtgagatgaaaagccctttatttacagttttttcttccttcttgtttgtgaaccaagacacttagcaccacagccgacagacagggacgtctccgcgcatttggccggaccaagaacagtaaaagtgtgtccttaccacagaatataactgacgcggactagccttaatgccgtgggatatttaaatgcagtacttctaccggtccttagcagtcccgtggagtgcttttggagtaccagcaatgaacatcttgttgcctgtctccggtgcgtcgaatttaaaagctttagggtacgctttcagtcctctctgcgcctttcctcctttcgacagggcgcgtgtcacgtcttcaaagcagaaaatcctccagttgcggacagaagtgacaaacatgacccaccttgcgggctgtagctgagcaaaaaggcatttcttccactgttttcagtcccgggtccgcctgacccgacagagacgcttccattttttcatatatttccatctccgccgaatcgacaatatttctgagacgaatgtccacatgggaaggggcaaagactacgcggtcttgtcgtttgcttccgaaagtgaactggaggggggggcagggttcccgaacgaagtgtacctgtttcagtgtgcctcgatttcgtgtcttaaactgtattccgccgagaaacccgccgttaagtcttctcaaacctcgtctctgacagcggtgtctcgtgtgaaaagcctgccacttcaacattttcgtcgcgtgcccccgcctttacacttttgcacgaaccgcccctgtggcattccctttcgggatatctcgtaaatgcgccgctggaaacacgttctacgtctctctgctgacttgcagactcatcgtggcgcccggcgcttggccttgtccagcttgcacctgcgaaggttattcagcgttttcgtgaaaaaactggggtgtggcgaagcacagcttttccgcgggcgcctccggtctggcgtagcgtcgctagctcgcttttgtgtgcatttttctggcggcccgtttcttgttttcctttttgtctttgaatccttccgaattcctttagtcgccgtgcatgtgtcgggggtccgcatttccgaggtcacttttttggccgttctaccaggatttgcgagttgtcgggtgtagttaggaaaggagcccctgtcgccagtgcaggcagttcgcttatctgactttttcctgtcttttcgcttcgccctttcctttttttcacccgcgactgtcccatctttgtttctttccggactttacgctcggttcatttcttcgcaaca

SEQ ID NO: 2885 - DNA, 2099 bp, Toxoplasma gondii
  source 1..2099: mol_type = genomic DNA
gaaacaaagttctctcccgcttctctcccgtgtatccggacctccgccgagtgcatctggagctctcggagagaggcctctcgcgggggagaagacagaagcgagccactcggagacggccgccatcttgcgtcgcaccagagacaagtatggcgagagcgaagaggagaagagacagagttgctgccctcgtgggaggtcctctcgtcgccagacctcgcggcgtgagtcggcagaggagacctccagggaagcgcagacagcgtgaggtgtctgtacacctgcaggccggcgttccggatgctgtgagtgagaggcgtcgccattgtatggggaagcccctctcgcaggaactggagcgtagccagctgttgacgacgaagaggcagaagagaaagcgacgcgaggcgctgacgtagcctggaggagaacttctggtgggactgcaaaggacaccacgaagcggaggaagttgaacagcgttctctcgatagaggaagcgaaaacgtcttctgttggttggttgtgaagcacaaagtggctgcgaggcggaaacggggggcaggcagacgcttctacgctgtgaggcgaagtagagcgtggaattccctcgagggggcaaggaaacgcggacgcagggttcgcgcccgcggaatactcgcgagttcgtctcgggtgtctagacacccggatgtggggctggcaatcgtcgggatcggtctctttcgctgaggctctcaaatttgcagctgaagagaagtgaggaacggaagttctttcgggagcgagacgagtctgagggacggccgggtgcctaagtgcggcgggacagaagtctgcttggtgcattttgcgcatcccaacagagaagtgcggctaatcccagctgacgtgcatgcacaccccagggcagcctccccgctggaagtaagaaaaactcatcctgcacaggtgggaagttcgtgttcaaggacctggggaaaggcacggaattggggcgctaaccaggtgatccccaccctacggggtgtacatacaccgcgagaaggcggatggaaagtgttcgcaggtgaaaaaatgatcaacagaacggaggagaagcgacagagaggaagaagtcgcgaaaacagtcgaaaaagggagaaaaacgcccaaaaatgtccccagcggagctcagcgacacacatgcgccactctccggcccaagagaaaatgtttcctcgggggtttgcgagatgaacgcatacacggagaaacaaacttgctttcagcactctccaatgaccaacgggcagctgcatacgttcagaaaagattttcttgaaacgctgcccacatacataaatatcgctgccctttatgcattctgcgctggccaaaaggaaagaaaaatcgcaggagacaccagccaaaagccaggttcgagtgcagctggaaacgcgtgaaaagtgtcaacggatccgtgcaagaaagtggagatttcccgaaaaggtgagatataaagtggaaaaaaatgcgagtctctttgggccgagcagccatttctttcgcccaggcggaggctcggtctcgcggcctcgtcaaggcgctgtctgctcaacagccgtctgcactatgaggttttcttttcgtgcatcttttcttcgcgcgtttactacacaaacaaaaaaaagccgtaaatattgaaactcaatatgtttctcgacctccttcatgccttcagtcgccgtgtgtttcgccctcttgccgtcgtttccgtcccgaccgcaaagtagtgacctttctccatagctcgtactacctttcgtgtacagagcctaaaaaaactacagaaaaacacatgtctaaacaatctttggcttccctccttcgcttagcgttactcgatctctcagccgcctccctgctctcctctcacatctgtgtatctgtactgttctttccttcgcgatagcagtccgagtccttccctttcctctcctcctctcgcctgacatactgccacggccccctcgttgcggactgtgtgtacaccgatatcggcctgcttcctctgctgactttttgagaactccgctttcttgtttccacgtccacga

SEQ ID NO: 2886 - DNA, 1575 bp, Toxoplasma gondii
  source 1..1575: mol_type = genomic DNA
aagacgaagcttcagaagaaagagctaccggtgaggaagacaatcgaggggaagataaggaagatgaaaaagatgaatcaggaggcgcgacagaagaagacaaagaagtcgaagatggcgacaagaaaggagacgctgtatgttgtcgagaactggggacgctccgagttttcccggtgatgcaagagtgtatttgcttgttccgatgagggtgtgtctcttctgaggatgaggacgcgctctgaggaggaaggccggaggaccatatggcttcttcgcttctctcctgcgcggcgactgcggcgaactggcgactcgaatgaaagcctgcagcttcgaatggacgcaagcttcctggaagaagctgtgtttcttcgtcttcgtcatcttcactttcgtcttcaacctcttggtgcacccagcaaacttgcaggccgtccattgcttcaggctctccgcggagccgagaaaagagagaaaaggcgaggaatagcgaggaagagagagaacggacctggagcagacagaggggggtcggaaggccggaggtaagacgaggaagaaggaatgacgaaggacgcttggaaaactccaaagaagaagatgaaagggaaaggaacggaggacgaaggcgaagacgatggaggcaagacagaagaaaatgacacaaaaacaagccgctggagaagaaccgtttgaagggaacggatggccgcgagcgtctcacgcgactttgggtgctagggagtgaagcaaggcgaggagaaggaggtttttaccatcggctttctccagaggtccctgttgaccgcttcggcagcgtctctctgcaaccgaaagccacaaaaaggaagacgcgcccggcgaacgaggtcttctgcggagagtgagagtccggatggacccagccgaggcgctcgagttctcgtctgttgctcagaaaaagaggaaagcttcgatcccaaaaacagaagaaaaatgacaagacaaagaagcaacgctgtcgccgagcacgcgccggccagcgtcgagaggggggtgggcatgtcgcttttttgcgaagcgaacgcatgcacaaaaaggaaaacactcggggctcgatggagaaaatcgaagcttttcgccagttctcttcttccttttcttcttcttcaacgatcgccgtgatttcctttctctctcgcgtctgccattttttctgatttctcgctcttttccgccgttctccctgacttttctctctccgcgttgttgcccgacacagacgttctcaaccgcgcctacggtgtgaaaacagaagacacctcgatgtttcctgtccgaaaaaaccgttggttttctttcaccctcttcgttctgccttcccgtcttcatagggaaccgtcgccgagtctgtcgtcctagaatgcgccgtgtttttttctcaagggagttcggcgaaaccgcatgcattcggcggtggacccgggtggctggtcgtcgcactcaagtccgaggggaaattcaagtttgaacgttttcctcgccggacgctgcctctttccttcgctctttgaccttttctcgtcttcttca

SEQ ID NO: 2887 - DNA, 4375 bp, Toxoplasma gondii
  source 1..4375: mol_type = genomic DNA
gatttctccgcatatctttcgcgccgttgacatgtctcgttgtttctgacgcaagtattgtttccttcgtcgcgcggtcgcgccgttggaggcgctgtgagagaagaggaaggcgccggggagacgacttgcgcagagaccgaaggatgctgcggatcgatcgaagcaagcatgcgcgtgggttcgactgcgcgtttctctctccgagagtctcctgcgtccactccgacgcgcaagacctccctttcctcctcttcgtgaggcttctcggctgcaaacaaagaggccgcagacaccggcagtggccggcctgcctcgtcgcgtttcaggtggaccttcacctggccgccgttgcccgactctttctcgaccggtgtgggggcgacgcctgacgacacttgggccgcagcgggagatcccggcgaaggctccagctgcacaacaggagagacaaacgtcgcaacgcgactggaaggaaaccagcaacctctacaccttctccggcgaagggagaaaggccagtgtcgacagatcttcgaggaacagagggaggtagaaatccctcctcaggtagggaggaagcagagatctgtagattatcggcggcgggggagagacatctacagatttctagtgaagaaaagacatcgctacagcacattatcgagagggttgccggacatctatgtattttctcacaaagaacaaatgctgtgcttctttttgcaggaaagaccgaggtaaatatgaaggaagcaggtgtcggaagaagagaagcggacagctggagacgaagaagaggagaaaaggagagaaaaaaacagaagagacacactggagcagggacagagacaacggaagaaggggacagagagatggaggagaggaagtagaggagaggaagtggagtccagaacgggagaaggctggagaaaaaaacgacacggagagaagagaccagcgtgagggcttgcgtttggggagacatcacacaaaggacgagagacgcgtcatacccacagcaaaaagaagaacgacgctccactttatgtctccttccgacagaagcgatgaagacaggaaaaagctgcagcgtgtacataccgagatggccgacgttagggagagctgtcgaggcgaagcgaagagagagaagagcaggaagaggagagagaggcgagaaaagagagaagacgttgtgcagaaagaggaggaaacctccttcagggatccccgtccattgggagcccccacggggtccggtctgcaactgtcaggcgccatggagacagagacaggggaggagagcgactcgacgacggcctgaaaatttggagggagagaaagacgaagagagaaagacgacgcgaggaaagaaaataaacgcgttcagacgaggaaaagcggaagacaagcgacgtcgcggacgcgccgcaaacagtcgttgacggatgtctctcctctgctgcagtgcgggcaaaaatccgaactcgccgaagagaaaaagcgccaaagggggattttcaggtggacatacgacattccatccacggcgctcgccaggggcacacatacacaaagacgccgaggaaaactttctcgacttttggcaagcaggcaacaaaaagctggcgagagaagtgaagacgaaagtcgatcctttccccccgtctctctctcttatgccgccagtggtgtctctgcgggaagcgagcgcggaactctcgaggacggctcgtcgactctcgcggcgggattcccccattcgcgcgcaaaggagcggggaaatggcaatcggctctgattttgcggaaacgttgtcttttcaggaccttttcagtgcgttggagggcaagtggaagaaacggggaggagcgtgactggcgaaaagtgcgtctaccgagaaacagccgttgctttgaaacacaaatcgagacgaggctcgtaccgcggttttagggaagagaagcgcgagcgccgagacgactccgtttcgcaggaaagaagggcagctgaacttgtgagtgcaggtgaaacatggaccgtgtctcatccttttgagccggacttctgtctgtctctgtcccgacgaaatggactgacgcactgttcgtcgcactcgtcgacgagacgacgaagaaaaactcacgactgtttatcgacctcctctggtgcgtgtacacggaggacatcgcgtcggcgaccggacggttgacgcgcttttgtgcagatgtcgactgtttctggtcgacgtagaaggcgagagagaccgttcactccacgttaagcgcggtatcaacacctgcagagttgttagaaccatttaaatgcaagtcgagaagatcctggaactgctcgcacaggcggcgcgagaaagggacgtctctcagaaggaggcagggaagaagagtcccctggagaggcaacgagacgaggagagtcaacttaccaaaagcgaagaacgttcgagtgagcagggcgactctgtcggagtcggcaagctccaaatttcaagcggatcacctgtgaggcggctattcgggaagccagacgctacgagacctcacacccgctacgggctgctggcctctctcccatcgaagacacctcgtttatgtaaacaagttgcctgtctgcgttcgttcgtttctcttcgctttcctcgtaccgacgcttcgagccgcactacgcatctagaactacgcaaatgtgtagggtgtctcgttggcagacgtaaacaaaacagacggagggcacacaggaaaagcatgcgacgcccattctgtgtgacgccagtcgttctttgtggtgacttcgcacccctcttcggactcttcggactgctgaagacagccacaggcgttggatttcgagcgtcttcgtcaccaatgatacctgacacagacagagtaccaccgctgaggcagtgaatgtggtttcggcttgagatggaacgaagtcccgcaagcgtgtgagttatgacctctcctcttcagaacatttgtgacagaccagacagaaaaaccccctttcaccacgatatccagcacagagtggcccaagaagaggcaaggagtctagaaaatatgcttggaaataaagtcaagtgcgtgttgcggagcagaccagctcgaggctgtgtactccatctgcacaatggtcatgccggccacgctagcctgtgatgaaaagccgattgctcgcggaggaaataaacagaaatctgctcttggtggagaaggaatcgacagaaacatcggcgccgacctgcggttctctgctggccggttttctgtgtgctcggtcgcgacgctttcttcatgaaatctacccatcgtgtccgcgtttctttgtctctctgagcgaagcgcggggaaaacaaacttcgaaagttcagtggaaaatccagaaacagcaaaagctgcaggccttggaaaatcgacttccccccctcctccggtcgagtctccctgcgtcctccgctcacgcatgtgtgctgtcgctgctcccgtagtccgagtcgcatatctcccgcgcgttgtttctgtgcttcccttcgaaattccttctgaactgactcccgcgcagcagagaatgtgctcctgacatgaaactctcactgtggctgtgcaggcctgcctccccaggagaagccgcggtttcgcgtggaacttcgcgtcttgctgtccaacgcgaaaacgcggtcctgccctgcgttttcgcccgtttcgacaactcatttttctttctcagacactccgcaaagttttccgcacacttcttcgccgcagggagctgcgctttgcctagaagctcgatcttttcgcgagctgcgcgggcgccattcgcgcagacctgaggcggcaagacaagcgttgcgcgacgtccgccgagcgccttcacgggaaggaggctgcggagaaagtagattacgcactgcatcgctcgcgaagagacgttcactttcaaaggcgttacaagggcgatttgcaccgcaaatcaagacagcggaaccgtcgcatgcgcgaccaagttgccggtgtgtgaggtgtacagacaccgcagtgtcaacggagtcaccgagttccaggatcatggcggtcgccgggaccgcagttctccagagtctcgagaaaagagacttttctctgacggaactcgaagaatggaaggccgtcgtgtctgttccttcttccgtttcgctccgtgcaaactgtttttttcgccttccagctgggaactccttcatcggaccggcgcgaacgtcgatcctcgaaagccctccagcgcgctgctgaaacaaaccaccgacagagaggggtgaagaccgacgaaccagcaacgcagcaaagcaggaaagcggccgacgtagaca

SEQ ID NO: 2888 - DNA, 3834 bp, Toxoplasma gondii
  source 1..3834: mol_type = genomic DNA
tgttttgcagctgtcagtgcacacggataaggaaaaggcactctggccgccggcgaacccctgcagtccccaaggtatgcaacctgcacattcagatattgctcgtaccgcatctggagggtttcttacacagggaaaggggaaatgcaaggcccgtaccttcggcagttgtgcagaagtgctggttcattgctgcagggaagcgccgcgagctttcagaggttggacgagaaagtcgagaaacgaaagtgggcgcgcctgttgccgcatctgtaagttgttgagcgtagtagtgaacggaaatgtcaacttcagttgtggaatccaacaagaaggagacaaatagacggtcggggtaggaggggtcctgcacgcgaacacagcaacatctgcaatcgagaacggcttcagcggcaaaaactacgaccaaaacaacattccttgggcctcggttatgtatcgcccgtagacgttcgtctagatagctgtgcaaaagaaaattcagggaaaatcaaaaagctacgtcaacggagaattcatggatagctctggagtgccaacctctcaacaccgccggcttagtcttgcattccttctctggggacatgtattcgagtctcgaattcatgcaaaaacagggcgggcagaggcctgccattactgaaacagtacatgaaggaattgaggccggttccctgagacgtgcattggtctgtcggattcgtcgagacccgacagagtatactgccatgcaagaatgtctctgtatacacatgtacatatattttcgagaagtcactgggtggccaccggccacctgcgcaatatagaatagaaacctgcagcggttttgttccccctcgcgtacgtggaagcattttagggagtgcttgtgcaagttgactgggttcttgaccacgcaagtctgctgtacactgagccgcggaacagcttccggattcggtacaggaacttcactttgcgggtcgaatcgagggtctgttggctgctgaagaggaacgttggaagttccagctcggccccccacgttcggattctggctggcaggaatgaaaacaacctgctgagggccgtaactcagtcggctagagggctcttgccggtcccggctgactcctccacccatcgcgagggcgattctggggaatgacgcaggagggagaaaaaccaggttggagcacccgaagtggacgaaattgtcaaaatatcagtaaaaaaaaggaaacaaaaggacccgcttaccttccgcttacgaaaacaaaagaaattaccggagaccggcaagacaacgaaggcaacagctacaactactcgcttcgttccagagaccttgaaaattccgtgcaattctctgtttaggaacagtcgtgtctcgtgcaaaagcggaaagctgagactgtctattgtgtcttgccgccaacactttttggtgttcactattttagagagcgaagaatattctccgggggaagaggtgatgcaggaaaaaaatcgaatcacgcacaaggtaaatgcatgacgtcagtgcgagttgtcgcagcgcacatcggagggcgagacggtaaagaagccgccgcgagtttgctactttctttcactgttgaaaagaaaccgattagtcgtgttgttttctttaggttggttgtcttcgttctccgtatgtgccaagacattaaaaatagagagagagaaacgccccttgaaacctttcgtcacacgcatgtgcaaaaggctcctttccttgaatgttttgacaattcccattcaaagtacccatgctggacaacacaggcgttctggtgtccttgaatgttttgacaattcccattcaaagtacccatgctggacaacacaggcgttctggtggttcccgggtacgctgtattctggcagtcccactcccggcagaatgaatacgaaagtggcgtctggtctgcgtgatggaaatccccctgttcgcatcagtgtccagtggactaagaaaacaaaacccgtgaaagtgaaaagtcagaagctccttaccgcaggtaatgctcggcaaggggtcctgtacgtcatcacagtgaaccgtaccccatcacaactccgaaactatctgtaggaatgatccaacggtgtttctgtacacacatatcggccgtctgtttgaaagcaggatgagcagaggtagtagagatactcccatccaccggtagttttgagagcgggagcaatgcaatgccacaaaccgtcctttgcatcgttgagtttcagaaatgacaagaaaacagtgagatggccaaaaatgcagtaaaagtgtacagcgcggtattttgggagagcgaaggctcgtttgttcgttggcaggccgaatcaaggaagttactcgctagcagaacggtgttgacaagggtaaaccgatcacgtatcagagcgcctacttttcttctgtgtgccacatttcccagtcctggatttctgtgggggaacttccagccacgtaacgtgattagcttctcatttgccccctacgtcaaggacggacatcgagaaacttctgcgcccctattcctagagaaggttctaacgctgcagacggagtaaatatgcgtacggctattcacccctttcagataccacagcagcaagaaaggacatacttctcggttccctgtagtcttaaaaaaaccgagcatctccagcacggcgttccagtgaagaatctctggaagcgactttctggatacaattctatgggtgtaacatggaaagtgagaaacgatttctatgaatttcgcttgcagacacaccgctcccactccatcaacctgatatgtagaaaaactggaacccattgatgaagaatacgcgttctcatgttgcgtgtgtaacctgctaacggctggatagtacgactgtccgctgacacgttgcctcagccttgtctagtgcccaaaaagttctacccgattttttttttcgcgactaatggccgataaattccttcgtatgcttcacattccactcgtcactcttgcagggcaacgtcttcgacggttcgcacttctgagaagtattctctacggccattcgtaccccctgtgaaagggcagcctgccgcttgttggaccactatttgtcgggagcatagccgagcgcgaccgaacggagacagacgcaaccatcccgaacaatggctaggagcaaagatagagccatgtagagagcataacacattcaaaatccactgctccagacagactgggttcttaattttggtgaagtggatggcccatacacgcagacacaagacagacttccctggaatacacatgcgtatgttcagggcgcgttttacgtggaacgaaatcaggacagtgatcgtgaactgcacgccctgacccgcaggctaccgcagtcaaaaccattttgagaaacggttggttctgctagaacggtttttggataccgaaggtctcctccgttgttttgcttctcgccgcattcgcacggaccggttctgactctgtactacacgcagtcgcgtgacacggggtgaccgcgaagcctcatgcagcacgcagattttcttgcatgcgccatgtctagggctggttggtcagaaactctcagactgctacttctcttcagaaagatgtaaccaggaggtgttaacactctcacacccttgaagtgtaactgttttctttgcgtccagctcgggtgtcctgccactcttcaggacgagtttttgcggctgcgtattgcgcgaccaggtcaagccattggctttgtctttcataaattctgagtcacttttccccttagtcataa

SEQ ID NO: 2889 - DNA, 3623 bp, Toxoplasma gondii
  source 1..3623: mol_type = genomic DNA
tctcctatgacaggtatcttttcggccctaactgcgtgcggctaaccctctgtctgcgtttctgtgagtcgctccatcaccttcctgcaaaggcgcatctcgcgcgtcagagagtcgtaagttctgtttgttttcggaccgtatataataccgcccgcgttgccgcattctcccctgtcttctgggcttacccgttgctgtcgtgaaggccccctcgtttaccgcttgctcgacgcgcagatgtacctttcttcgactccctctgctctgattcgtgtctcttttctccggctatttctctttctccttttcggcctcaatctccgatagacagctgaacgtcactccacctggggttcttggcgtccttcatcacatcgctacacacagattcaaaagtggttgataaattcatatttaaatatacatgcgtggatgctggaccactccacacttcgtagcctaaacgtgtatacgcatatgcttttaaggatcgaaatggagagatctgtacttcgtacattgccagacaccgccctgagctgcgtagagtaaatctgcacatatatggtgcaaatgatcatgtttcgtcggccagccttacgcaagaattaggggatacaaatcctcttggttccagaagcttacacaattgtaagccaagcacaactccattgagtggtgtacagtttctcatacaggcgttgacaatcgcgtctctcgaacccgctatcagtcgtttaaactctttcacccgatcttgtgaatggacaatagctggcgctcatttttctcctctttcccatacacaaatttgacgcgtcgtagtcttcttgttctcgcgtgaatgatgccacgcacgatacgagtgttacactagaactaatgctcacttggtattttccttgaactctctgtactggtatattttccgctaggcacacgcgtcttttggcatctacatgacaagagccacttctaagtgaaccatgcttttgaataaaggtactttcgggtctagttgacattttcccgcagggtgtattgcagagatttcctgctgtgcatgactgaaatggatggcgagtcgacgctacatggccgcatagcgaatctcgttttgaaaaaggtttcagtgtcggattttcctctgttgcttgtatgtggacatcaatttgctcctgaggagtaacgaaccgtaaaaatatccggaagacggacagacaactcaaaaaaggaacagaaccccagagcaacactctagaagatacagccgcgatctgccgtttgtcccttaggtatcccttatggtcgtgaaccaccaactagaaaaatggctgaaaggactttattgaaaaagatggaagaatggtctttagtgttttgctcttctgcgcatttgacacagttcgacagcagggagttgccagcggttccgggtctgtattgtttcgcacgctcccagttgcacaaaaaagtgtagggaggcgactaaggaaaggcattcttctgtagactcaacgcctttttcatacgcttaagatgctttatgcaagtaggtaaatctcaacagaacacggcttgtgccttcctgtctgtttatttttgaagttcgtagttggctgtattagaacgggacaaaaaacagatcgatacgtaaagacgacatatcccgccattccgcttcatgcattgtatctcaatttgtctcgtttgcactgacgaagatccgagatcagtcttttatcgtcaacgtcgtcattcagaaaacaggtgagatctctgttttcttctgtaccttccagattgcgcccagtctgctgtctcgcgtgcagtgcggtgccgccggatcttgcccatcgattctactctgtctcttccggccacagtttcctcttttttctcccatgtcttctgtggtttgcaattcaacttgctgaataatataacaggtgcgtcttcttccgctaagcattgctcaccaaaaccgatatttccaaacgctgtctccggtggtggaccttgtggatagaaagcacgctgagagcgatttgacttttttgctattcaacttcctcattttcttcgcattttgctctgtctgcatcgcctgttatcaaaaaacatcaatatgtgcgtggatgctacgtgtgcgatgccgccagcgctatcgatctaccagcgccgcaaacacttttgtggcttctgtcgccttttcattcttttttgaggtgaaaaagacggtgcgtgtctgaaggtcattctcttttgttccacagtgtcatttgcgtacaaggaactggctcgttttcgatttcagtgtcctgctgctcgttttgactctagaaaacgctagagaaagcttttcccgttcttctcatgcacctcgtttctttgtggtaagtttcgcttttgcttcctctctcctctctgctgttgacttaaaagttccgattggcaatcgcatgagaacgttggttcacctgtttctagctactgtttttcctgtcttttgtacacagtctgaacggctctaccgctaccgagcgagtgtatctttcgaacattttacctctttttcctcgctttcctgttgactttgcttttcgattcgcgtgttgactctctgatgcatttccttcagtttgttgtttggagggaggctagaagtgccctgtttggggggacaaaggagacagtcagatctcggtaggtttcacgcgaagtacgtaaacgactctgagggtagacttgtgtggaccctttcgcggtgcacatggaaatgccgacatggctctgagataccatcctgcgcgcgaccttgtatttgactctcacttgctgtctgtcttcttcactgcaacgtgttttctgccgttttcccacatgtttcccttccgattctgtccagagaatcctctggcgtcaaaggtttcgcttgttcctttaaagattctggaggggaaaaaggtggaaaagagaggctgaagacttcgagagaggcggaacgttttgaagcttgagcccaccccgagtaaacaccttagtttgacattttctttcgtggtcttttttctcagattttttctgcccttccctcaactgtttgattctttggtatcttatccaccgtttgcggttttgccttctctccgtgtctgtgtcgatggagaacacaggagggaagtcagcctccggagggacagtatacagttgtgctgaccgctctgacacatgtcgagatcgatatattcgtctctcgatgtcgccgtctcttcgtctgctgcctgttttctgtctgcatctttagtctctttaggtgtgcctctcccctcatcttctctctctgttccgttttccagtctatcctgcctcagcgttttcttcgcagtccaacatttcttctcatttctcttcgttttgtccgtctatttctttcacggtttcgcgcgcgccagcgatgaagtcgagtgtcaatagagagcgaaagacagaaccgagactgcgtgcggcggcgttagcagttgacaattcgagctactctcgcgatgcaaagaaaaaccagcaaggctgcgcgggtccgaatcgagagaaggcggagagaaacttgggtcgacagccga

SEQ ID NO: 2890 - DNA, 3297 bp, Toxoplasma gondii
  source 1..3297: mol_type = genomic DNA
gagagaaaacgactactcatatactagtattatcactaccatcgcactggcagtaatcatctgagattgaatagaagacgtgcaagaatcgagtcgcttcttcacctatcactaccatcgcactggcagtaatcatctgagattgaatagaagacgtgcaagaatcgagtcgcttcttcacctacacaggctctgagggtgtgagtcttacctcgctcttcgctcaatgcagatgtcagtggtagttatcttcatgtctttatcactgcctcagtcttcgcaactagagaacgtcgcgcgagagaccacttaggcgcgaattgtacagaacttcttgttactctaaaaagatgctgacaatgttgcgtttgtccataaaagtatactgtagtgcgggtcaccaccattactcagctgagatcggtgccatcctgcaacccatagaaatgctcgagaaatactttgactcctccagttcctaaggaaaagccttgtcttccaccagttctgtcattctcaggcgcgtccgaaaaacatggaactgcgtgccgtgggattgaattcctgtgaaagccactttttgtgttccacgtgcagcaacatagtcctccgtcgatgatttttgggacgcgtactgggacacacagacttcgaattttcattgctgcaattccgttattcgaagctcatgaagaatccaactgcagaggcttacgatttcccgttttttcctggagctagtgtcacctttgcttaatttttcgctcgtcataactggaacgaccctcaacctcggcattgtggaatcatgatgttcatctatgccattactctcctcttgtgacctgaagagaagactgccggcttttggaatatcatgctcagaaatgcatgcgttttgcttatcatgcggctccgacttttagatcgtgacaattttcagttctttcacgaagtcccaaagctgccacaaaaaagcgatgctgggaaaaggccggtggagcagccgtctgaaccttttgctatcagtggtggctgcttgctgccgctgctgttttccacacgctaagccttgcacaagccatgagaagcaccaagcatcgcctggaaaaactgctacaccagcatgtttcttcttggtggagtcgtctcgcgaattaccaggtgttcattacttttacgcgctcctagagaagcatggactctccttcgctttcaattgctgcccattcctcaggaatattctctccagataaatgcacgccactttctagctcggcagttcatctgctaagatgccgtaagagccaaaacggaacgacatacgttctacttattgctggaaatccctcattacagcagtttccgggatgcttgagatgctttgacagcaaagggaagcgtttatggaataccgtaagttctgcgtacggctgcagtgcctccaatacatcagtttccaggataatctgctggagctgtacgatccgacgctaacgtggttcaacgacgtccttattccgctcgtttctttgcggttttggaatcgctgcgcagcctatatatgctaagcagttcggccggccctttgagcagtctctcaaaccagtttatttctgagaggtaacggacagcaagccagtgcttgcacaaacacttctgcgacctccagatccagggttttgtccaggaggtgcggacgaggcgcgaagagcatgttgacgctccttcgacaattggttttgcgagcctctctgtccgcagcggtacagggagctggaaaagggtttcactctgcattcgtagtggtgcggtcacgggaaatgtctggggggaatactcgagtctgtcgtctggtgctgcacgaggtcacgcggcacgaggaagactgctgattctagagtttgtctcccatcctacgccaataaggttgttccacatcggctgtgctctaaaagtaacacatgcatttctgttacaactcgtgtttatcttgctgctcacatacaagcagggtttctcgaggtgcgtgtttcattctcttttcttttcgtagaaacacgtcatctgactgtgtgtgttgaaagtgtacggagcgtcaatggatggagcaagcttgtttccccgcgccggtcctccgttcacacttgatcttagctggtactcgagcagcctgcctccgttttcactgggcaaagaagcgcattcgtggaggtcggttccgtccgttttgcgcgcgtgatcaccctccttggctttcccgaactccacctttggacttctgtcactgccaagctgacagcagctgccttcgtctttaccatttgttcctcgtctgtctcgcttcacgttccgtctttagttcgcgtcgttttctccccggttctttttctgtgggggattcctgcgaatagggtgtccccggccgcctctgcttctgtgtgccgtggccgctgctccagttggtacctcgtcctttcgccgcctccgaagttagcgcagtttgacagacaagctgttttgtgatgttcttgccaaaactgttcgtttcttttcttccctttgcgtcaagttccgtcgcagacccgttgcatgctactcgcgacgtgccgggtttaatgctctgaacgccgctgtgcgatacgcagtttttgccgtgctgacttgtgttctttccgctccacactatcattcatttttttcaaaagtaccttccgaattcccaccgtttaaccacagctacttaagtccacaatcccccaggagctgccgagtcccgcgccttcagtaactcacacgatgtgcaggcagtccacatagctttcggaagcctggtgacgactttctgtctttctgtccaaaaaacacgcatgcttgatctgtgcccatatttcccctcgtctggacagccgttcattctttttttgccgcggctcgaccgcttccatgcttctgctgctgcaccgctcactggaaaagactcgttcgggagagccagtggttgtgtcccgacttcctgttgcatgttcaaagggtaagcgttctagaaacctccccgtcgccaggatccttttgtgttgttcttggtgttttccgcgactccccgtccgttgcagtcatactcgcgctcatcctcgctcgcgatttgcatggtaaactaaacaaaccacctcggcggggaacgacggtttccctggctcagaccaaggcaggagcctgttgaaggaatttgagggtagagagaaggatgaaaagatttgcgcctgtgaccgcgtgaagaatttctcaatctcaaga

SEQ ID NO: 2891 - DNA, 1842 bp, Toxoplasma gondii
  source 1..1842: mol_type = genomic DNA
gacctcaccgattgtgtttatggttaaaaatgcgtatatcgtgtgctgcacatggggatggaggctgttccgtaaacgaggcacttgtgatctcctttcctgctgaaaggatgatctttctggcaaaggtgtcctctcaaacgctgagcgatgcaggtttttggttggaaccgctttgtacgtgttctctgtaattgttttaaacagctcttaaaagcggatttgtaggcttaaacggctgaggaggactcgtcttgcgcttaatggacacaagtatacattaggcaatagcacacagccaaatcgtagctacgggacgttaaaaattttttggtagatcacaactattcagcgcagctgagctgaaagcaggtgtagcgcacacggcacccactgtagaaaaggggaaacggacatcaacgatcattttcctaaccctggtagacaggctggggtgactaatctatcggctggacattgcatccgttgacaaggaaatgctttcttggaaaacggctgaagcatcatgacagatgctctcaaaatactgttgacattttggaaacagcctttgtactcaggagcattcttggcggttatggaacagggagcttcgccggtggatcccacagttgaagttgggcgtgttcttccgaaactgcacacatgcataatgttgcttttgtctctccaccgtagtttagggtgttgcgtcttcccacccgggactgaatgcgcacccacgttagtcaaacagtagttgaaggtttgcgttacttgtccagcgaccttgcaggtgtcacagcctcaggttcgccacagtgaaaaatggtgttctaacttacagaggataacgccctcatcttagaccacttcagcagcacctaaacagtgacccctgtgtttcttatgtgggcgctggcctacaacaagggagcgttttttgaagattgatttgagtttttgattcttctctccagcaaatagttcacgaaaaaggttaacgcgtggtgcttggggtgtgctcacaacatgttcaagtttcaaaagttataaattaagtctgcttcacagcatcacgccaccgcatggtgcttgtaggcaccagtattaacgaggtgcagcgtcatgcacctttgttttgagtaggcttcagcgcggttgcttctgctgatcgaaggaaaaacatcccgggaacagctgcccagagtttaagcgcaagctgcatgcgcaattcccgccgcgaaaggtgtcgtagagaagaagccttatccttttcctcttttcgaaggagtgagacacctagtggatgcgtttgattcatgccataactgaacctgttttttccgagtacgtctgacagtaacttctctcttctcggtagtatttgtaccatgctgtctgctttcggcttgatcaacaggtaggctattgtttcaagaggaatagagagagcgactgtgactatgtgtgtttgcattttatctgaagggtatccttttggcatcttcctcccactcagagacagacataatgctgttgctgaaaagtaggtcttcgccagcagtcctcagttgaactgagcaatttgtgtcggttgcctatttttcgcttattcttcaagtgttgccgaatcgctgacaatttcgacagatttttttctgttgtagaagacgtgtgttgaaagactcagcactctgttaaagctggactggcaccactactcagtcccctcgtcatagttgtccgtcagccacagaaaacgaggtgcgcaagcctagaccagctttgcggtttgttgcctgtaagtacaaagcgcatcgcacaaaacagacacaaaca

SEQ ID NO: 2892 - DNA, 2484 bp, Toxoplasma gondii
  source 1..2484: mol_type = genomic DNA
atttgtacaaacgactcctgaaaaaggtgtaaggcgaccgactcgcaaaatggtctcggtggcatgtttacctgttcttcatcatcatgttccgcgtctgaatcttcggtcggttctcctgccatttctttctctgttttttcttcctctttctgcacatgtcttttgctttaacagcgagctgcttcctcgcacctctgaaaatgtaacgcacctctagggcttcctcatcatctctcagtttttctagtttctcctcaacgccctacgcgaaactgtatccagtgtcaccacagtttttggtttttgggtgctactcacctcacacttagaagtggataatggtggcttgccgcactctgtgttcagctgcacaatgtgacgctctcatcctgaggaattcacagaccaaacttgtgttgctcccacctccgtagatgattcgacgtcagaaggcttcccgacatcgagtctgccctgaatgaaaagtggtagtgttgaaggcgatgagttctcataggttcttactgctgctaaagaagaaccatgcggttttttatctgcgaatatctgccatgaccagactagtgatatcctatgacggcacgaaattctgtacctgctccggctttcaggtcgccatgcgaggaatggaagccagtcaaggcagcttccgcgtccgtaattgcccgctaaatatgtttgtacaacctgccttgctctagaaatgatgcatcatactcacgctggccttctgttgttcttccgcaaaaacttctgccccggattcagcctcttgctcgtcaatcttcttctgaagctccagttcggctgggcagaaaataggttttgcggttgcgctgagcaagcattacaaatcacctttggcatctttctcaatcatttttgtttccttcactgcaaacgacagttagacgttagtcgacgagtacccggtgcttagtccctacttgtgtcggttcgaatctgatccttctgctgagcttcatctatcttcatctgtgctatgaaagctttgtccgctgcccttttctcacggtcctacaaatgggtgtgacttttgggcatgacatcctcaactgagcataaaacacgggcgtacggccttcatttcacgttcttcctcaatacgttctaactcttcgtcttctgcctctagtttagcttgacgctgcaccgtctcctgttgaggaaaataggcttatggactgcagaagtgcccctcagttccaagctcaccacatcttcctcatgggagagtgcactatcagtctcagcttcttccgatgcgtgaagactcgtctctgattctgtatcaggtggcccttcgcgttgaaaagcagatgccctgccgttcacttttgacagcagcttgtcgattggaacggcgtaaagattagaggtggctgacgccatcccgacaatgaaaaccactactcttgagaagtgcatttctatgaccagtgatgtctctcactgagacccaactataaagtacatcgcactgcttaacgccacgttggatttgtggcaccggaacaatcttgtgttgatcctagctgtgcagaactgcggtgtagtgacactccacgccccactgttactagatcgtgcaagtcactttcagtccctctcctccgaagactttatgtaaagcagtaccctcccgcacttttatactccacctgtcagtaagcgttctaatgtgctgagacacttccatcatgggtctttcatcagcaatcgtgcacgggccgcaggagttgtgtgtctgcaatagtgctcgccgctcggccgggttcagccgtgtcgaggtaacgacgccatggctgtagcatggagttaagtttaaaatggcatcagctctagtggtggcaggtcataatatttttttatctgttggttcgtccatagatgagagctcctgtttgtgctacattctaccgagttgtgtctgctgaccagaagcgcgtcgctttttgcctcattctataaaaatcgcccgacatacgagcagagggaaccctagctgcactcctggactggcccagcttttcctgcctcatttatgccgccttgattgagcgtttgcttaactttgtctttgcatcgattgtcatacttgcccaatgtctgaaatcttccatcggtgttctcccagctcatacagtttcccacggctcaactgctgctcgcgccaggggggcggcagcgtgcgtccagcgcatcccagcgtgtagtgtgatacgctgtcacacgtacacgtctgtttcagtttcgcgcagcgcgccgggatcaccaaaatccagaacgtgctatccagtcggctactctacgtcaagtttgcatggttcctagcttcagttgctgttgcacagctattcttgcgttaacaaccgtgtgacctctccgtgttgtaaacggtggccgccgacccctctcgttcagagagtgtcttctcga

SEQ ID NO: 2893 - DNA, 3217 bp, Toxoplasma gondii
  source 1..3217: mol_type = genomic DNA
atgtacctcactggatggagtcattacttggccaagcaaattggattcgaactcctgagggacctggtcgcggcgtgggtgcatgcgaagctgcaagtcgacacggctgtgccagctcatcgtgtaagccaccgactgacaggaaagatccgttttgaagtctgatcctatttagatagcgatgcgcatgcttgatacatggatctactttatatctacatggagctgaactggatgcaacacaaatctcgtgaaacgatgcggatcttgtcacctcatcatgtacatgcatgtgtgtaagcacaatgcttgtacgcgtcgagcgatgagaacgaacgaaacgggagaaagaagagatttatgcaggtgcggttgtggacggacgacctgacacgtggaatgagggatgcactgaaattgtacacggctgctgtcattctctacgttgtgcttttccaggactcgctcgagagttgggcggcggagtcaacgaacccacgagatcgtgtcgctgacatgggcacacagacttccgttactctgcctcctcccataagaacagtttctgacaagcccgccggcgctccatttgacgctgcgaccacgagcgatgcccagaatctggaagtgtctagatcgacaagccaagtcatgacttcgcaggactcgggcagagaagccgcggcatagagtccttttcagtgttgtgtctcttttgctggaacgccaactttaaaaacagcgagattgtcctttcaggactgcttgtggagaagaaactgcatgacgaaaagccaccagaagcagacctggtaccggcgggagtaaggggggttgtgggagttcgccagcgcgtttcttccattactgcgtggacatgcccacacctttttgcacatttctggaaggaaactgaaggggggaaaggcgaggcagcgttgcgtcgtccatttcgatcgtggcagcgcgacatttgaagctgagaaacctgctgtcacttcagttttactcacaccgtttttccgttttattcacccgtttccgcgcacttgcgactcgctgtggaggttacggtggaggcgatccctctcgtagcacgagcgtgacccagaaaggaatcgccgctgcaccttgctgtgactcagctggaacatcggtcacccgtgttcggcctcatcggtggaaggctttttttgcacaacatcgggtacatgcagacgcacccgtgaattgctgttttttgagaaactgagtagcgcgatttgttcgtggaccagtcagtctactattcggctctcctgtatacacacattctcctacacattcgcatcttgaggtttgtgagcagtcgctcttggtcgccgtcgctttttccgtttttagccctcttccacaacggcaatcattgcgggcaactgcgttacaccagacactcacatcgtggaggagacgaccaaagtttcaaagccatgctgaaaaagtagacacagtagcactttggatcctcgtggggaagcacctctccattctctcacacgaaatcatcccttctgcacactgatcacgtcacggaggggctaaacctgcagtctccccaattcaggatccaactgtcattagctgtacatcactgccggtagataaagcgcagggctttccgcctcatacttgcgcaccacttttgaaaagagcaatcgaaaggaggcatttgtagagcacggagatggatgttcttcaaaatctttccgcacatcagtgacttatctcaccatgttcagaacgttttccccgagtttcacgcccgaaatgttagacggctgattccccactgtccagcatcatcgagtttctctctaaagcaccggcgtttcgtttccattttttcctaatgggggacgcagagcccacgggtgtgctaacgactgggatggcgatggaaaactactcttcgctgctcccctcccgacgtctgctccactgaaagattcctagcacctgtgctggtcctctacaagctcggtcgcggcaccgttccttcgtgtgtctttgcaggcaccagcagcgcggcagcagccccgtttccgtttcgtgcttgctttcgacaaaaagcaacgaatcaaattgaaagcgtttcctcgcttgaacccggtttcgcagaaggctagctgtgcagagctggcgctcactcccaccccgcagccgtcttaatggcgggggttggaaatcgcttgcaagacataacgcgacaggacacgcagccgtggcgaggcagaaacgtggaaggaaaggagtggctctgaaagtagacattttttcgtgggcacactgaggaaaaaaggaatctttacgcattatcttgtgagaatcagaccactggctgatctgtaatagtcggtacgcggctgcccgtcgcgagcagggtcgacttaccggggcggctaggttgcgtaagttttgagattttttgctttttcaagtgtgcctgttgatctatgccttttgcgatgattagaccgccgagacgtccactcttggaaagggttcggcccaaggtttcaccacatgcccacttcaacagactccaccggaccgatataacttgactcaaatgctagcgcggcgttgctatggcttcgggggaggcatggggtctgcattgcctctttaccatacaccgttcttccgcctttcatgtctctatttcaggcattctctggcccgtccaggaaatacttccttcccgtgaggacgacagggctggtcgcggacggcttacgagcccaatccgttctcccttgacatgccgcccggtcgaatgcggtagaactgggatcgcaatgctgcgtccgaacccgtggaaatgtcagcggtggagtaaactgttggcagttctcctggaggaggagagtagagatgaacgccgtatgggtgctctccagaggacgctgctctcttttggtgcccgcgtctagtctgggtcacgcgcccgtgtctcgcggaaccgccagcaccagcacgttgcgttttcctcagtcactttctgcagagtcgttttctccgagcctcctcttgggtgcgagtggctaagaactaaaagtgagccgtttctcctctgttctgcgttttaaaactgtagctcctcagtgttcctccccatcgtcttgcgtccagactcgagtttccctgagacactttattccccctcgcacaatcctca

SEQ ID NO: 2894 - DNA, 4122 bp, Toxoplasma gondii
  source 1..4122: mol_type = genomic DNA
aacagtgcatgcatttggtggctggtagacaacgttacaaaagaggctcgttgaaggaacgcggtgagtacgcataccgcggtttgcttcgcgtggctatgttgggatacgtttcattgtctaaaaacatcgtggagcatttctcacgtgtcctgaaaacaacatgcttctttttcttgtttactgagaggcgcgcgcgcgtgaattttgacgtgcgacctcagcgtgaatgctttctgtggctaaaaaggtcttcttttcgtgtgttggatgaccccttgaaagtaggccgaaaaagccggcacaccttctagtctacatcatttgtatgaagaggcctccgcacatcgtttgattggatttttttcgcccaaatcccatcgtgaacaattacctgtgtacgtaaaccacctgaaatcgaaggacgaagaggccaccacttcagccgacgtcaaggaagggcgcggtacaggcacagggtcgcttggatgcggttggggtgctggttgagatggttctgatggctgtgactgctcggttgcctgtggacgaggtggcgtgtatgcgggctcgtcgatcttcttgacgagtttcagcgtcacgtctgcgtctgtgtcatcggcgacgtgacttgcggatgtatgcgctgcgagcacggggctgcgcgttgagaaggcgagacaagtggccgagagaaaaactagagagaagcgaaggcaccacatcttgtccgctggcctttgtcaaaaaggggaaacggaaggacccggctagacagggtcgtgcgagcgacgcctccttggtcttgagcagctgaaaagcaaggaaacgcaagctgaagaggacgagtacagagtgtatttcgcaaacacacatctcgtggacaagatggaggagcgtgaattgcatgtctggggtcctaacaaacgaacattgaccggtggcgtacaccggcgcatacccaacagtgcaggaaaggaattaggaaaagagagccacagtttctttatttcaggaacaggacgggcggcagtcattccggtagatcgtgattgtcgggaaagtgaactatccgggaaacgcggccgacacacgatgtgaggtaggtttcatctgcgtgtttacataaaaggcctacagctataataacttgagcatgaacacaagcagactcgcacctaaaaatagtagagttcataccgacgagtttctaatgcacaacgtagaggctgttttactctttcactaaacgcggcttttaacattgcgcgacacttgttttatcacgacattttcaccgcgttcgcgggaaagaccgaccggtggacaagatccgtcacataaccgtatcatgggtatctataaggcattcgctacattcacatggagcttcccatggaagaacgtgtactgcagagagaggaggccgcgttttagcgatgaaaaacgaaaaattcaatccttcccaggctcgatgacaaactcgaatttcaaggccccgcagcacgcatcctgcattcgaggctggatatagttgaaagaacgaagtgcagatgccgtcatgtggctccttttggacgtatctgcatttccacattccgaacaagacttcctggctgcaaaagaaaacggaaccgggatgtcgacctcgagggatagctgtctacaaaagaaccgttggagttccacgccagggtagtggacgcaaccgagcacgtcgacacttctctgactctttatcaaagtcataaatacactcatagaatgcaatcacacaactctctacaagccgtcaacatacatcaagaaaggcacggggacgggctgttgggctgggggttttccagatgtctctcagcgcgcgttgagtcccccgggagcgcagacacggcccggacaagactggaaaaatttgattaagggcgggcctttacccttgcctgagaaacgctccagagtatttgtattcaaatcctgttttaaaaaaatacaaggaaaggttaaacgggtgccttttccaaacgaccgcagtgccgtgcgtactgcagccgcggccacaacgcggctattcgagtctgcagaaaactgatgcccgatatctggggtctccttcagcaccacaactggccttacccgagaactcagtcgcggaaacaagggtgtttctcctcgtttgaagaaataaatctgcaaaggtacccaaagattccgaatgtctagctcctctggagctgagcgcgcgggcgcggacctagcacggaagacctcgcaagaccggctgcagaatgagaggtaaaaaatgaagatagctgtttagaaagcgagaagtgggcatgactcaagaccctactcattggttttttctccgtcgtttaacagtttcttgaaacatgaaaaactccgcgaatcacagacatagaagccttccccgcttctttagaagaaagactctcgcgttcgcggacgtgcacgctcgccagagcgcgcgcgccctgggtgttctttttcaaagatctctcgagagttgtccgagcgcattcagagactgaccgagcactgagaccgtttgtttcctctcttttctctctgccctgcgactttaatggcgtagagctctcacctctgaagttgtgtggccgctcttctcccttccactcacgttttgtcttcgtaagttccagttcgggctacctcgactagcgctcttctcccgccttcttctcgcccccagctggagtcacagttacccccgaagttaccagtgcacagagttcctctgggtccgtgtgggatgacgaaacccatctttcagcagacagctgatgctttttttcggactttcgctccaatcgcttttctgcggtcctccgccgctgtttctgccgaaagaaatgcgtccaaaggctctcgccgtctctgggcaagacacgcgtcttcttgtcgcggctgctcgcgtcgtcgctggtccctcttcttccgccgatagtattggccttctttagtttggaacggcacccagcgcttcacatactttgtctgacaagatatcggaaaggggaaggaaccccgtatggttgaaagcgccggactttccggtctcaagcaacagcgcgcacaaagtccctcgattttggtcttttcagcagttctcttgcagcgaacgttttcctcttctccggcactcagctactccgttgctaccagtctaactgtagacctaaaagaatttctgcctcgtcttttgccggagccccgcctgactgtgtcttagttcacagcccccgctccgtgtctcgtaagcgactgaggaaagtttttcatgctgagagttcgggtttgagtcgtgaagacgggaagaagccggaaaaggccggattccaccttttgtttggaccgccgccctccatcgcattgtttctcctggcgtctcgactgccgtgttttaggttttttcttgcagaaacgcggcattctgtgtctctgttcgtgcacattcctaaaagaaacgcgtctgagcgcgacttacgtcgggaatgttcattgggtttttccctcaaaaccacaccagtctgtttggcacggtcgctcacggcacgcgactagaaaacagcgaatcgaggtgcagaggaatcccgaggaaaacgcttttcagcgaatcgtaaatgtgtttttcttttaggtcaaagtgtccgtcgtcaatttcgtgttggccagccgaagctgaaattcggtttgttttaccgagtcacgtgtctgataatcctccacttggcggcctgcccggatgtgtagcgtatgcgatcctcacaatatcttttttaaaggctcctggctcacttgctccccttgtgttttttctaccccgtcttctctttctccctggtctactgtacacctttctcccacggtcgtcctgcccccacgccgcttcgagctctgctgacgcgagtccctcaagaatcctcacagtttgagtctttttccccacttttttgaaggcaaggacttgctgctcttgtcaccaaacggctttcctgtttctccagagatcggagaccgacattcaccccagattgttcttgtcacttggaaacaacattatcccgatccacacattcacga

SEQ ID NO: 2895 - DNA, 1840 bp, Toxoplasma gondii
  source 1..1840: mol_type = genomic DNA
caattgcgagaggaagaatccgagcgcgaagatgcgtctgaagagacgcaagctcgagagggatgcctcgcatgacttgaagagccaaggtcgtaggaaggagaacgaaaaagttgctcacgaactcgctcgctcgtgtggagttgcctggcacttacaccatacggtctttttagctatgatctcagtgttctcagcgtcggcttcgtaaggaggttagagtgaatgttttaccgctatttatcagaggtttaaaagtcggcttccctcgagcgaacggaggagtcaagtaggtccacgccgttcacggatgaattgggtccgtctaagttgatactcggttatcaaggttaaacgcgaacttcccgtgtcaacaatatcttcaacagatctccagggctcactctcatcgattcagcgcggacaagactactcaacctcactaacggccgatcctttcatcagaaaaacaacgcacgatgagacgactttccaatcgaaattaccttcatacatttcatgagacgctgttaatctctcattggctaaatctacttatgcgtacaaacatctctatacacatatatacatacacatatcagcatatatatatatatatatatctgtacggaaatgttctcgtttacatttatgtatatgttgaaaaggacgtttttccatttacagctgcgtaaggtgtggcatgtttgcgagcgtgtggcgacccagatttccttgttttgacgcttgaggagagacgtttcgcgtgagtcttctccgctgaactttctcgagtctgctgtcgcggatgatgctgtgtgtttgtcggttgcggctgccttagtctttgatgtcacagaagacagagagaggtttcatttggcgaatccttttagatgggtttcagccttcaagaaggagaggaaaatcagagaaatcgtcacaagtctctccgcgcccagtgtggcgaagtctcggtgcatgcaacagtccgcatgcacggttgattggcgaatccatcgactgaaaaacgacgttcttcgctctcctcgtttccccattttcctcaccacagacctcgtcttgcgccttgctttctcactgcctctctgtggcggagacgccttctttcctgtgtctaaattcgcggattccttcctcaagtctcgagcaagctgcggctgcgcgaagcagcaagtcgacgcattgtgtgtcgagtttctaccagagcgccagtcacaaacagagagatttccgactttgcttcctcgcgtttttctctgtctttcgggccttactccccgttctttccttcacttctgtccactgcggcgtttcttcgtcgtttagaaaaaggctttctgcagacaacgatcgacatgttgcctcgcggtttgtgtgcacccgacttttggacagcagagctttcattctgggggccgcaccgttattcttgacgaacctctttgtctctttcgagaaccatcatgaggctctcgaagctcacactcgtcagcaggtccccgtttcccttccctcaaccgctgccctgctccgcgcttcgtcgccgtcgtgtctcccatcgtctcttcggaggcgtcgcgagcgtcgtataagagcgcgacaacggacagcgacgcgtcgaggaggcttctcagctcggccactgaatcctcttcgactgtcaacgtccccgtcgcgaaacgagtcggcgtagctgagactcgagcgcgcttcttgcgctcaggtcgaccaggaggcggccgctgtcttccagcaaccgctggcttccttcttcggtaaacactgtcgagagatccactgcttccaccaaacacca

SEQ ID NO: 2896 - DNA, 2885 bp, Toxoplasma gondii
  source 1..2885: mol_type = genomic DNA
ttccagccaaggactctgtagggtcggtgctgaacttggagcagaagtctcaggaggacgcgaccaggaagatacacgacctgaagatcttctgccttgactcgcgctctgtctcccgcgcgcgtctcgcctctccgccgtctgcgaccgtctctgcgagcggcctccgcgtcgcttcgagtcctcctcgacagcctctgtctctcgggagagctctccgcgtcctccgtctctccacttggaaggaggaaagctggcggacgaacgtccccgtcggtctccgaggaagctccggaagccgctgcggcgcccatcggaagttgacaaggcgaggaactcgagaaggctcgggcgccgtcggcgatcgcggaggcagacctttcgcacgcatcctcagtgcgatagacaaacattttgatcgctgacgaccggaacgcggggaacgctcgagacactcgccagtccattctgccccggccttccccaagccactcgagcgacaagaacgagacctgcgcccgcgaagactcagcctccgagtcgcttgaaacctcgccgtcgccgcctgccgccctgtccggtgggtctccatccgcgccgccaggaaaccagctcgcgaagccgctctgctgtgcgtttctgcaggcctctgcggagtctgcagcgcgttgtttcgcgcgtctggcgcgccgtttctcggcctgcgctttttcgtcgggactggggcggaattcgaggacggcctgcacatgagcgaaggtgccactgccgaagaagaagccgccgaccgcgcccgctgtgttctccatccggtgcgtgatgatgcagagccgcgtacacactccgaaggcgacagggaaggccccctgagcgtcgggtcggaggcgacagggtctccgatcagagccgcaaacggattcttcggcttccgaactcgcctcgctcccgtcgtggagatgcgcgcgaagaaaggcaatcaattcttccatcccctcgatctgagaagactccgaaactcgcgagtcagatgttcccggtgtctcgcccacggccgcctgccgctcttctcggtctcgccgctcttcgcgctccagcgcctcattctgtctccgcaactgtctctgctcttgcgcatgctgaacgcgcagcaggcgcgccgccggctcgcgtccccggtccgacgcttcttcctcgcgcatccccgaggacgtctccgactcgccgctgggctccgcgagcctctggctgcctggagcctgaccggggggacggaagaatgcgtcgcgcgcttgacgctcggcctgtcttctcctctccacctccgtcgggtggcggtgtgcagccggcggcgaagaggccgcagacgcagaagatgacgaacagtgtttctcgatgggatcggtgcgtctgagatgtctggctattcgtcgacagcggcgggcgttgtggttgctggtccacgaagagagagggccttgccagtagcactgcgtgcaggtgaccgggaggaggttgtagttgagagaaaagtcgacaattttctcgctcgaagactcctcgacaggctcgagttgctctgcgtacaccggacctcgacagagagggcacatgctcgtccgcagcaagacagcgagcatgcagtcgcggcaaaaaacgtgaaggcagggcgtcacgacgggtctgaggagcagctcgaagcaaacaggacacttgaagtcttcctctgtgtagaaagtcgtcaccgttttcgcttttctctcgcccaccccaaagaggccagctgtcccaggaaccacctggacgcgagcgactttgcgattccgcaacaaacgcaacgcctgctcctgcagctgcggtcggacgtctcctgggtcgttctctcccgggagaagtccgacagcgccgccagccgagtgcagcaggtacaccagactggagatggccccgtcggaggagaggagcagcggcgagaggccgcgctgcagcgcatcgacagccgaggaagaggccagcgacgcagacgcgccgagagtcgccagctgtctctgcaggcgctggcgttgctgcggctgccgcaggaagcggcgcgctgcgagggctgcggctgctgcggatcgagaggccgtggaggcagaggcaaaaggcaggagaaacgccggtagttcctctgcaggcgcatggtcccggcgctgctgccgcccgctgttgagactccgcgaacggcgcgcggcctctgtgtggacgacgcgggggtgccctggagacacttcggagctctgggcttcgcggccgcgatgccacagcgctcgagcagactccccaggctgcagctgtcgcctcaaccgacgcccgtttggcaacgcaacgatcgtcatcacagcctctcgttgacgttccgcttctgacggacgcggcagacggcgggaggggtgtgcaggcaacgcagaagaagaggagagagaagaagaggagagagaagaagaggagagagaagaagaggagagagaagaagaagagagagaagaagaggagagagaagaagaggaaggagaagatggggaggaaggagaagagggggaggaaggaggctgaggagggagacgagaagttcgaggtcgtgtggtggaggaagatgcagcggagacagaggcggaagaagaagaagaagaaaaggccagttcttgacgtcgccgttcctgttgacggacttcgtgttcacgccataggcgtcgctgctcctcctgcagccggcggaagtcctcgggaggcatggaggaaaaatccattttggagaaccggaagagaggaggcggtgcgagagtagagcagggcgaggcttcggcgagttagagacagagaaggacgaacacggacatcaaaaagca

SEQ ID NO: 2897 - DNA, 1560 bp, Toxoplasma gondii
  source 1..1560: mol_type = genomic DNA
aaaattcgacagagtcggtggttcagcataagcgctttggtcggtgaaggaataacctgtaaacggtctctatattggaaatgataactaaacgaagtggtcttagaaaatgcaatcgaacgcagatctggaaaatatacagacctctcgagaactgagtcagtagctgagctttcgccgctgatcttgaaacaatgcacggtgtcgagaaataaaccgtttgttcgagaatgtgcgcatttctcgaattgattttctcctttccatcgtgacaactttcgtcacatccggttctactcaacattgtcgtgtcaatcagagtcgagaactgacttggatgaaccgctgtcatctgaggagtcgaactctacgactgggagactgcagctgccacgattggcgtctgaggtccgtttcgcttctctgtaattgttttctcgcgaaaaaaaattgctttccttgaccttgtgaatcgccgcttaggcaactacaggcttctcagcaaatctgccgcttggggctgcaaaaatgtatgaggggctcttccgtcgcttctttggtatcgaagctgccacgcaagacaagaagctgggggaaggacgaggtcaggaaacagagaaatgcctcttcatcccaccggcaaatcgctccagtgcgccatcgaagagacagctttctacaaagcaaacccacgagtgtaaaagtcgcagtgaacgcctcagaaaggaggccttcttctaccctagctcgaaacgcggttggatcccctctgtgtcccccaaggttgtagtcgacgcagaaggaagctgaatatacacttctatttatcctgagtagtcagaaacgaaacggaacatcgggtcttcatccagcgaatgaacgccgggcgaaaacctactacttctgccatgcaaagtcacacgcaatgtgcaaggctgtggacgggtccggcttcttcttttagcctcggggtttgctttttgaggaagaacctccgaaattttccgatctttctcttttgtgtttcatgcagtcgctgcggcgatctagttcacgaggaacaaagtggctaacgatgcttctccagaaaaggagaagcagccgacgaaattcgagctttcttgtctgatgaccgcagaaggcgtaagaatccaagtgctgtgttgttttctgacgatcgtgacttttccacctcagcgacagagcttctttcctttgcctacacacgcacgtactcgtatttatgtatttgtacttgttgggatagagggatatatggaggctttctattcattttcaggaatcgacacttgtttttttcgtccggatgcatgcatgcagagaggttccgcgttgagtgttttctcgactcgattttccgaacgcacgcttttcttctcccgcgtttgctccactctccgttctcttccacgttctcacttcgttttctccgctctcttctggcttttctggtccgtcgttctcgcttctcgcaggcaaaaggattctcctttccccgttcgccgcccattgcctcgcacgagtcctgaatccccgaca

SEQ ID NO: 2898 - DNA, 1537 bp, Toxoplasma gondii
  source 1..1537: mol_type = genomic DNA
tgtggacctcgtcacgcgaccattttgtgggaaaagagcacagccccgagacgaatccgaaccggcgagaatagaagaaaggcgtagtcgagcagagacgccgaaaaaagaggagaaagtgtgacaggcaagtgaagagacaaagcagaaggacgtttctcgcgttcgtcgcaacattttttcgctctggcgaatctttgcagacacacaatagcacgagggaagcgaagagaacagagatacaccgatcggaggggagttcaacctttttccgaagaggcgcttttagtggaaatctgctctcccttcgacttccagacggcttctgccttcctttctgctccaccgccccagcacaggggactcaccgaaacgctgtcgccctctggactgctgaaaaagttcatcgccatgatggacctgaagaaaagagttgctggaaagacagaaagactacacacacacacacaaaggaacaaacaagaaacaagtccgcatttccttcacatgtatatgcatatgcgtgcatgtgtaggcatgtgtctgtgtgtatccgtttaaatatgtccacatacatacatgtatacacacacacctgcatacgtgcatgtagatgcatgtatgtggggaatctttacagctttgaacaggacgtgtatacaaaaagccatcgagaaatcgataggaaaagaaaggtagaaacgccacgtccgctgttggaatgtcgaaatgtttcacgcggacaccagtgaggctggtgttgcgtttgtgaaaggcgcgctgccctaagccgtagaccctaaacaggttggagaggccgacgatgcaagtaagtcggtgtgcgttttttcctgaagagagactgttcccggaaagtttccctgttctttgtctccgcatttccgacacagcttctctcctgcactttccttgagagtccaataaaaacacgcggcgatttgagaaatgtcgaagacgcaactgggagatgtctttctcggtttgacagctgaagaatgaactctctacttcctctcggacgggagaaaactgaaagggaaggaggtcaggagcagccacagttttccataaaaacgcgaggccaagcgagctgggtttcctgagttaaggtatgccctcttgttttaacgccgggaactgttgggcaatgtcctcacatcagttgcgcgcagagtcgccgctaagaagcgcgggacgtgctcctctcttgaagaaaaaagtgaaacagcaaacagtgtcgagtaggttgaagtggactaaccgacgagttgacgtccaggcagggcgaagcaccgagtgcacccaaaaatccgggaaaccgctcagataacagactgagtcctcaggtcgcttgtgcaaaagacatttggagaaggaaagttccacgtccctctcggtgacttttgatgttcctagggagaagaccatgtcttcttgcatgcgctagatcacggcagagaattgcagaaaaaggaacaaagataaaggctcccagcacttcgcgaggtttcgcgtg

SEQ ID NO: 2899 - DNA, 1428 bp, Toxoplasma gondii
  source 1..1428: mol_type = genomic DNA
tgcagctgttgcagctggatccgaggatgttggagatcataaatgctccgtttaagtaatgggtggttggcccaagtgccacagagaaaaatgcgatttgtagaaccgtaacgaagcgactggttcacctaattcctgcgtggcaagtgactcccgtgcgggtgtctcaacgggagaatggtctcagatttcaatgttgtgctttatatcatctcgattcactgagcgtcagctcttcaatacattaaggcggccgacagttgtgccccagacccatgtataggcactcgcgcaaagggtcccgtggtcattccttcaggaaagcttgttgtgctccccataacttgtcttttcaagctattcgattctctagattccgtgtacgaacccctgaaccgggtcaactcatccgcttgattcgcatcgtctacacagaacccaatgaactacaccaatgcacgcagtctagaaaactgtccaataccttcagaaggtggtgaactcgtgctcgagatacgtaacttccccatgcattagtctggttactgggaagagattcgttagttcggcgctacgttgtagtcagaattcttggttgtctgatgaaacacaagagcgctcttgacccgcgaagtactgcgggtgagcatgtagacgcccagcacgagtgtttcattcgaacagggaattcccacgtagctccgcatgacctgacaacttcgggtgtgtgtgcattctgtatactgattgagctcacttggtaaaaccttgattctggaatgtccgtggtacacagcaatgtcctcgtggacgcgagcgagttattcgccagttcctttcttgtaattgtggaccatctgcaggtctcgaaggaagattatcactttttaaacggcatgtggcgttttcgttaggtcacatttaggtttccactcccccggtcagttgccaacagcaacggaaagcacaaaggaggaagctggtgagggacttcacgggcttttacacagcgcactatggtgcccagtcatggtatacgcttgcatccagtgttcgagcacacaaaggcgaatgtacaccctttgacaaccgaagcgactccggcgatgcctactctctaatggattgaaaattcgtgcatgcgtccactctttcgaaagcttgatggagtgcacggcgacggaagcacgcttcggtcacgcgttgttctccggcggtggtgttcgtacatcgcgttgacgcaacacaacgtgaaactgcatttgttctgagttgagagagattaatgtttcttatgggataaaagttgtgcttgtgttctcttccaaatctgttgcgttcaatctgggcaacaaggtgagcctccatgccacccacctctccgcgtttcgaagaactctacgaaccatcatcgtggcacggaggaaa

SEQ ID NO: 2900 - DNA, 1610 bp, Toxoplasma gondii
  source 1..1610: mol_type = genomic DNA
acacctaagctgggagtcatggccaacgtactctgagacaacatcttcgccagagaaggacggaaccacagaatgaattttgtgagattttttttatgcgtgtatggactgctgcttgtgaatcacttgcttctgtcggctcgaatgtgattagacgccactgcaagtagcgcgttacggaagttacttcaatgcttgtcgttttattcgtcttgacttataaagtcccgcacggtccggcagcaaaattctgttatgcttacgagtatgccggaatcaggtctacactgtccactatggttgcgtctcaagtagatagactttctttggcggcatccaccagcttcccaatatcacctgcaggctcgcacttcacgagattagatatgttttcaaatcgtgctgcgttagcgacgcaaacagaaatccaaacagactgatggctctggtctttaagacgtcgtgtttcatgatacggtaaagtcaacaccacaatcaaaactgaacagttttaagcggcgatgtcacgaaccccctacccatcgaagatctttttgggggaattcacgttattttcaccagttcttgtagacatacagtgatgcgttcaataccaagtctgtctattctcgtggacggagtccccaaagactaaacaaaaaacaggactacaagggaacgatatggaaacagggtcttcgcctcttgtggcatcagagcgatccgccatttacaagccaaatgggaatgtgttttcatcgccgtataggttacatcagaggaagcaatgtgccgttttatggaagcagttccgtttgatgatatcctaaagttacgaaaaagaagaaaggactagtgccgtcaaactacagaaaggagcgtcggatggctgtcaggaaaagccaacgagcttgccagtaaacgtcaccgcatatgcatcgagcgactgttgttccagaaaaggccccaaaccctctcacaactgactagattaggagaaccgaactgtgagcctaaggaataacgccggacacttgccctctgtcgcgggcgtgtttgtagctggaaggagacccatattcaccacagatgtcagctctccttccggacgcgatgtctttctggaggaattggtttctgtcgcaaactgttgtgcacttcttctttaatggcttgttccctgcctgtgtgaagatgaaagagcaactgtggtcaggagacgtctgtctcgtgagtcctgccgtctccacgcgcatgctgcatgcaattagttgacccagcgggtaagaggttcgctctgtttgccggattcttctcaaaaggcgcgcgtttcggtccgacacagcaagagtttcgcgtgcgagaataaagagcaattgcgtctctgcaaagatgaacagagtcccgcggcggtagtgggtaatcgtgcctcttttctatcgcgatttgctgcggaatgtttgttggggcaatcgctgtccggcaagtgtttctcgtccttccaaaatgtgtgtgtcctccccccttttccagttctcatctttatggtgcatcgttcctgactgctccttcttcggtctccctgtgcaaacccgccgcgtgacgtccga

SEQ ID NO: 2901 - DNA, 2926 bp, Toxoplasma gondii
  source 1..2926: mol_type = genomic DNA
ttttccttagtcttggttctggagttcagctctcgtgttcttcccgctgtgtgctctgctggcctctgctttgtctcttctctcactgtcttcgattcccctttctcgcacagtctgtcgtcttgctcttcatctttctctctcctcctgtcttctttcctcctcttccccttctctcgtctcgccttcggcttgccttgtaggagacggccgaggtcgcttgtgcgttccggatgaagccgatcaagtacggcagaaggttgccgatggtgtgcgagccgccgagacagaagtggagcaaacaggcgccaagaatgcaccgaaatcgcagccatttgagactccgcgtcttccccatttcgctctctgtcagcatgcagcgtcgagaaaaagccggcgacgccgggaacgaggagaaaggcggccggctgagcgcggaggagctcgacgagaggcctcgaagcgcgcaagaggagacagagggagacgacgacgaaggtagagtcccagatgagggtgagacagagtgccgaggagacaccggagaagcagaaggctgaggagatgccggaaaagcagaaggttgaggagatgccggaaaagcagaaggctgaggagatgccggaaaagcggacatggcgcgacggggagcagacgccaaacgcggcaacgcgcgcgcacggaggagacgagggggaaagagtagagaggaataaagcgagcagggaggagaaggagaaagagaagaacagagaaaaaacgagaatggaggggagaagaagagagagttctacaggaggtagagagggccgtaaatatcgcaagtgttcatggtagacagacggagcgctttgagggagagcagaggagcgagagcagacgctcaaggcgtcctgtctctctttggatcaacctatggaggtaagaagcgaagaaaagcggaggaaagaaaacaagtgaagctggcttttgtctccgtggagagcacggctcggtgtccagctcacaggagtggagccattacgtttggtgtaccttggcgactctttttcgagatcttttgaagcgacgaagacggaaacactcaacgaagaaggctagagaggattcgcggcgaggagaaagcgcacctggtggacgacgagctgccactgtacggcgtaggaaagagcgagaagatgccggagcagagggcagagagattgcagcgcggaagaaaagagattaaaacatgggaagaacatcgagactgactgtgaggcatgcgtcggcgaggacgattccgtagacactcgcgtgtgtgccgtgttctgtctcgtctttcatccgacgcggttcatcgcgcccgcgcagaccgccagtgaaggagacgagaggagaaagaagcgacgaacaaacggacttctagaaaagacaggagcaccctcgcttctgaagagtttcggatcctagtcaactctcgacggctctgcccgtccagtcacgggaacgcgagagatacgcctccgtctgaggagggactgcggggccatgcacacccctgcggtgtgcaagacagaaaagagagcagtacgaggaccgaggccggcgagttttttgtcgagaggaaaggcgatgtttctcctatgaagaggcgaatttccgacgccaagaaacagaaaaggcttcggcctcttcccggatgtctttggagtgtctgtacaccacagcccggcaaccgagtctcgactcgacacagagaggggggtgggcgcgctgaacagatccggcagctgcgcgcgttttctccggttttcgcggcagacctgaggagagaggaaacacatgcgcgtccacgtgcttgaacgagaaaccacatgtgaaataacgaaaactctcaaaaaaggcgcctccgcgatcccagccacgtgcggtgtatgtacaccgcgcccgctcctcgtgtctccggacagcgcgcggaaggagacacgttttcgtggcgcgctttttcagatgcgtcttttctctctttcgaaccagagaagcgaaagctttcgttccttcgtgctcctgtctttatcaggggactggttccatgttttctgtcgagaatgccgtcctcgaggcccgctccacccctcgagtttcttctcttcgctcctgaaaaaaggtttccgcctccgataacaatacgctgagaggagaatgggacccagagatttcctctgcctgctgcccacaactgaccataccctgttctcttctttctcggctttctatccctgtcttccagctcatcacagctgtatgggtgtatgtacacctccgaaaacgccggcagagccagcgggtggtccctccgctggcgcaaaagtgtgtgtgccgctgcgcggtcgccgttctgcggtgtgtttattgtccgttttctggaaagaaaagtactctttagtttgtgtctacgtttctcgcgttcgctaacatggacggaagggtgtgcatgcgctcctcctttcccgctctctcacctcgaggaagaatccagtaaaagaccatcacgtattcttccgacacgacaggatatcttgcttttttgtggcagttcagccatgggccgatgtctccattcggcaggttgcttgtttcgtttttcctcagtcctcactctctgtgcctctccactggttctcaagtgtctccccttttctcgcatttttcctcccaatttcctctctcttcctcgccattttcctctctcttcctcgccattttcctcgcgactttggactttcgtccggctggtgtcgtgacgacagcctccaccctcgatggaacctgtggcatgtcgtcgcaggcgaaagggtgggagagaagaaggacgagcaaagccgtctccgctcatggaaaacgacgcttctcttctttcccctgtctctctctgttctccaaa

SEQ ID NO: 2902 - DNA, 4509 bp, Toxoplasma gondii
  source 1..4509: mol_type = genomic DNA
aagaaacgaaacgtaccctcaggtgaaagcacagacactcccatgtcggacggcaactgaagcgtgtacaggcgttcccctcatgaagcgcgcgtctcttgagtcggtagcaaggtgggcagaaacctcaaagacggagaaaaagtcctgctgaagcaacaaaaagacccaatgcccccacgtctgaaagcgtactcgtagctgtgcagcaggagagccgactagcgtgtgccaggcgctccgcgtccatgacaaaggagacacggggagactagtttctcgttctgaagcattcgcgccgttttgtggtcgtttgattcccatttctttcgccttctgcggtttatcgctggcctgcattttctgtcgctgcgttcctgccgcgccggcagagttctcaggagacgaggccgccatggaggagcgatggcgacgtctaggaagaacgaattgaaaacgcctccgcttggagagtgtccgtggtgctcgtaacctccccgattccggggaatacgggcgcgattgagacaagattcagtcggatgctcgacagcagagaagcagacaggcgaagcggatggaagaagaaaccaatgatgtagaatcctggctatatctccagccgcggaccttggtcaacgaacagaacgcagacgaacacgcgaaaaaggggaaaacgggcagatgacgaacagatgttctggatcgaaatgaacgcgtaaaatgggagacagaagagagacgcacaggggagaatcctaccgaggtgtgagtatagacggaggaacaagcgataaagaaacctactttgccacaagagcagtgaatctgccgtctcgagcactcagaatgggcagcgcagggcagacaagaaaatgacgaggcgggttgtgtcttgccactgacgtcactcttggaagtgattcaaaagaatttcttgtgcgaatcgcaattcgacacggacgatagagacccaaggaagacagttcacgctgtgtcgaattgttctatccaggcgtgaaatgcgaaactggcatgcaggcctgctcgcgaaaaaggcgaatatcgagagaacgacattcgacaaaaagctgcggttcgaaccactgagtgtaggaaccgaataaagcaaggattcacaaggcgcatgcataagggaaaagtctctcagcgctgtgccggtgtgtgttctgcggtgcgccggaactcgtgatcctgccccaagaattacgattttccgggaattccagcgtggtgacaaagcaagacacagacccaaaagtgggtgggtgcgttgactgttcctgttgtggataggaatcgacagaggtaaaatgaaaatgacatggggcgcaagtgggcagtccgctcgggagccggaagcgcatctgcacactttagcggctgccaagtgaatatggaacaaaggcacgagtttgtttcgacacttccacgctgtcgcaatttcgtaggatggcagctggctcagaggcacacgaatgctcgggaaggaaaatgaaagagcgctggcgttacactgtggctaggttgtgtcggtgccgtggtgtcagcgaacgaccgtgacgggtgactaaatggaaaaacagaactggcgaacacgaagactgcaaagggtaaggacacctgagaatgccaagagcgacaatgactatccattttcaatgcctgttcagagggaagagcttctgccgtgctatctggacgcgcaggccacatcgcttgcgccttctgtacataatcattccccgtgggttgcagcctgtaccatggcatgtagccttcaatggggccttcaaggagaagcggtaatatgagctagcgacactggcagcactttggaactgtggtgtcctatggcgagaacgcaggatcgtgtctctctccatctcactcgggtgcggtctgcgttggaccgagagggtagaaactagaacgaacagcgactgtcagtacgacaggttgcataacacagaactagtactcatgttcacgactcgaaagagcttgtgttcgagaagcttcatactaacgttttcattttgtgtatggtgacttctgatttgagttgttataccgtcggcattcgagtaaggcggagaatcgtcttttttgcaaagttggctccgcggctatgtacaaccgctaccgtcgtgccgatcgtcactgttcccctggagcataaattggacgagcacgtgaattagcaaatcggaaccgtcacatttttacgggcagaacatgggtgggaacgagacagtgttccacagcggcacgtagtccgcttctctatcgaagaaaagaatatcctttcacatggaagcctcgccattgtctagcgtaggcgcacgagcctttatccaaggtgggttctgtagtcgagcctcctttttgacagacgacagcgcattttacctgtttacgcgtctagtttcgagcgccatcaatgtcagctgcgcgcttgggaagcaatctcccgcaaacgcagaggcatttcccacgtttttccctgatccatttcacagagattcaatgacttgtgtcctccaagtaattacaagtgccaccccagtgttttaattcggaaacaaatgttcagaatcaatgctgtgacaactgtggtgtgtaatactccacccgaaggtgtaacgcgcctggaagcgtatcagagctctcagtgaacgtgctttctgcatggtaacgcagtggtcaagcctcccacagacctcctccgatgctacactagtttcttggatcaccagtcgaatcctaggctatatactacgtctacaatacagctagggattgtcttagcattttctgcgtaaaatgtgacagcttttcgtggacccgatgtgtgtctccacgggtgccttgggacctggcagactttgggaacaggcttacaagcgaagcagggaaaaagcacgaaagtataccgtatgctattggtgcagcgatcatcaatgcgaagtctcggatggtctgatagtccgaatggtccaccgattccccacgagtagccgtgtatgtgtacgatttgtgccgcgtaccctgggtgatcccgaaagggatatcggccgtgttctttgtttcgcccatatagacaatggaaacgcctttgaatacacacactctctagctcgtgagcgtctgaatatatcttgtttgagtccatctgcccttccgctacgtaaggacaaatgcgaccgtacacttcctctttgcctgccgcgaaggtgcgcggggccgctaggtgaaagcccgtggcgtgtctgcctcaacgaggactcgatatagagagtaaaaatcacggtactagcgagactgtttagccgtgtccaaacagaaatgctcactgaaaacgggcaagctcccccacgcacgtcaacctgtgggcaatcccgtcgtcggggacgcatttaacatctttctctgtcctgcgctacagccgagctgccgctacttgacaaggaagccttctaaaattctccgtccctttgccccttcagtttttctcactcaaaaatatagagacgaaacatagcaaaataaatgtgccttgtagtggggcgtaacccacatcaaaaattctgaagaggttaaatcgagcaagagacccgacaactacagatgaggatccggagagcagaaatgacatgacgatggctggcacgcggatcaagcgtttgagagcggacgcggcgcgggtcaacgacggcgggcaggctgcttgtaaagtgtcagcttccgctcttctgcattggccgcaaaagggtgttacttgctgaagatatttgcgcaatccctcttcagagagctcagatactcgttcctatgcatacagctaatagtgcatttccccttctctgagaggtctgtctcctgtgtcgcctgctgctgcggctgctagtacgggctgcgtcgcggacaagcgcgcggactgtggcgccgaagagtcaagcgacaattcttctgcgttctacggagctatcgttcttctgtcgtgctatccggtgtgttttttaagtgaatgtatctgctcggaccttggcgacgtgtaacacgacctggtcccttaactccttgaccagcactggagatccggagtataccgcacagcgttgcaggaccgggcacctctggagccgcacggactgcacacacttccttttgatccaaccatgctttgaaactttcgtaaaaagcccaattcttgtctgaaaaaacagacggcacaagcctcaccgattctaccccgtgcacagtaatgatgcgctggaagtaactcaccgcaaaacagtaaaccccagcaagtcaacaaccagctcaagttcttgaccactgttttgagtgcaattctaccggtgaagttgcaagctgtcttaccagcagcacccagccgtacctcgtgacgagtgtatagtacggcaagtcttcgttgtcggattgtcgggtccagctcaaaggtttgtgtccgtgtagcgacga

SEQ ID NO: 2903 - DNA, 1960 bp, Toxoplasma gondii
  source 1..1960: mol_type = genomic DNA
aaaaagaggagtgacgatggaagggagaggcgacagacgaactttgggcgtggagagaagcgcgagagcggcagagggggaaagaggaggaagcgaaggcgccgtccgtcctcgaaaaggagaaagccgcaggggcaggcgccttcattgtgtcggagacaaccagaaagcagagcacatggacgcacaaacgaggcgttcgacagaacaggaagcggaggcgatggccgagctgcgaacaaaaagaagagtcccgaaaacaactgtggaacctgcgttaggtgccgccgtagagaatccacggatttcgttgaccgcgccctgcatgtccttgctcgcgggggaggagggcaggctgctgaggctagagccgagacacagacctttcagtggattgtgagacaacaggctgtgaatttcgaagctccctctctcctagacacacgcgaaaaggaagagaggactttagagggagggagggagacaagcatctgcgacgtcctgacagctgagaggcggagaagcaagcgtggacagccaggtctccttgttcgcgcaggaaagtccttctttctctccgcacgcaaaaacgggagacgggagtaaaaaagaggcatcttctgcgtagctttattccctcgacttttgttttctattccagaggcactcgacctgtttccaggcttggccggaggactctgtgaggactccggaaactgtgcattcgccccggaaatctggcgccttctcggtggaggaagagggcacaaccggacgcagaaacggtctctcctcaaaacaaattttaaaagacacactcaaatccgtgagaagacgagtcacgcgtgtgtggtttttgtcaaacgagaaactgaaggcgacgcagagccgtggttgccaacctgaaatggggtggaaatggtggagaagacccttcgatgtttctttcttttacagtcccgtcagcgagcgagtgtccatgacgttgactctgcgaacgaaaaatctgcaaggtgacgatcgaaaccggcgccgtgacccagctacgaaaagacgagagtcgcgatcatcgcgagacttgaaggagggcgtgtgaacaggagtcggagtctcgttttcgagacgcccacccacagaagttgtcagaaaagtaaagcgagatgctcgctccttgagaaaaggaatttccgcttgactcggctttcgttgaagattagattgagaaaagttcagcgagagttgagcgctctttttcgaaaaagagaatgcatgcgtttgtggcgctttctgtggcgtgcgcgttgcgacgcgagcgtttgccgccgtccattctttgtttttcttggaaaacgactttttcctcgtctctctgcaacactgaggtagatgacatttgcgtagtcttgtcactcgtcccatggttctgcgcgccgtcgccgccgttccattcctcggcgcaattcttgtcgcgactctgtttcgttcgccttcgccactcttcgtgagtgtttttttttgctgaagaaatcttttctctcgcgcttcagggaggtgtctttcttgctgcgagaggcgccgtgctttttctgtcttcctacagttcttccccctcctcgcccgcttctcctctgagagtgcaggggtccctttttttgtatatatatatctgccagcgttctctggctgtcgcagattttccgctcttcctgcaattattgatgctcatcggttgagttttatttctctgttgagtcgtctgtgttgctcgccgcgtttcctttcctgcgattcgggaggggctgtcggctctgttccgttgtcggcctttcctgccgttctggaccacggatttttttctcgaagtttcctctgtcttttcgtcttcctttttcgaaggagtcatatcctccctgcgacgcccctctgccgctccagcagttggcttgtttcttcgcgaaaa

SEQ ID NO: 2904 - DNA, 3570 bp, Toxoplasma gondii
  source 1..3570: mol_type = genomic DNA
ggtgttcatgacggtcgcaggcagtttagggtatagacggagttcgggagctggtccattgcggcagaactccgtgtagtttgtgtgctttcgaattgtcaagaaatagtgaaactttcagaggattcggatcgttaccttagctcgctaggtatctcactcttgtaaattgattcatctatcctcgcagtgaaatatgcagctgtgcagtctagatcagacgctttctcaaacgtggatggtcgggggaccaacacagaatgaaaaaactgctagggacgctcgcattttcaagtgtgcctctgatacacaaagtgacgagactctcacttgtggagtgaaggctggactgctcatgcgagttacacacataggcgtgctgattgtcgagccgcgatttcttccggtgcttttcaatcagaatgaagaacgtgtttgcttgttcggggtgaagtcaatgcagaatgcatcaaggacttgtggttggtgaaattaaagggggatccggcggccgaagcaaggcttcgactgtcgctcttcgtttatctcctgcaagagtgccgtgtgttaaccggggcaaggagacgtgctgtcaatccagggaacacacttgcgagcagcggtatatagaaataatgcctcgcccaaaaagcgtttgtcgtatcatggtgtcaatgtctattcatggctgaagcactcgatgtggcacgagagtgtgaggttgtaccaaacgttcgcttcacgagcttctatatttgcgaccaacgtgagggcttttcttcgtaaacatccatccgtgggaaatgtcgagacgctcatcgcaaactttttctccaactcccgtcagacccgatgtggctgttggcgttttaatggagagtgagtcattatggctgcacggtgcgtgtgtctcagaagggctaatgcattggtctccgctgatgaattcaaggatttattcactgttcgatatattgtctaaatttgctcattttttcaagtgaagccgggttttggtcattgtttggtacataccaaaggactatactgcttcttaagtcatacggtcctctacggatcactctctgacgtccaggtaagcattcgggctgttacacaagtgcatggaagcacgccacattgccagcaatatggtgaatgagtgaatctagagggtgtctacacatgtgagtggtaactctgctcatcgtaggctttgccacggatcgcaggtacgggacactccgcttgtgttacagacaggtaaagcgcttcacgagtagctattcggaaaaaaagaaaacggcaaagacggggacaatatactgtttgagggtactttttggcagaggaaaatttgcttttttatcccaacggcggacagacggaatggttttctcatggaatagcatgcagatgctgtcggtagactccctgaccacagaacggtgttcagtggaccgaggaaaagaactgctcgcagaatcatccattgttctgagatgttatctggctaccggtcacaacttcctctcccctggagacaaaggaaaggttcagtggcacttcttcgctgtctcagaggccctacagagcgtagcgtgttctttattcttgtgtaccgccatctgggcaatcttcaggtgtctgaggctcatagcagtgcgggaggcctgtttccctgctttctctctcctaagaaatctgactgcaccgctaagtcgtgcaacttaacattacaaaagtgaagagtcaatttagatagcaagatgctcaaggacgggtttagggttaccgcctgattagaaatagtgtcacgttgtgaaggcgttattgttagcctggtctataaggtatatcgaggaaaacacgacactaagtttgtcatttagagattctggaaacttaaactgcaaataacggtttgatttaccataaagggggggacccacctcgggctttagtgtgtgccacttccctctttgtatgcctgtggattgctgatctgctccgcatttccttggaacaaagtgcgctttccgtcgctcgtggtcaccttgcagtggcgtgtgtttgcgcttcgctggcagaaaaataaaaagactagcgcgtacgttggaaaagcactgtgaactccagcgttgccttgtcgcagcataaccaaagtggcacgcgtgcaaaaggaaaccatcaggaagtctgcgtgtcacggcaagtttttttgtccggtaagaagctcagttcatacttcggttgtcgtgcatgtcaaagcgcgttagtcaaaatccagcgcttctagcgtaggtttgtggtagaagggagctcgtagcgtactcctcaccatacccctgtctgcgacggacagtctctttgcatctctcgctacacacagaaacccagtcgatcacttggcgagaaactcgtcttttcatcatcatgataggtcatgggaagctgcggtggttcttgcgaggagagtagcattcccggtactaaccctagtttcgagtcccgttcggccgctgtggtggctgctccggtcttgtgtgcccgcaggttgacacagtgtggctcatccacgtctacttcgccgttccatatctcgtacgcaagcagtttcttcatcgaaggaattacagaaactctgctggagcgcaaggaagctcaaaggaaactgaaccggaagttccacatgtcttccttcccttggaaagccggtgtgctggccagccacgcatgcggagcggcaacgcgatattcgcacctcagtgttgtggacgtcgatccatttgagtctttcacccgtcgctacgtaagggcatctatccgtcagcacgaacacaaaagcacgttcttcttcgttgaaagttcctgtaggtggcttttctgtttcaagtgaggcgagagaggcaactccttcgccatcccggctcatacgtaacacagtggcagttagcaaaccctggcccccctcaacccagcgaaccgtgacttttccgtttcgactttcttttctttcttcgtggaaagtcggtatgttctttcggaaaagtgccgccgtctgtctgagttgaccaaattgtggtatggagtttgtctctgacgatcttccgcttccggcggtgaaatgtgaggcgagacacagaagccagcaacgttacaaggctgacccacccggcagcattgcgtgagattcgcatgtattgggtccacaaaagactgtgcgctcctctctgcgtagtgacttcgcatcataatcttgcctcattcactgttaacgaaagaagggcttaggcgtttcgtggtcacagacagtgctcttgtaaagaatgagggcgatgtaagattctgacgatcctgtggcgggagtgtcatccaggccccctatattttcatgcaaggaagggtaaaggtactctgcacatgtcattcgaatggtcgtcgcttcgctcctctgagttctggagttctccggtccactcggctttcaggtttctgcccatctcgagtactgaagcgacgctggcatcttcattcagaactctgtttgcaggccacataaagaaaata

SEQ ID NO: 2905 - DNA, 4062 bp, Toxoplasma gondii
  source 1..4062: mol_type = genomic DNA
ttgtcatttccgtcaaagacagcaaagtccagccagccttgctgaataaactcctggaaggcaggatgtttggagcagaacgcgacgtttgcttctgccacatccgagaagacgtagagaaaaggtttttccgggagccccaggtcgcgaaagaggtgttgatatctcaagagcgcacgcagcagcaggtaggtgaatcggccgtggccgccgccgatctcgacgatgacaacgcgagtcgccagcgaatcttctgctgccgcttgagacccggccctctcgccctggacgctggacgccttcttctgcatcgcaaagagatcctggaggaagttgaagatcacgcgagcgtacgagcgacagagtcgtgagttgctcgtcacgaagctcgggacgtagtcctgtgcccaggccgtgatcgccatttgtttgtagtaattttccagcatgtcccacaaaaccgactcgcaaagcagcacgcgcctttctacgcaaaacttctcgtccggattctgctccaccggagcctcgccgccaactgtcgcgattccggagccttcgaaagaagaggcggaggacgacggggaggaagttgaaggggatgctgcaggttgttcagatccctccttgccggaggctttccctagctctgtgtcggccttcatcgtgaatgtgtggatcgggataatgttgtttccaagtgacaagaacaatctggggtgaatgtcggtctccgatctctggagaaacaggaaagccgtttggtgacaagagcagcaagtccttgccttcaaaaaagtggggaaaaagactcaaactgtgaggattcttgagggactcgcgtcagcagagctcgaagcggcgtgggggcaggacgaccgtgggagaaaggtgtacagtagaccagggagaaagagaagacggggtagaaaaaacacaaggggagcaagtgagccaggagcctttaaaaaagatattgtgaggatcgcatacgctacacatccgggcaggccgccaagtggaggattatcagacacgtgactcggtaaaacaaaccgaatttcagcttcggctggccaacacgaaattgacgacggacactttgacctaaaagaaaaacacatttacgattcgctgaaaagcgttttcctcgggattcctctgcacctcgattcgctgttttctagtcgcgtgccgtgagcgaccgtgccaaacagactggtgtggttttgagggaaaaacccaatgaacattcccgacgtaagtcgcgctcagacgcgtttcttttaggaatgtgcacgaacagagacacagaatgccgcgtttctgcaagaaaaaacctaaaacacggcagtcgagacgccaggagaaacaatgcgatggagggcggcggtccaaacaaaaggtggaatccggccttttccggcttcttcccgtcttcacgactcaaacccgaactctcagcatgaaaaactttcctcagtcgcttacgagacacggagcgggggctgtgaactaagacacagtcaggcggggctccggcaaaagacgaggcagaaattcttttaggtctacagttagactggtagcaacggagtagctgagtgccggagaagaggaaaacgttcgctgcaagagaactgctgaaaagaccaaaatcgagggactttgtgcgcgctgttgcttgagaccggaaagtccggcgctttcaaccatacggggttccttcccctttccgatatcttgtcagacaaagtatgtgaagcgctgggtgccgttccaaactaaagaaggccaatactatcggcggaagaagagggaccagcgacgacgcgagcagccgcgacaagaagacgcgtgtcttgcccagagacggcgagagcctttggacgcatttctttcggcagaaacagcggcggaggaccgcagaaaagcgattggagcgaaagtccgaaaaaaagcatcagctgtctgctgaaagatgggtttcgtcatcccacacggacccagaggaactctgtgcactggtaacttcgggggtaactgtgactccagctgggggcgagaagaaggcgggagaagagcgctagtcgaggtagcccgaactggaacttacgaagacaaaacgtgagtggaagggagaagagcggccacacaacttcagaggtgagagctctacgccattaaagtcgcagggcagagagaaaagagaggaaacaaacggtctcagtgctcggtcagtctctgaatgcgctcggacaactctcgagagatctttgaaaaagaacacccagggcgcgcgcgctctggcgagcgtgcacgtccgcgaacgcgagagtctttcttctaaagaagcggggaaggcttctatgtctgtgattcgcggagtttttcatgtttcaagaaactgttaaacgacggagaaaaaaccaatgagtagggtcttgagtcatgcccacttctcgctttctaaacagctatcttcattttttacctctcattctgcagccggtcttgcgaggtcttccgtgctaggtccgcgcccgcgcgctcagctccagaggagctagacattcggaatctttgggtacctttgcagatttatttcttcaaacgaggagaaacacccttgtttccgcgactgagttctcgggtaaggccagttgtggtgctgaaggagaccccagatatcgggcatcagttttctgcagactcgaatagccgcgttgtggccgcggctgcagtacgcacggcactgcggtcgtttggaaaaggcacccgtttaacctttccttgtatttttttaaaacaggatttgaatacaaatactctggagcgtttctcaggcaagggtaaaggcccgcccttaatcaaatttttccagtcttgtccgggccgtgtctgcgctcccgggggactcaacgcgcgctgagagacatctggaaaacccccagcccaacagcccgtccccgtgcctttcttgatgtatgttgacggcttgtagagagttgtgtgattgcattctatgagtgtatttatgactttgataaagagtcagagaagtgtcgacgtgctcggttgcgtccactaccctggcgtggaactccaacggttcttttgtagacagctatccctcgaggtcgacatcccggttccgttttcttttgcagccaggaagtcttgttcggaatgtggaaatgcagatacgtccaaaaggagccacatgacggcatctgcacttcgttctttcaactatatccagcctcgaatgcaggatgcgtgctgcggggccttgaaattcgagtttgtcatcgagcctgggaaggattgaatttttcgtttttcatcgctaaaacgcggcctcctctctctgcagtacacgttcttccatgggaagctccatgtgaatgtagcgaatgccttatagatacccatgatacggttatgtgacggatcttgtccaccggtcggtctttcccgcgaacgcggtgaaaatgtcgtgataaaacaagtgtcgcgcaatgttaaaagccgcgtttagtgaaagagtaaaacagcctctacgttgtgcattagaaactcgtcggtatgaactctactatttttaggtgcgagtctgcttgtgttcatgctcaagttattatagctgtaggccttttatgtaaacacgcagatgaaacctacctcacatcgtgtgtcggccgcgtttcccggatagttcactttcccgacaatcacgatctaccggaatgactgccgcccgtcctgttcctgaaataaagaaactgtggctctcttttcctaattcctttcctgcactgttgggtatgcgccggtgtacgccaccggtcaatgttcgtttgttaggaccccagacatgcaattcacgctcctccatcttgtccacgagatgtgtgtttgcgaaatacactctgtactcgtcctcttcagcttgcgtttccttgcttttcagctgctcaagaccaaggaggcgtcgctcgcacgaccctgtctagccgggtccttccgtttcccctttttgacaaaggccagcggacaaga

SEQ ID NO: 2906 - DNA, 2401 bp, Toxoplasma gondii
  source 1..2401: mol_type = genomic DNA
ccctgaaagctcgcagatgctatagcacgttctatccgagtgaagaagcctcagttaaacggcggtacaggttattattcacattttgcgtcgagcgagtcgtgcatgcaaaagaactcagaaacagctggattttccgttgataaagttcagcgctctgatgctctcgagctccaaatcgatgttgagccgggctgtaaagacaccgcatgcgactacttaagccgcagttcccttttgtcaacagttcgagcagttagtggatatccacgcgaaccaattgactgctgtatttgatgttagcgaactgtagccacaacagggttgtgcatgctggggactgcgagtaggggcaaacgcaagtcaacgacgcattgctgagaagtgcgtgtcatcacttattcagagaggagacgacgtccgcatcttcctgtatatgcttatgggcgtgtttgcctgcatttacatacgcattttgggagtgaaacatccacatgtgggcatctatatgcacatgaatacacgcacgtctccatatctcagtttccacaacattttttaataactccatgtctgtatgtgtttcagccgacacaaaaacatccagtaaatacgtctacaatcccagatatgcagtcggttcgcatagacatataacgtacgtaaacagattctttgcagccatgcggacagccttacctacaaagtgtctcggttgttcgacatcacagccccacacgtgaactgtcagaaggaaacgtgaagaaagtgcagtttccactagagcaaccagtgcgactcttttgctcctgccgaaaaagggtgtcggagaaactctttcttgcctcatttgtcgcattctcattggacaggaatttctttagcccgacttgctttcgatggaaaactaggtgtcaagacacccgatcaaggcatgcaacgacgcgttcctatctcccctcattctcctgaaaaccgaatcgacgaagtgggttcatttgtgtgtgcagcaatatcggtagacgtgtatgcatatttgtgtgtatctgtatgttgtctcttccttttctatctgtgaacagagagatatcgagaactgcatatgcatgaggttctgtgcagtcttcctcgatctggttgattgttcacaagttgctctgtgtatgctgtgtcacgtattaccctttttgagatactctatgcgtaaatctctctctggatcactcgtcatctattcccacgacagtgtacggtccggtgaatgaactgcctttcctgaacacgcacaagtgaagaatcttcccacgttggcaaaaatcaagagaaacaaagagtcccgctaaagtttctcttcggagtcaagctcttcagggaatctctaactgtgcctacacgccagcgcaaaagcgaacgcgccgagctcgctggccgtctgtacactgcagcacaccgcgggtgtgtgtcgcactctcttcgtgtgtgttctttgcggctgtttctccgtgtttctttcccctggattccccctttgtcgcttttttcctctctgtggcttctgctgcttccgagagacccgcggcgtttccacccgtgctcccggggtccgaccgcagtgactcttagtgaagacaaagtcggcagcctggcgggcgccgcgagaaaagccgctctgcgcatgcacaaatcgaccgttcttgcctgggaatccagagacctttctcgctggaaaatccgcgcaggaactccagagaaaaaatctgccgtttcaactcgctggatggaacctgcgtgtgtggacgtgggtcgctgtacgtacaccgcagatgtggacggatgtgcatctgcacaagcgaagcagtgtgtttgtgtgtcgttgtccaggagcgctcccgaacaatcttgatttcttttcaaggagctctgcgggagaaatttgtccttctgtcctcgagcgtttcatttctgtcgtcgtcctgtctcttccccgtcttcgcgtggaatgtgagccacccatgcacagtctgtagggaagggagggaaggaagggaaggaacggagaacggcggacgaggaagaagcgaggcacagtggaaagggagagaaacgagtggagccgcgcggcggccctcgtctgcgtgttttctcgtctagagaaaagaggcggactgcgcgtctcttgtttccctcttcgcctcctgtgcaaatctgcttctgacgctcctccaagagacaactggaactttcacctgcccaccaccccgaaagcgaagacaacacgaaacgaagagtacggggcgagacgacagagaagagggaagattcaagaagatcaagaagggcatggacgcgagccgataaagagcaaagaacgcagatcgaagacgtcaaaacgagagcaaga

SEQ ID NO: 2907 - DNA, 2072 bp, Toxoplasma gondii
  source 1..2072: mol_type = genomic DNA
accgattattgactgtggagattccacgggtacaatcgacagagaagacacggtggcctcctccccctctactgccctttgcttgtgaatatcatgtgcctgcctcttctcgagcaaccgccttcgcacactgcctcggcgttttcggatggctgtctcactgcgtcgagctgctccttcactcccacgagctgctgaaggctgagggaggcgagactggcgggggagcgcggggcctggctcgcggcgcctgcagcgatggcagccatttctctttcgcgcagaaagtggaactttgccgtttctttggactaccacaggacagcaagcgagaagaagctgcgacagggagacgcggagacgtagcgtgagccggaaaaagaggaagaaaatggtcgcgttccaaaacggttctcacagaatcaaaaaggcaaggtgtatctggaaggctgtcgaggcagaaaagccaccgaggagcagcttgcagagaagcagcgaccgacacgacctgtacatacacccacaacttccctgagaggcttgctagagccgaaagaccggtgaggaggctgaggagagaggcgcgtaaaggcgacgcgacgacggggatggaaagttcaggtgcagctcgacggagaaggatttttgtgaagcgaaggttttgagaaataatcgaattcgtgcaccttcaaccaaaatatgggatgtgtggaagaaaaaacttgaaaatggatctcagaaagctcagaagacgacctcctggatttcctgcagacggctttcttccgggaagaacacgacggcggttgagccaggagagacgaggaccgcgacggctgacagcgacaggaagcttcactcagagcagaagaactcatgcatgcgcgtttgtgcactaccaggctgtctttggagattcaaattcgcttctgaacgacacaaaacagcgacagacaggtgaacgtttaggcctcgcctctgtatataggagagagcgcgacgctgagagctgcctcccagagagggagagacgcgagagtccaggcgaaaagagaggagacggagagggagaagtcggagagaagaagggaaggaagagagagcgttgaattattgtggcgcttcttgccggcggaagcaaaaggagaaaaccgcccgtatgctccgtgatttttggctatccgacacaacagcacctgcggtggatgtacactcgaaatggagttgcggaactcgtccttcgaagtgagaaacgcgcagtcgcgaacgcgttttcttgttgtgcattagaaacaagacgcaggaaaatcgaagctttagtcacagtcaccttccctcactctctgcctggacttggtctcccgctgtgtgtacacacaggaccgcatgcgcaggtcctttttgcgcgattttcttggtgtgcatgcgtcgccggcgccaggtacccgagaaaaggtggaagacgcctttcgaaaccaagaaacgttctactttgtcctcaaaaggacttcctttcgtctgtgccgcgtatccgaccgtcctgagtctcggattcgttctgttcgggagattctgcggcgccattcgttctccctcgatctatcgcttctgccgcgcaacggggagagagagtcttctgcgtacatctcgctgctctctctcccttttgccgtcgaagcagacttaaaccatatcccagtggcacaacagcttgtttttcgtctctagcaagcttaaaggtccatggtaggcttctcgccgtcggcctcaccgcgtctcttttcctcgttttcgttccttctctttctctgctccccttcccgacacattctttgctgttttccttgttcctctttctctcatttcttcgtctttccccacgctccggtcttcttcagcccgcgatcgatgtccgcggtctctcctcaacgtcgactgtgacgaggtcttcacgtacctttttgctccagagcctctcgttttcttcttcttctctccaacaatctttgtgtcctcctgccttccctcctcctcttgcgactgtttcctaaacaggtatctgcttcgcacga

SEQ ID NO: 2908 - DNA, 2773 bp, Toxoplasma gondii
  source 1..2773: mol_type = genomic DNA
ctgtagatggttgagaaaagacaggtttctgtgaaatttcatcgaaggaaatggagggtttcaatctcttatctcgtgatcatgactgtagcatctctcgtgggcaaaagacggtgtctcgtcttgctctgctctgcgaatgtcgacgttgttaggcccctgcatcacacgtcgctcccgcgttttgctgcagtaaagtatgctgtgcttgcatctacaattttttacagaaatatgagcacatgtttcgactcgagctccagcagaaacggtgaattcggtaaagtggcaaagatggcaagttgaaaaaacactggcctcagacggaagcacggctcagggaccgggacaccagccagggaaaatgcgaatcgccttctcgtcagtttgttagattggagatgcacatgcggatgtacatctgtggggactcctcctcgaagaatttctgatatgttagaagctcctgcaagataaaacatgaacagacagacgaaaacatgaagcggaatcgtacacctctgactgctgcattctgcgtgccgtgaactcacacagaataagacatcggggagacatgatagggggttcgactgtcggatttcacagaacggacggatacaaccggatcttccctcttgtttttaagctctagaatatcggaggtgaaacggcttcataccagggtcctatcctttcagatgttgaatgtgcgtgtgtgttgctgcatgccacaaagttgttgggttgacagttctgtattcgtaaaacacatgatctctgcacgccgtactagcatcttgctttccgtaaacagacccaagcgctctagtacattcagagtgttttttcctcccacaacagatcgtagcagcagacagtacattggcggctcagttctagtgcagttcagaagggtctcctcgacgatacggcttcgtgttgttgtgcacttctatatcctgaagaacaaccatacaattgaagacgagtatgtcgcctcccgcaacagtttagtcacctctcctgttgcgcagtagaaggtcatagaaggattaaagattcaggaggaggaactcctgtggtgatcaccacaatgtctgtgcaaggcgttgcctccccttcgtagtccaccgggcccaatctatagtgtgactcggtttatatttagagtatgtgcgtgcatgtatacacgtacgtcatggaggaacacactcctccagatgacggtccaaagcacgcaagcaacgaccacgacaaagtcatacaacacgaactttagcgtctccacatttgtgagtgacctggtgaagcaacgcaacacgatttagacgatgtgccacaatgaaaggaatttccagaacgcttccgcgtctcgaaaagggagtgcagcgcttgtgtttcaagaactgtgcgaaagcagttggtacaaaggcgtccgctgttttgcctctcgttcttcctatagtctagaacacctcatcacatgcctgttgcgagctgtgttgtagtaacagtgcctatacctttctgtttctttcctattttgcggggggtttgtcttccacggaccatctcaagtgaacattttcccgtcgtccatagggaacggcttcttcatgttttaggccacagggcacatgtttccgctgcagtattgccacccccagaggatctaaaaactgctttcctggtcgcttcgcgcgcctgttgcggattttctgccgaaaaaccgaatctctaagttccctgtttctctggaaccgccgtgaagtcgccagaaaagattttcgtagcctagttctcaaaattcacttctggggatagggaagcgctctgcgttgtcgaattcctcccttcccgacccctaaaggttctgttccccgtccgccccggttgacgactttctcgcgcatgtttttctgtctcagcatgcttattggggtgactggggctgagacgtttgcagctagttgggggtttgcttcggcttttttcgaccgtctgatgacccgcttttcctttcgacgatctggcgcttcagtggttgtacttttccgaaaacgccggacctccgggagcctcagcaaaatttgcgcctgcctgcatgtcggtgactgccgcgtggcttctcgccttttgcgggtcacagtttctcttggccgtggtggcagcattttctgaacacttcaaaagggatttttttcaggagattttgcgcggggaattcgtttcgcggactagagctgccccccaaaggtgttcgactcgtgaacgttcctgcgtttccgacgcccggggcgggagaccctgcatttctggaagtcagccttccccccagcggggtgggcatttccggagactgaaatttctgcttcttcaaatgtgttcgacgtggcttttttctgtctcaggtgttgtttttctggtgttccctcgagcgatttggccctccgccgtttgcgcgttggcaccccaggcgtacccttctgtaggttccactccctgcggcatttggtcacgttttctagtcgctttttagcgaaactctttccacttttctccttgaatttcccctcttctctccactccccgtctccatcttccgcttacatatctccggaactccagtaaacccttgtttcagctgtcgagttacaccgtaccaggccccgccccttccctctccctctccctgctggcctagaaagccttgcttttttccgaatttctgcatttgaaccgcgtctgctttctctttagcaacaaaaaa

SEQ ID NO: 2909 - DNA, 2105 bp, Toxoplasma gondii
  source 1..2105: mol_type = genomic DNA
aaggtgtgtgattttgaaacgtctgaactggtagaacttctgtgttccatgtgaattcttgtctgttttgctttcaggaggtgaatcgaaagatcaagaaagcgttctgccctgctggcgttattgacggaaacccatgtgtaacttacgtggagcagctggttttccctgcattcggagagtttgcagtcaaacggtcggaagcaaacggtggcgatgtgacttacgccaccgtggaggaattcagaaatgcgtatatcaaaggaaatctgcatccgggagacctcaaggaaagtctcgcacgggaacttaatcgaagactggagccgattcgcaagcactttacggaaaatgagcatgccaaacaactgctgcagcaaattaaagcatacaaagtgacgaaatagggtcgccgtggctccatcaatgtgtggttccttaagtgtctacacatccgatgtactgttttgtccccggtacgggagagaactcggaaagtcgctattctcactcagtcgtgtcaggagggtctcaaatgtgtttgggaaagcttgtacctcgtgttaatcgccgaactgtatgggggggagacgcccgtgtttggagacacgagaatttttggatccgcgaatgggcagtggttgggttgctctcagactcttgaagacaccgtccacatattcgaccgaaaaacgatcaaaagttctccagtgttctgctgccaacggagacacatccacgtagaatgcacacagaaaggagagtcaactggctgtaccgcgcgcctgaccatccacaaaaaaattgtgaaccggtatcagccaacgcaacggattatagttcacccagctatcagtaggtatatcacggttactgctttccatattccttggcacagtacatgtggggagttagtatcaacgcaggtgcatgttccgctaacgatactgctgatcacgttcgacggcccaccggcgatggtagagcgtggtttcgaatgatgctgacttatgcagagagaacagaggctgtgtgtcagtggacgaggaccggagttcttagcagactgtcagcagaggaaatcaaggttgtccatccatgtgagcgaaagagaactggagttcttggtagattatgatttagaagtgaccccatttgagtcccggcgagacgggcattggcaacaaagctttccaacgacagttcgattcttttggatacatactgagcgttaaaaaactatgtttctgctctgcttactgtcttatccagagtttacaacacagagtggttcacgtaccgagtagcttttccatattgggtgaagaaccgactggatgcatgcagacgagaaaccagacatcgtactcccgttcctacggttgctgagtttacagcttcctggtttttgactagaggacgcacagaaaaagttatcagcttgcagggattctagtccctgagtaggtggtggcttctagtgaagcctaaagaagacattcgggaagtttcccgatgtgagagccgtaaaatctagtttccattgcaaagctgccgagttttccagttaaaccggagcaaacgcattcgcaaatcgtttatttgccagtgtacttggtgacggccttggtgccctcagagacggcgtgcttggcaagttcgccagggaggacaagacggacggcagtctggatctctcgggaggacagagtatccttcttgttgtacttgcagagcttgccggcctcagtggcaattttgtcgaaggtatcagcgatgaaagaagtcatgatcatcatcgacttcttgctgatcccagtctcggggtgcacctgcttcaacaccttgaagatgtaagagctgtacgactccgctctcttcttgcccttgcccttcttgccagagtccttggacttggcgactttcgcggacttcttggccaccattttcgtagaaaatgcaggaatgcgacgtaaacgattggggagaaaaaggtcacaaatgcgtgctttcgggatcgaaaactagaatgtgattctagtgaccacccccgcacgcgaccatcacccactctttcgtcccggcaccaggtgcacaaacggcga

SEQ ID NO: 2910 - DNA, 2579 bp, Toxoplasma gondii
  source 1..2579: mol_type = genomic DNA
tcgcgcatgcgttgctcagccttttcttcttgttcttcgtcctcagcggcctcctctgagccggttttcagtcgtttctggccgtcggctccaccgtcgttctctccgctttgcgcgcccgcctcccgcttcttccgccgcatctcgtccagcgcgtgcaccgcggtcttcgcgtataaagcgacctgccgcacatcggcgtctggccaggcctgcggcatcactttctcgaggcggtcgtcggccacgaggctccgctccccggcttcccagaaaggcaggccttcttcgccgcggctatctccgtcgaggtgctgtccctgggccccctcgagggcgccagggagctttatcggcagggtggggtcgaggaccaaaagcgtctgcgtgcgagaggcagccgcgtcgccgagcgcaggcgcgaagacgctgctggggagctggcttttgtccccgaggcccgagtggccaacgggggcgggcaggggcgcgccggcggagcccgcgagcttgttggcggcgggggagagagactcgaagaaagagacgatcttggaccgttccagcacgttgatgtaccgatggcctttctgcgcaatgtagctatatgtgtagagctccttcggcgtcgagagcagaagaaaaatgtcggcgagagagaacgactcctttcgacggctttccaatcccgaaggcagagtcgcaggcaagtagcagttcaactcggggaagacaagggcctcttcgccgcggacgacctccaagcgacaggaggctgaagacgcagacttcttcaaacttgcgtggagcagcgccaggggatccacgctgaagccgctcgctttcccggtagagtcaggaagcgaagtagaggaaaaaaacgacgcagaggagacctctggcgaggcagcgacggggccatcgctctcgtcgcgccctgccgccctgctctcgcttcctgcctcctccatggtgacgaggccaggcaaacgacggcagacgacgagacccgaactgagttgaagcacgcaggattgaactgagagtcagttccgcacaagtcgagagcagaggaacacagaaacgacggcgagcagaacgatggtcaccggaaaacgcgggtcccgaaacaccgaggcggaagaagacagatgcaaatggaaagccgtgaggacggaaacactgaagaaaccaagagggaagaagctttcaccctcgcactgcacctgcctcctcccttctctcctctcccgtcgccgtcactcaccagatcagcgacgccccaggaaaaatggcggccaggctggactctttcgcgctgttctctctctgtgtcctcgtttgtcccctgcactgcgtcttctctcgcgaatgagaggagcaggaagaactagtaagacgtttacggggacagctggaagagcgtggaacgcgaagagggtggaagcgagtagcctcgagagcaggaagagaaggcaactgcagtgaaagaaagtcgagcgccgcgtcctcagacaactctcgaacgaggccctgaggtccggcggcctgcacgggaggacggtaggatggagtcgggggtttgaacgtggggacgcggactggaaagaacgatatgggagagacggtggacatcaggggaggacaaggcgaggaaaaacaattgaaaagtgagtttcaggtctcttttctctgttcagacggaactggagactgccgctgtcgcgccactgtgagagttggacggcctaagaggtggcagacgaaaaggactgaatacagactccggagggaagagcagagctgactgatgcgtcctcgttcgtcttggctatctttgtcttgcaaactcgaggcaaaagagaaacaaagaaagaaaggacttgaggtgggggggaagaagagagcgacgagatgtcgatccccatcgcatgcgtgcgctcgggtctccagaagtacgcgaaaaggcggaagaagcgggctcgttgtttgtagcttcattgacggaagagaaaggaaagcaagtccccgtcactgaaaaagcgaggcagtattatgtttccgcatattctctgccgatccgcaaaaatccgtgtcattcctttgctccagcgaaccgctgcaggccccgtccccagccagccgagcatctcgctcttgagcccgcgacccgtacgctcaactgttgtctttctcgtctttctcctcttcctttcctctctctcccttccctccgaagtgcccatgattctcgcttcgccacctgctcgccttttctcctgtttctatcgccgttttttcttcctgttcgcgcgtaggagcttcttctgatcgacgacttgtctccagttgggggtttacccatgcgtctctcgttcctctctgtctccttctttggttggtcagtcgcgtttcgcctcacctgactcgccgtcctgttccctccgaaaaacgcgttacatttctttcccccagaagcgcgtttctgactgttttgccgtcctttacgttgcttcacaccagagaaggtttgggcgtcgacagaaaagtggggaaccgtttgaaagaatagacgaaga

SEQ ID NO: 2911 - DNA, 5032 bp, Toxoplasma gondii
  source 1..5032: mol_type = genomic DNA
gaacgcagaactcatggtggcgaagggacgacttgttcgaaaagcaggggagacgggagaagggccaaaaaaggcaggcactgacgaagaggaagaggcagaaaatcttccgcgagcagcttttctgcgctgagtggaggattcagaggctgtaggcacttgcgtatgagccagatcgcggctgcatcccaaatcacccgcagtgcatgaatgtaggaagttgcttgaggctctaatctcacttccactgctggctgaaagacgcgtcgaagcgcggctacacctttccgccgaaatcggtgtgcaagcggagctacagtctctccctagatcgctactgcgaatgcccctgcggatctcgcagaccagtgtctgaagtgcacagggaaaagaaataagcgatggacgagcacgaatgcgtccgcaagatatcgagaccattttgctccccttttgccaaaagtcgcacagcaaaggatttcttttcgttaaacaatacacgacaacacaccaggtagaaacacgtggagatgtggcatttggaaattaaccacagcggccgaggttgctgtacgcgttgaaactggaagcaggggcttcgattacaaataacacatcgggaactttccgcacaaagaacatatgtggtaagtctgccgtagtcatttgaacctctcgacgcatcggacaccttcacctgaacaagggttcttcaaaggcaaacacgacgaagattgctggtgtaacagaaggtacagtggcgcgggcatgctggaaaacatgtgattctataatcggtgcaagcacacatctgcgctggacagtagtcatagcggatgcctgtgtgagtatattgctgacaacggcacgtggcttaaggggatacaattttccagaaagacaacataagctgttccgatgcccctgcagacgactgtgaacacaacactcagaacaaatgaattggcagaaaagacaaaataacaatataacacttgaccgcgaacatgtgagagatgtcatcgactagcagacaaaatttgtgcatgcactgctcgtcagtgttgacaatgtcacgagcggagccacgggcctaaaaaggagagaaccaagtaactcagacaaatttcgttccctgacaaacaccatgcttcttagtgaagaaagcaaacacaaacgaaaaaggatgcggagaaacggagtcaagcgacaagcggccacacgcgcactagcagcacagagacgtgtactttgcgcggggctccacggcggaaagaaatccaaagtacttctccaggaaactgaacaccatctcttgagagaacacacagaacaggaaggattgattcctaacaaacggtgccttcggaggagcattctagtgtcagagttgcggcggctctgttgactgtgtgaccgtaggatagtgccgaagatagcgcagacaaaaggttcctgccgtgatgccgatctgctacccagacgatctggtcgcttattgctacgggatccccgcagaaatgccagttttccttaccttctgctctgcgccgaagcacccaaggagacgatctgcttcctggttctctccaaaagttgaaactatttgcagacagttgagcttttgcctgctgaagtaggcctgagcgtccacgtggccagtggtctgagccacactacaggagcgacggtcagcgctgcttggaagtagagcacgaatatcgttcaccattgacagagaaagaagacgggataaattgtaacccccagcttaaatctttgcatgttcaaaagcccccctttttcgcctattgattttcccaggggggcattgagtggcaagttgaacagttggccgaggttgaggaaagcggcaagcaacgtcatggcagctggccgggacaaggcggccggtaacgatcagatgaattatcagagaaattattccgtctgatgtaaatgtgtcagtgaggcacgtggtgcatctgtgggtacattggtttgatgattgatagaacacagaggaaccactactgctgcttaacgcagaacatagagccactagccgtactcaatttgaaacattttctgttgggctggcggagacgatgaggtctttaccagttgagctatgttgtctgggatgtgcagaagtcaactgggttacggaaaaaagcatccgggatattatctccatctcccgctgttccgcattcgccaattcacagcctgagggatattctactggatttcaaagctagcaggacggaaacaatcatctgtgccgctgttagcccaacacggttatgatatgatatgctgaactgccggaaggtgaatcaactgtcacactcagaccgttgagcgggtgcctgatcgaacagactgtatcacgggttcgccttttcaggggagcacaatagaaactcctgaaaagaccttcagagctcttaaaactagttccaattaacatgtgcgaatatttattcttgtagcgcctccgttgccccgcaactaaacggcccacttcaccggccatgaccggtcgtcaggtttcgcgaggctggttattgcgtctgtgcttttacagtattcatcggaggtgtctgatcgaaaaggatcgggttcctgaaatagcttctggcacgtaaagttgctaaaatcgaatcaccagggacagtcaatcgagatgtgcgtgatgcgttgcatcaagcaaccgatccgacaatgagttgcgacaagtgccatcgagactgtaggacggtgtgctgtaaacgaaagagacatacggtccctgccagcaaaggctttactgatgtggaaagccttggtgcggaactgctcgcatcgggtcacaagaccaactgagcggaagaaactgtctttcctaaagagcgaggaagtgtgagtatccaaggcgacgcagcagaaatatttgcgcaagcattgttcagccactatatacgccagcatcccacttgtagtaggagagatatgaagaactgggatttcctgcatggtagtgaatccgttatttgccaagaaacttctttcatgctacaactggcagaacgtatctatagcagcggggagcatttgggggcactcccggtgcgctgatccgaaaagcggccactcttctaccaaatgacgcaagaagggcctcagtcagggatctaaaataagccttccttggaagcaactggtaggagaccctcacctcagaggcggcagcatttgcacacgcataattctctacaggttcgctgtacagaagagccagtgaaagctgtgtgtcatttggaggcacatatcccttcgacaactgcttgcaggggcggataatctggactggcgttatccacttttttcccgttatcgttcgcgcacatggactgccttcactccgtaaagctgcttccgaaacaaacaaaccagcaagacacaaactgacaatgcatctggcgcctctgctgcgttggctttccgcttttccatcccgcggaaggtgatagacaaaacgccctaagaactcaccgcctccgaggtttttcattcggcgaccatctttagtcgacattcagtgaatgggctctctctgcaatgcgctcacccgcaaacaccggtgaaaaaaggtcccactggatctacttcggatctttccggaggagatgcagtgccttcgacaattctaaagaacgatgctcacgagagaaaacgcagaatcattttcggattttcgtgtgccacatttctttggttttgaaggcactgcatggcactgttccaaacacagctcttggcgtcggtgtcttgccaacacgctgcgcgaaaggcgtcacttgtcttgctctattcttcgagcgactcccgcaggttgttccgacgtggtatggatatagccgcactccgattttggttttttctgcttcttttctctatcctggatactttcttcaagcccacggaagctacgtcccaagagccggtgcgtcgctgtcgcgagtcatttgtcgtcacgcgacaccgtcagcttgaacagacggtccgcccctccgcatttgtcattgaatcggaagcgtttcaccagctgtggctttcgcaaaatcgaaaacaattggcttctaggccagccagaaagtcgccgagacaaagcgattttctgtgaatctggtttcccaagagtcctcttcgtttttttttcagctactcaagatgccagctcgacaggagtttgtttccctaaccttagtttgtctcaccgccgacgatcgacatttccggacctgattgcatccacatctatgaactgaaccttttaacggccaccgtacgcgatgtgttggcggctgcgtgagctgcgttgcttcgctcctgactcactttctcgacaagagtaccagctatggcgaagcgaatcacgctactccaccgtggcggttctcgacatagccgtattaacttttcccgttgctgcagccttcaacgaatagcagtctgccgttaattgtgttgtgcttcatacatcagtgacaccgcacacggtgccgaacccctttttgtatcgtctgttcgtccttttcgtacatcgttcccggcttttttctttcgcttcaaagaccttctggtcttaacagttgtgcacgccagcgttttgtgcgttgtttcttgattgaaaggtgcgtgtcatgcatcctgctgcatggtcgctctctgaaactagtctctggcttcgtatggcgtgttgccggtgtctgcgaccttaccaggcgtctgttccgcgacctgcctcctttccccttcactaccatttgtaaagttctttcgaatcttatgttagatgtcggcaaaatggctccaaactctcacttgcttccttctcgcccgagtgccgcccagcgctcgttaccgtcttcagtgccaggaagtcggaaacagagtgagggctcaaactcggaagcagacagtgcactcccgtgtagcgcctcgcacaccacgtcggattcgacatctttgtttcgacacgcggcca

SEQ ID NO: 2912 - DNA, 1786 bp, Toxoplasma gondii
  source 1..1786: mol_type = genomic DNA
tcgaaaacaggccttcgattggttcatttccaccttttcgcacatggagcgtggggttccccatgctgcgcctcctaagcctaaggcgaagaacggtttacgaggatcgaagccgctgcaaattgaattcagcgacggaaaacatgttcgcggctcgcagcgaagatgtctgtacatgagaaggagtcgcccggcatcggccgagagagctaaagaaaagctgcaggttcaaaagaatgagaaacatggtgacacgatgagaagtctgctcagaggagtttaagacgatcgtggcagagtgagacatgcttaatagaaagcgttgtactcgcgacaactagcttgacttcaacgtctagtaaaaggcgtcacaacaccggaactggtcattcaaagagacagatgttgacagatcgatttgagaaaagatagagagaggtaggcaggtggatcgatagatgtcgtcagatggatttagatttacagatggagaggtagatcaaaataggcatagatagatggatacagattgatgtagatagaaatagatatagatttacaggtagaaaaagatgaacagagctgaaaagagttaatcagtcagtgtacgtgcgtcatactaggtggacgaatgtaacagagtatgtttgtgttttctttatattgttttgttgcctggttgctaaccgttcctctcaagttctctcgagataaatgccaaagtgtcgagtgttctgcatgtaagccagctggatgggactctgtctctctcgctttttaggagaccacgaaatagcggatgattcgcagagaaaagtatcttcctgtagctgtcgcggagctggagttttgaatgttgcatcctgaagcagccttttctgaatatgcgttctgggcgttgatgcccacgacccgacgactgaagaaaagaggaagttcagtcatttacctaccgctggcgctctttttgtctacctctctgtacgctgtgctgtctctctgcctgtgtggctgcttttcgttctctctcccagccgaacaacaagaactgtgacgacctgttccgtctcttctctctgtcaaggcatgcagagaaataagaagaggtgaaacattgaagctgtggagtgacgagcaaggaaaagcgcgtcgtgctgctcgcatgcgtttttttttcgcgttgcggactttttgcatgcgcgccgcgatcggtttttttccagcaattctgccgagcattggacccgtggttctgggagttttcttttttccaaagtcgcatttgcggccagtccttcctctcttgtcaaggttggaaagagagtggatctgaacggagtttctgcgttctcttggcctgctccggagctgggccgaagaaaaaaggagacgtctcattgaaaaagagaaagaagacaccgcggaaaattcatccagctgcttttttttgacaattgctttctctccctctcatcggcaatcgtctcctttcttctctcttcttccctcttcttctctctttttttcgcttccaacagtccactcaagcgttcccctcaacggtctcccgtttctttctcttgttttcctctccttcgtcctctccttccttcacttcctttttgcctctatcttcttcttctgccctctttctcattcattctctcctcttcttttttcctcctcgttctctctgttcccctcgttctctctgttccgctcattgtctctgttcccctcattctctctcttccccggtgttctctctgcccattctgactcgaga

SEQ ID NO: 2913 - DNA, 3418 bp, Toxoplasma gondii
  source 1..3418: mol_type = genomic DNA
atctcgcctgttagtcctttcaagtcaggcagagttgacaaatgacgattcgggtgtgtgcagttcgagtctcagcaagcgtagatgaacgtccggtggcacagactcgcacagtctaccggcttcggcagaaattcctcctgacgccgcatgacacgctagaaacgaacttacaggtacaatgtcaagtgctgctgcaaaccggtagattcctattttgtgtcggggggtcggaacgttccagcgaaccacaggccttcaccctccctcctcctgtgtctgttgtccacctttcgcggcttctctggatctccttcctagagacagcacccaaacgcttacgggagagtgtacagatgatgcaccttgcatttcccagacgcacaaaatagcttcacggcaatcggcttatattcgggtcagaaacctaggggctcttgcacagaagaacccccttcccccttcccccgcccggtgtcgtgtgccgtcgatgccaccttcctccgggcgagagttgcggcagagtcgacagtccagtgacagcgagcggtttggtgagcagctggagggtgaaagtcaacaggtgaaagcaaagtagacagagtttttgcgttgattcggttgcctcattgacgtcattgaggggcatcgtgtgtcgacagggacagccgctgtgtgtgggttagagcgtcgcccgtgaactctcagtgctgtgcagttcgacgggaaaaaaggagcgtgaatctacctgtagaccgacaggcgtcttgcctccaaaaaacttgggaaaccggcatgctgagaagcagatttactcacaggagctcgcgtacttcttcggcgagtcctaaaacatcgaatgtccctgcatagaggaccgctcttgaaagcaaggaagcactcggtggaagcgaacctctggaacgccgagaacgagagtctctggaaagcgccggaagccgaaccgagactcgagccaaggggagagtgacgagtgtgtctgtgcaggcatgcagtgacctcgtcgcgccccgaggtggaaacagaaggcattctcgagaggaaatgttcagtcacgcgttccgtttgtttcttgcatgcgtaaaaaaagaatggatgttgtttgatgcatgtttatatccttgtgtttatgtttgtatgtgtcagtgggtttcggggcaggcgaacgcgaacatgtaggtctctgctgctttctatcggcgcagattcgcctccccagagctccagagagcgctgaatcaatagacgacttcccagaggacgtgtagacgcatacatgcgaggttgtacaaggaactgcgttgatccgttcttggagagacgcgcttccagtgtttttgagagccgtaagtttgtcttgacacagagacacacacgggaacagaaaggctgtttcgaaaaaccacgtcgcggaaaggaacgtctgcgccggtggagtgcaacagttttgacatgcgttgcaacgaggtgtgttcgagacagaaaggagccgtgactcttaaaacgatcggctggagaagactggaaagaaggcaggaaagaagtatcgacttccgcagcgagcagcaaagtccattcagaccagcggcggaataaaagaaaagaggaagggtgcgattgctggcgtcgaacctgttcacacctacgagacagacagacacatgttcccgagtctttgaagacgcggtgaactggtgaactcaatggcacaacacagttcggatccgggcaaacaaagaccttgaagatctaaagcccaagtccacctcgcgacctgaacgcgtccgagagaaaacgcctgtaactgatcctgtctgagaggcgactcctctcagtccttcgctgattgagtttctgtgagcaggcaggctgttggcggggagacggggactctttttcagagactaggctcctttgagaaaggtccgagcctgtgatctgtcttgggttgtgaagtggagaatccagagcttttgtcgactctgcttgtgtctgttcgcatccggttcggtcgtcggtgtcacctgaccgaaccgagaaatttcttttcgacggttcgatgcatccgtggtctcgaccgcgttgcgctgttcagctgagttcacgacccgcatcgagttcctttccctccgaagcagcgagcagtgtccaaacacagaaactgagaaacgagaaaaaacacaaaaacggtgaaagaaatgcggcttgcgcatgaccggcttctctcgtgaagcggccacaataaactggctctgtcaaaaccggaagctcgagagcccaagccccctgtgcacaacgaacgccggtgcgaggtctgaccatgagagcgtctcagtttgtgtgcatccaggaaacgctcgtgaactgcgtttttcggtttcgaaagttcatccgcgctggacaaagaacgaaaactgcacacgttttgtgtgaggacgttgtcgatcgccgggcgagacggagacagcgcggaccggacgctcccagagggcgcgcctacctgcgatggcaaagaggaatttctcgctttttcgaggaaccgcacaggcaaacgtagctccagttgaaagccgacagagaacgtcgccttgtcagaagagaaaacgctctctgtctgaaaagtcttgaccgccagtccgcctgcaccctccggccgcaaccccccaaatgtcttctgtcgaacgcgttcgacttttcgtggaacgccgtgacaaaggaggtacgatgaagagccgaagagcctcaagaaatagaggagacagcggccagaatggagaaacattaagtcacaaatttcagagttgacactcagaccgcggacggcttgggtggatgggcacctgcaaccctcggcgggaaccggacctcttcttgtctcgccgatgttcacctttcctcctgcttttggtcgacttgtcttcttcccttccctttctcttcttctccttttctgtttctcttcctctgcagcctcgcttgccgagattctttgcttctctgcatgccttcgtctccactccccgtcctctccttgctcctctctcccttgagagcccagcaccgtcgacaacgcgttcctgttctgccgacccagtgtctgtgctttccttgcccgttttctcgcattccgcttgccgacatgaaaaaatagtctcggccagctgatctgccttcgcaccaacctgagacttttgtacctcgcgtcctcttctgtctcctctctccttctctgcgctcgacttcttaaaccgtcgcgtccaacatccaccagtcctgtcttgcgctctctcttcttcttctccttcttctgttccttcttctgctccttcttctcctccttctccttctcctccttcttcttcctgcttccactggccttctccggtgccgttcgcca

SEQ ID NO: 2914 - DNA, 1854 bp, Toxoplasma gondii
  source 1..1854: mol_type = genomic DNA
gtttcttttctctctgcgtcctgtcgacctctgttcgaagctccatgtcccccccctgtcaacagacatgtcctggcgcttcgccccgaaaacaggcgccctcccaaactctgtgccgtcacacaatcgcatcgagagagacgtgaggcgcgtgagagaacggagacaccgcgtccctcgcttaccagagcgagagtatagacagtgaagtagaggacggcattgcacagcgagacaaagtagtcgaactggccgagaggtttcgagcgaattttccctgcaatttgattcagtgtgcccagagacaccaccgcggctgcgcaggcgatgactctccagctgggcgaagcggcgcccggaggcgcatgcgctggcggcgagaaggaagcgttttcgctgctctccgagcggcctgactcatcgtcttggctctcttcggaaatccgagacccagcaggccgacggggcaggacgcctggggtctggtgtgtgctccgcgccatcgcggactttcggcctctactgcgttggaagtccttgggggaggcattcgacagttgtgacgttgtgtcggtcaccagacgctctcttccttgcctcccccctgctgcagcaatcggttcggctcgagatgtcaagaggaacgcaagcaaacggcgaagctgcctgggtgtaccacgcagcggttgagggattcccagcaaatgtacggcggcgtgagctcttcaagcgctgactggcgcaactcgccgtcgcgtggaccttctccgctggaaacgaagaagacgcagggagggaggcgcggcgagtggagattgctgcgtctcgaagagctcacgccggcgcgctcgtcaacttgccgccagacaggcgggaggggggggagagggcgggcagggaagacgagagaacttgaggagcgaaggctaggcatgaaaaggcgacgacgcaagaaaaggatttgtctgtgaatggttagccttgagacagaggcttgagagaacttgcgccggggactctgccgacgaggaaagacgacccaggaaccagactttccagcgcgagaagtgacgacgcgtcccggagacaggcgagaccggctggagtggaaagccaaggatgtctggacgcctttagaaaacgcgttgtcatttccaggtctgcagttcacttctcaagaagaaagcgaagagaaggagagaagaaggcgagagaaagaacgcgtcacgcacgacgaagccgccgcgagcaacctctccgcaaggccgtccccgtctctagacagctagggccagaaccagcgaaaaaaaaagatgcttcaactctccacgttttcctcaagccggggaagacagcaggaaaggaactcaaaagatagcgctttcagctagcttcggtttcttccagtgtgcacagcattcagctcgagctttttgcgggagaaaaaagagccgctgtctctcaacgttgacgtctcttcgcgccgaggattcttgcccccattcttctcttcttttcgcttttcgcttttcgctgttcgctttttttttctcgtttctcctttgactctccgttttttctctttttcgcccccaccttcttctcttgccccgcgcgtccgcgctcttcttctcgtctctcgagcttccggttcggtgctcccttttctccttttcacttgactccggtttccgcctccgaggcttctctcgcttcctccacccgcccgcgcctttccgagcttttttcatccgaatttcccctcgttcgctccctctccttcctcaccagaggtctctctttttcttgtccgccgcttcttttcatgttgctccttgaagactctcgcagcca

SEQ ID NO: 2915 - DNA, 1722 bp, Toxoplasma gondii
  source 1..1722: mol_type = genomic DNA
acattcttggatgaagacgatgtaataatgaggacggtgtctaacggtacccgcgtctgtagttcccgcggtggtttcgccactttccgctcccaagcgatgcaggagctccttcacgtggcagacgcgccggaaggtttcgcggtcggcatcttcggttttatgtttcttagctgtcatagtctcatccaattcttgttctgaaaaagcagtgggagtcggtcttttccggtggttttgtggtagcttactcaatgacgcgtgtgccaacatttcgtgttcgatgctcttttcgatgcccgcacgcgcttcttcgtgattcctaatctgttccgatgtttgcctgaggcgtttttcgcactcggcaatcttggactccagatcagccacttcctgttcagtctaaacagaacaacgctatatgccgtgcaaacgcagcagctgtcctacagaaactcacggacgaacataggtcctcgttttctcgtttccgtaaaagttcggtctgcacgtcatagtcgagaagccgcttgacagcctccagctcgttaagtctgttgtctgccgtggctgtagctcataatttcggagagagtatgacgcttacctggcaagcatctctctgaacgcatcgctttgactcatatcggcactcatcttgaaagaaaacaagcagcaacgtgcagggtgtgccaggcgagggagtggcactttcgattgaaatatccactgaaggtgatcgcccatttgttcgggtaatttgaggtggacatacaccccgtgctgcctctaaggtgggtttctgcgcttacctctgatcatctaaagatcctgttcgaactctttgtggttaatggtggaaggttagccatctgtgaatactccacagacttgagtagtaaacagtcggtctttgctattcagttgacggcagttctagcgtcagattcctctgccagaactctgtaccggtgccccctccgcgctgtgtttttctcgagtgtaccagtcgcgctctaagtttttctgcagcggtgacccactgattccacacctttggtacatcacgccaagcactggctgtcacccgagactccaaccagttactctattctgcattcaggttctttcactgcgagcctcgctaccgtccaagaatgcctccgctcgcaccattatcactgagtgtcgtctggtgattgctccatcgtgtctgcagcggaaaaatccttccagagctgcttcagccgtgtatccatgctatatgcagggtaattacatattgaatagcacgtagtaatttccttgtaggtgtccaaagcagctgcggcctacttttgtggttctaactgcggtttctggacaagaatcgcatgcgcacgctgcatgcgactgcgattgcacgcttcacggggcctccgaagactagacatggtttgaaaattgttgaaaattgttggtgattcattgtttgtgacgctgtcaagcaacttcttggcgagtggggtacggaggaaggcatggcttggtgaactgtatgtgcgccttccttcttaacattctacacgtatctacggagatcagttccacactacgaggatagaaacgccttgtccctgatggtagctcttcggcatgcgacggggggtaccgggcgctcataacggcaggactcctctctttcattcttctcaaaagcctaacgtttttctggtttcgtca

SEQ ID NO: 2916 - DNA, 2057 bp, Toxoplasma gondii
  source 1..2057: mol_type = genomic DNA
atacatttcttgcaactcgttatcctcttatgcccagtgagtaccttccgctcgtgttcccctgttggttcaattcctcggcacgccaccgcttgtagcgctcaggacgaaatcggaactgtgcttgttttctaactcgtgcgcttaacagcttatcgccattcgcttctctccacgctattccaaaataatgctccccttctaacccacgatgtccaccacatgcgttctccgcatttattgagacatctgaaagtgtgtaaaaggaccgatgcaactccacggttccttcaagagccctgggggaatacaggagctgcagatctaatatagggttaagcgagtgggttactcctatctcagtggctatcggaatgggaaagtggcaacgcttttgcagaatttttttcagtgcacgttcttaacccagctcacatatcacatctgacggtgaactactgtgcctgcctggatcttgttcaataccaaggggacaatgggtcgacatagaggtgctgatgctatccgaggtttcgagctcccgtagttatccggccggttatccccggcgtctctggcgaccgtacggatgcaaaacacctgccacaatcaatttatttatcttttttcaaacagacttccgctttgatggaaccatgaaaccccgaacgtcaaaggacagttcggagcgcacgtgatcctctagcctcatccgagccacaactgcagaagccttcatctgtatctgttacaattctcggattggcagacgcaagtttcttcgctctcgcttttaaaagcaagacatgatttgtgttcctggtgccactagatccgaagatctactaccgagtagacgtcaaggcgaagcacaggctgtttctgtgggcgccgattgcttgtcagtgagcgctttagagtgttctgcaagaaacacaaagcttcaaagcatccgcccaagacattcatccggagattcgattcgtttccagcttcacctctctcccaaggcgtgcgtgcttcctgtggatgcggctgaggtcaagcataaaacgtctgtctatctacaaagcgcactaaatgatcgtataaacgtagatgcggatgttcgtttgttcaaacacggctgcagaaacccagattgcctgacaaatcgaatgcagcttctttgcgcactggaaacagacttttccagcacatccacacggacaccgggggaaattcttcgcattatacataggaacacatcgaaaggactttcaggtatggaacggggcatgaaacaaaatctttttcaaacaggaacgtggcaaaaaatgtgtggttggcaactggcgcatgcactgtgtttgatttttcgcgtgttttgaggcaatggcctcgcgttgcatgcacgttgcgttctacgctttttccaacgccgacaaagtcttcgccacattttgccgacacgaaagacccttgttcacgtcggaagctccaaatttgaagttgtgagccaaacgttccgcgttgcatttcaggtggaccagcttttctggtgtggaaaaacactgtgtaacccgtcatttcgttgtgcgttttccttttgccctttcgtggacaagggggtttgccctctcgagttcgttaggacgacgaacgcgactcttcaacgcgccagtgaacttgttctgcgtgaatgcacgcgtctccgcctttctctggaagctgtcgccactaagttcggagaggagaacccctcacattcgcctgcgggagacgttcaacgcggaaaacgcggttcgtcacttggaacgacattctttagagcgaagcagcgagcagacggactggaaagtgggcagaacgaagcggaaaggaaaagacggggacgtatgacttatctgctgcaggcgtggacgcacagggaaagaaacacttgaaaggggtcacctgtctttgttgacggagagagactgctgtggagagaagcgacaggagagagtgttttgttgtcgttcccagaggactttctggaggaaaggagaggccggaggaaagaactgtcgaaacta

SEQ ID NO: 2917 - DNA, 3495 bp, Toxoplasma gondii
  source 1..3495: mol_type = genomic DNA
ttcgattcgctcacagacgccagtgcggagaaagcaacacgtttcagcctggggggcttctctcccttcttcccctcttgcttcctctcccccgagtctccggaactcgtccgttgccgctgcgtcttccttcgcttcttctctccgttcaccactcttttccgtttccctcttgtctccactcttcttctcttcgtctccacgctcctcttcttcgagaacgtcgagctcctcgggctctctgacttgtctgtgcaattctctgcactgagggcaccacaggaggtagagggacagatagtctctctctgagtggaggcgcgattggtctgtcttcttcacctcggtggagtgggcggctctgaacggcttcgcttctccggcctgtgaagccttcgcttcgcgtttcctctcgcgttcgcccgtctgacttctctccccgcgttgctcggcctcagcaagttctgtcactcttcttctttcggaactctcgaggtcgcgtctgccgtcgacatctccctgggttctcgtggacgccgggagtttggattctgccgcgtcaatcgaactcagaagcgactctccttgcaggcttcctccaggcgttccactgcatgtacatcgacaccgcgaaaagggaggaggcggcctgtctgcgcggtgtcgcgcgtcaggcactgtgactgctgggggagaatgtggcggctccctttcgccttcagtgtgtagagagggtgaagaaaaaaaaactctagaaactgagagaagcgcagggtcgccggacgcatccccgaccagcagcgcggcttcagagtctctcgccttccccacgagagactcggcctcgccgcgcggaaaaaaggagctcgctcccgcggagaagcctggcgcagacggcgaagaaggggaacaaagcagacaacgacgaatacctttgcagccacaacgaggcgcaacagacgactcagaaggggaagagtgatggggagaacagaaagaggaaacggaagaagaagaagaaaacgagggagaaggagaagaggaagaagaggcagcgtagagacaagggtgcgcgggatcgattcgttgctgtgttggcgggcgctgttgagcgccttgcgagttgtgaagtgccattttctttcaggaggactataggcgtggagtttcgagagaaggaagagacttctgcgtctggggcgaggagcccgaaacgctaagacatcccttccactttctttgagtttattccgacagttttgaggcccacaacgcggtgctgtgcaggcacatgcaaaacggaacgacgccgacgcgcgaagggcgcttggcgaggacctttcgtcgtctttcctcttctctctttcttctctctttcttctctctttcttctctctttcttctcgctcttctttgtcttctctgctgctggtgtctagacactcggcggggccttttccgtctgtttcttcagtctgcatgtgtgcgacgccttcgcgatttggaaaggctcgcggaactctgcgcgggcgcgcatgccctccctccccaactcaacatctctctcgtgtctccctttgcttcttctctccgtctcccgctcttcttcctttctccccgttttcttctcccgccctctcccttctccccggctttctcttctctctgtcatctctgtttgcttctttcttcctgctttgtctctcgcggttgtctttctgttctgctctttttcgggtgtcttcgcgccgctctcgaacggcacgcgacgagtctcttccccagccgaccgcgcggtgccagccaggaccgtctctctcgcggcgggcgcgctagcgcagctgcggcgccgcgcggcattgcgagtccgcaggaatccgacgcagagagacgggattctgcagacaccaggccgttcggggacttatgtgatttctcgcctcaagtttctcggtccaaagagcgactcgtgtatgagccaacctgcgccggcgaaaaggcttctttcggcgtctccgcaggtcccggtcgcggttcccttaaaggcggcaccagctctgggggagggtcgcgctccagtgttgtaccgacacccggccaggtttctgcatgcgcggcgagcgcggcggatttctcgcgtttccgttttttttacatttctcagcggagtctcgcgggtgtctagcagagagccacacgttgggttgctggctcgcgacgctcgcgaccagacggcgaaggcgacgccacctggagagccgtgcagagtcctccggacttcgagaaggcggcctggctttcgagagagagaatccagaaaaaaatgcagaatgcacgcgccggatgggtctgacccctcgcgggcaggccgcagagcacggctgaaacgcagtcggagacgcggcagcgccctccaacgctggctggcagaggagacagagacagggagaagcagagcaagcagtcggcagcggagggtgaaccgtaagaggtgcgagagatggggagaaagtgacagagacatagcaacagatgcagagggggggagagaaggaccgataggcagcgacagggagacagggggagacgcagagagggagatgtagacggagagagagaccgagaggtagacagcgaggagagtaagagaaagagacagacgtagggatggatacagaaaaagaggcagacaatgagatcaagacaggaagacagagaccgaggcaaggagagagatcaacaggttgatcgctagaggagagtggggatatgtggaggtgaattcgaggggatgaatgtttatggagacagacagatggacagcggcgtccacttcgtgtaagagtgacactcagagaaggctcccagagacgctgtatcacagaaaatcgcgtcttccgaatgtactgcgccgcctccatggaagctctcttcagaaaaagtttcgtgcgtttctccgtatcgctacgtacagagaggcggccatcgtgagctcctgcctctgctgtgtgtcttctcttttttcgcagcgaaaacggcgggagagcagcctgagagaccaggaaccgtcgtctctccggtcgctgcttccccgtcacctttcccggtagtgtatctctcgccagacaaaggaagaaacggatcagagagagagcgacagagagacggatactcgtggttgcatccgtcttgtgatggttttggtccgttcatgcatgtccgctgtgtctcgacttgcgaagttatttgtgccgtcctcacggctccgatgcgctctcctgaagtgagttcccttccttctgcctgcctgggtgtgcgtcgcggatagcacggactacattttcttttttcctcctctctccgttccgacctccgccgagacgcctgtggccgacagaggcgcggcgtttctctgctgtctgtttttctctcgtggaaccgcttgcgtcgggtggtgctttttttcgagagaaacccggaaaacttcagcagaga

SEQ ID NO: 2918 - DNA, 2627 bp, Toxoplasma gondii
  source 1..2627: mol_type = genomic DNA
gtttctctgtcctcattgacttcaccgatttgcgagaagggaatctgaggtacaagcaggcacttggtttcctcgaagattcccgttctagtcgtcctcccgactgcactctttcacaactacataatactgatcgctccccttgtctgtcttgccgaaacctgtcaactcctggtgcatgaaccgcagttccgattttctctttggaaagttgtgtgcttgtttttcccggcagcttctaccttgcacagtccagatgggtgtagctgcagtaataattctgattggctgcgacgcataacgcgagtcagagtcggtattctaggaaccagcatgttgctattccttcaaatggagttaaacgctagtgacacgaaagagcatcgagggcgggacactgtttaatttaacggtacaacttgtaaacaaacaagtcgtcagtttgtttaggcaagtaggtataaaccgtagaaggattattccattagttgcaggtttcgggagtggctagactgttgtgttgttcatcaaatggtttcggatagtggtgcggtaagtcgtgcaaagggctgggcactgacatgacctggcgcttcagcaaaagaaagtcttccccagaactgacacgacccttacttcctgtaccattgggctgggactgtatcatgtgatcttccggtagcactactaagcctcttcatggcaatatattccacggaaaagcttcgttattgatattccgttaacccgttgacgacatgaaacaaacgctccataggtttcggaattatataggatactaccgaccccaagaacagcaaggcctccaattgaccaatcagaagcctcgggacttttacaaccatcgagatagtccttaattgaggatttggggaagggattatgtttgctaaaccccattgttccagcttctaaaaactctatttagtggcactttcgcgagacgcacacaggggctcgaagttggcgtcttcctggacaacgtgccaacctgaaacctctgttctggaggaatgaaattgtttctgccaagacaagattcgttggcatgaagaacacgaaaattccccgccacgtcgctcaggtgttgtttctcgctttttggtgcaagcgcatgtgccagctggggagtctacggtcgacgaggagcggtggtttactcgttcgttctcagagcacgacaatttctgcgatgtttctccccaattgttgaaaagaagattggtccgacctctgtttttgcgacggataagcaagcgggtcagtaacagacgaaattctgttatgcggtcgctctcccagtcttcaactcccaccagcgggtcactggggtaacgctgtggtgattttttttccccactggttttttgttgcaggacagctaaaatgctttccagtgacttgcaacagttctcttcctggactcaaaagtgcggcatcggtgcctgagggggattcccctctctcattactcgaattggttcgtgtacgcgacacggtaacacggtaacacgcaacatcgctgttccccactttccttacgcgagtatttcagattttctcaaggtcgaggaaagcaagcattctcttggaacagctggagctcgtacaaacggtgtggttgtccttttagaggcgtcttgctctgttcgtatccagtgtgcgcagtggaacaggcgcgggcacgcagaaaacagggctttcccccgtaaattcccgcaacttaatttttgctgagaacggcattctactgaagagttgcgacaccacggcacttcggttctacaccagagtggctcccagacctcagaagataggcttttattggcaggtggtccgtttctcgacctttcgagtaacggggcaactacgagatcacaccgttggtaaaatcagcagatgattggcaggctcactgccgagatacaaatgcaaatacacacagttaatcacggacagctctcaatttacgatacgcacctactcatttattggcgcgtgtgtgagttaagagtttatcatcagtcacttccctccatacacaaccgtttcgataacattgtaaatatatatatatatatatatatgtatatatatatatatatatgagtatctgcgggtgtgctctagtcatttttcaccaatcccactttcagtagattctcctgcgcttcattcgctgtggaatctgagatgagaccaccttccactcgagtctcctcgactcagaagcaagcaattaatttatttcctgatagaaacgaagcttcttagtcctctgcatccgaaccggcttttctttgcttctcaatgcactcgcaccttctccctcctcactgtagaacatcgctatctgtcatacaccggcctgccgtctgttgtcaatccaaagctctcccgggcgcctgtcgctccctctgttcgggccgctctctttcaagcagcctttctgtgctttggcattctctccccgtcggcggttatcggttttcgtgcgtgctgctttccctgccatttaaacatcttgcctcatactccccaacttctctttgtcacttgtcacctttctgtcccacgtatccccgctttccgcacagtcgagaaaa

SEQ ID NO: 2919 - DNA, 1730 bp, Toxoplasma gondii
  source 1..1730: mol_type = genomic DNA
cagagatgtgcatctgcatacacgtgtggaaaacgataaataggtatatgcagaaagtcctatataatatatacttaaatatatgcacgttcatgcattgagttattggggctccggcctcagtcagatatcgtttataacgtatatttgcgcatgttaagtcttgtgtacgattcaacaggttacgtggcttctcgactgaaatggactgcgcctttccgtctacattggtggggtagtatgacgttctacagaattgcttggcggcaagggtccagctcaaacctccactcactgtgaggtctgtatcctcttcttcgtctgcttcgtcttcaccgtcttctccctgtcgtagaagttcctccttggtcctcgctttgaactggatttcgtctccgtcatcttcttcgtcactggaactttcttcggcgcgctcctcggcattcacgacgtcttcgtctctctttcttcgtcggtcgccctcgccagaaacagcggcttcgactgtcttattgcttcccttcatcttccgtgagtgagcgactgtcgtggcggagacgcagaggacgcgaagacgggggggggactctgggcaccgaggtgagcaggtcttagaaagggagaggcaattattgctcctagcagatgaagaaaagttgagaggcactggagagtctaggccactgttcggcggcagacggacgggactcaatcccggcagggccccgaagtcgtcgagcccagacgagcggacacggcgagatagcggaacaacgagacagggtccaggggagtagaccccgcggcgtgcttcacaaagggaaaagagaaaagcaatagaggcaaacgaattgcaagaacggtggaatcctgcgcagagatacccacgcctcgaaggatactacagcgacagcctcgtagggcatccgcgctgtcgatggctcgcgtcgacttttctcggagacggcagggtatgtcccttaccgacgagacgagactacgttacgcggagatcagggtcaaattacagagactttccgtcttgagaaaaacacgttagaaacgcagcaaagtgactcctgcaaagccgtcttcggcctttcattggaacaccgccaagagcaagctgtccagccccagacactccgcttttcttggggtcgtcaggcaaacagcacacaacctgcgggcagatcagagaagaaggcagcttcagtcggagaaaggccggagacactgtcctttctcccgaatctctggttgaaagtcgggctttttgacaatatgagagcggcgatggtctctcgatggtcggcaagtctgaaggcgcctctggaaacaatgtttggaaggaacggaagtctctgggacaatcgagacagccctcctttctgtggcgaaacgctctgcgcacgtttttctctccgtgccgccgcaaagaagaaccgtggggttcgttgcaatctgtctggatgagacaacgcatgcacggttgcgtagtcgtagctgggacctccaaaggcgcgcaagtaggaaagcgaatcggcttatattccggttgccgcgggcgccagcgtgtccaatttttctgggaggggaggacgacccactgttttggaaagaagccccgcgaggctcgcggttacttctctcttccctgagtttttaatccagtgaaaagaaggcagattctcttctcttgttgcgggagctcttccggatcgacaaaa

SEQ ID NO: 2920 - DNA, 2302 bp, Toxoplasma gondii
  source 1..2302: mol_type = genomic DNA
tccatcttggttttgatctcagcgaacttgcaggcaatgtgggcagtgtggcaatcgataacgggggagtaaccgttcttgatctcaccagggtggttcaggacgatgacctgagccaagaaggtggcgcagccctttgcgggatcgttcttcgagtcggacgcgacgtagcctctcttcagctccttgacggaaacgttcttcacgttgaaaccaacattgtcaccgggcacagcctgctccatgacttcgtggtgcatttcaacggatttgcactcagtggtcagaccgacgggagcgaaagtgaggaccataccggccttcaggataccggtctcaactctgccgacggggacagttccgataccgccaatcttgtacacgtcctgcaggggcagacggaggggcttgtcgctgggacgcttgggggcctccatggtgtcgagagcctcgacgagggtcttgcccttgtaccagctcatgttggtggacttctccaccatgttgtcaccaacgaaaccggagatggcaacgaaggggaccttctcggggttgtagccgaccttcttcaggtacatggcaacttccttttggatttcgttgaaacggtcctcggagtagttgcaggagtccatcttgttgatgccaacaatcatctgcttgacaccgagggtgaaagcgagcaaagcgtgctcacgagtttgacctgaaaaacaacgcaaacatccacaacaccagctcggtgacttcggtcatgttgcctggggttctcccttggctgcccaggaaaattcccgaaactttcctccccgtcgagtgccacgaccacaaaaaattgtaaaacccaaagtttaacgcattggaacattaaactgagttgtcccacagcaggaacgcagtatactaccttgccgccagcacggcacactgcgtcccgccccccgcggcacgagtgtcggcgactcaaaaatccatcgtaccttccttggagaaagcaccctcgaaaccaccagcctcagcagggacgacgagaagcgcaacatcggcctgggaggtaccggtaatcatgttcttgatgaaatcacgatgtcccggggcgtcgatgacagtgtagtggtacttcggggtttcgaattgccacagggcaatgtcgatagtgataccacgctcacgctcggccttcagcttatccaaaacccacgcatacttgaaggaacccttgcccatttccgaagattccttctcgaacttctcgatcgtacgcttgtcgataccgccgagcttgtagatcaagtgccctgtggtggtggacttgccactatcgacgtggccaataaccacaaggttaatgtgagtcttttccttacccattttggcggacggaactcaaacaacggaaaacaaaaaaattcacaaggccaacggcaaccaggaaaaataagcccaaaacacaaaagattgttttcagttcaagcgtctccatcccaccccccccctgcctccgactggtggggagaacaagagcggagcgggacggggtgctgcatcatggatgcgcgccctcgtccgcaagcaccgctgccggagcggcaaccgaatttggcgatggcgcctccccacatgccttctgcgacgagaagctgatgacgccagctcagataggggtggggtcgttcgcctattaatccgtgcaacaccttcgcagcatctcgcaggtggcacagcgagttcgtttcagcacatcaacaacgtctgagtagacaggaaagcaggagacgaggacatactcatcccgcatgcagggtcagggctgtgcgtggggtaatttgtacacgcaccggcgtagacacgagaaacctctggaaaaagtggacaacctgaacgcttgcgcgacacgcgacgctctttggtaacagtcatgagtaaaagatacagttattgccaacagtcaggagtactagtgacggttgtttccaacagtcaggaggactagcgatgctggttgacgccctggacatctgggagagaatggagaggtatattgtgctgtagatggtccatgaagaaattatggatcgttggtctggtggagacgcacgtaccgtgcgtcgttccgccatgtaggttgccatttcaggcgaagacgacctcctgcttcgcccgtttggcgtcaatgtcttgagcgtgggatattgacttttttgtggtagcctaggaactgtcggcttctgcagcgtcagtgtcgagaactcatacaattatcctcatctgatctgcccccgtgcaacaagtgtcgatgcca

SEQ ID NO: 2921 - DNA, 1418 bp, Toxoplasma gondii
  source 1..1418: mol_type = genomic DNA
gtgccttcgtgtacttgggaaaagcgaaagaacgatcatgtatctgtcttcttgtgatacctacgttcgctgctgagtgcgtcggctgtgcaattcatgcacctcgttttgcatcagcgcacaccaactacaatggtgagagaaactcggtagccaaaaggcagctcgtaacctcgtcgggattgattattgcactgtggaggacgacgaaaatgatttttgctttttcctgacatagcctggtttcaatcactagtgcgagggcaccagtgatagacagggacgcaccgtcaaatcgacgctgcggcaaacacgaaccatcagcgtcgacatgccggctggactgttatcttttatgatctccgcaccgccgggatgttcttcagttcgcagtacaaccacatctgtcacgctctaccatatatctttttgccggcctcgcggggtacaagtctgtttgacgaaggacacgatcgagacacaagtcccttccaacgtccacgtatacacacccgtaccgatgaaaagacggttgcacgcgttccgggacccacacgcttactggctgcatttgaagacagacttccttcgacaacataggactggaactagaatcacacgccataggtgactattagccgcgctgttccggattacaattaagttggtcatttcatcacagcagaacatgcccgcaggttgctcatctcgaacaagcgtggtgctgagaacctccttttcgttgtttgtctcagttcggcaatcgctacagtacagccacagcatcccactcactcatcaactgggtgcaagggagttctgaaatgagacgaagacgatgtgaactctcgggtttattctctcggttgtaacagctgcagcagtttaatagcgacaagtccggcagaaagtcacggggaacagaaaacaacgaaaatcgcgttctcttcttgtaatgtagcgtttgcacgagcggtcgtcagagagtactctcgagcgcagcgtactagagcacgaggaaccgtttcgctcgtcttctcagctaacttagtcgcctcattggcgtgccgagttcctgggtcacggcctctctcaaaaaatgctaccgtcttctgacctttgttattccaggcttcgctcctctgccagtcggagcacgctaagtgagaaaagtaatctctttcagaatacgccaggagcgaggcggccgagtacctcggccagcccttcctttctctgtccgtctcgagcggtcagcgctattctgccgccttcccagtgccaaccgttcacgcagagttctgctgttccacaggaacattccagtgcagacgctaaaataagaggatgccctgcaacaagcggagctttatcggttgctcggtcggcgttgccgaacaacgccctgcgagtggcga

SEQ ID NO: 2922 - DNA, 2585 bp, Toxoplasma gondii
  source 1..2585: mol_type = genomic DNA
caaacacgaaatcggagagattgaaaaactcgggtacagcacaagtagtcgtcacctggactatgcacgcatatatatatatatatatatatatattctgtcaatatagatgtgcgaagcataggccaacgatatttcggagtgtacatggaagcatagttaagagtgaagataatgcagaagtagaaccaaatgaacatcgtgtagtagtaggagttttccttcctgatgctagtccacacagagtgcatgggtcaaccaatctatacagaaaccattaggaatttggcgatggtcttctgacagacgtttgttgcgttctaacatacttcctgttcgaacgaaaaaaactaactacggcagaccgttataaaaccgtatgtgagctttttaagatgcgcaatttccgtttgctttttcaaagacagtacgcggacggcatccgcttcacactccagcatgctcgcaggccccactccagagtgcgcaacctgagattcagggagattcatggggaagtgtgctttcaagagcagctccttgtcctcggaaaggtgcgtttcatgtatgtgtcagagagatctggcgagaggctattgtgcgcgcccacctcctgccttccgagagactttttcgtacgtcttcccgtcgatccaggtgaatctttgtgagatgcctcattgctaagagagtgaaacttcactacgacatgtcaatattcgtcctgcagtgatctgctctgagttgaagaagggatatctgtcccaggtacaagggcgccgtgttacatagtttctttcagcgtgctctctaagcccccacagaagcgccctcgacctcccgatgtgcctgtttttcttatcacatgcaccccctctttgcgcttgtctcgtttgtttccattccttctgaaaaggaaccagtcgagattctgttggtgtcttgcctcagagcctagacctgaacagagcacaccactatttcctaatgctgctgactgcagactcgtgccttttcagggaaatgatctccacagggagagggtttccggtgtttgttctcatgcaggtactatctttcctcgcacagctgacgaagaacccaaggaacctgcggaagcgcatttttacaaccgcgacctgaaacccactactacagaacgaacacggtctctcgttgcttcgtgcgtcggtacagttcccttcgagtgccgaagacattgaggcctggaactcgtcaacagccaataggtgcggactcctttttcgtgatacgtagcgactgtagatgcgtttcaacagtagtcaacgattcgcgtggatcgggtcgtctctcggattgcgtccgtggcggcaaggttgccggcaacggcgatcagtcttcaggaaatttcttttgcctgacgctctgtgggatgttcgtatgaatggattgcatgcacctctctcctcaatgacattttgttcgtttccctgtctcttccttcgttttcaaacagcaactgaaaagcggaaaaactccgcaagacacagcgcgtgcctcttcgcgctccctcaccctgtggccagcgcgagtcgctttctgacggcaggctgctcgcgacaaaaacagcgtaaactcggtttccttctcgatgtttcctgccgccagccaaatcattttttagttgatgaaacatcgaatccgttcttgtttttcttctccgaactttttctcagtctgcttcgtcagctggacgccgaaacggcgctctaccggttgggcggtctcctgtgtcttgccacagtcggtttccaacagcaactgcagccgcaaactcgttttccttacagtttcccgctaccatttctcccggaggaatttatctcttgtatgttttttctgtctgtggctccaccgccatctgctcccggataacgttgccgttgttcctctttttcgtttctccgcgtcaactcggcagctgcttgcccgcgtgactctcgacgcagagttgcttgcttgtttgtcggcatcttttctcctcgtaagttgacttcgtttttcactcagcttctcccattgacggcatccaatttgattcgccctcttgggttgtgaatgaaaacgcgcgggtgaccgtcgatgccgtcattccttggaaaagcgaaaaaaggcacagcgaagcgttagacgcacagtgtgtgactctctactttctttgacgttccggtttggtcaacagaaagagggtttacatcgaagatcctgcaggtgcgggtcggtcatatcatattgccggctggaaataaacggcaaacagacgtcgtgcctctaactgccccagaagcctatcgccgtcaattttgtgaagtcccaacagcctctgaatccccttttcagaactcttttcattccgctgtcatccgtgaaggtgactcgtctgtcgtgcaaagcttcctgtagatatccgcagcggaggcgagagaagcccgttggtgtcgagttctcactccagaaattcataggtctctcagtctccagggttgacattcgtctcttgctcgcgacttcatactgatccccgggttcgaacagaataacaa

SEQ ID NO: 2923 - DNA, 4751 bp, Toxoplasma gondii
  source 1..4751: mol_type = genomic DNA
ggttgttgcacttgccatctaccttgatgtgcgtctgcaagaatcgttcctgcaggaagccatgttcaccagaacagacaaccatttttcttaccgaatctttctgcctagggaagagactcatcctttaccgtcagcagaacaaagaacgctcgacctgacatgagatggtcccagcaccctacggagtaaggacacgtttgaacaggaagcctctcgaaattcatgcgtgcacacctgccttgtcatacagttcccgaaaatatactgacacaggtctgcggcgatgtgaacaatcccaacgtaccaaacgcatgtattcaaaatgaacatgtttctaccatcgaggagtcgccccctcaagggagatcgagaacgtagaaagtctaattggtgagcaccaataagtacatcagggttgacccgtgccaaaaagccagtttcgaggacccgctcgcgaagccgccggtgcggtgcacgtttcaggtgagcaccatccagtattgccacaacagccagaaagcatccatctgaacggaacatcgataactatgtcacttctgtagtacggtgacaatggaggactaccacgtgatgacggtatccaaacgtgtgaactggggggcgtgaccgtttctagactcttcttcggtgaaagcgcggggagaaaacacgaggaaagatccaacatgtcgcccagacccagagaaaatctagcggctagaggtgacggtgaagaaaaaatacgaaaaaacacacaacaaacacagcattcgcagaaacaatgtttgtatctccactcccgggacacgggtggggcgacgaaacgtcagcgcatgtatcgcgttgactaatttgcattcctggaaagacctcctgaatcctcatttccaccccaagcaacagcgtaccagtcccttggcctcgataatgttgtcgtccacaggtttctgacagtcgacggtaaacttcaccttgaccggtttcgctgcggcgcctttcttcccaccagcgccacggccagagcctgccgccctcatgtgggccttcgccattctgttctaaatcgacagaagaagtgagaagagagcgggcagagaaatctggaacctaactacgaaagatctgcgggtacgacacagtggaatgttgccaaagaagcctctttgccacagagaagacatacaggtcgcacgaaaagcgtcggcgacgcgagattttacatgcgccgacgaagagtagctggcgacgggcatgttgtactgggggaccggcttaaattcgagcgcactgtcgcgcactcgtagcgtgcccaatgcatccatcggtgcccgtgagagatttcttttgctttttacggctcacactatctgcctgaggaagagaaggatggtgtgcatctcttgggtctgaacaacgacaaacgggaataactcttgaatcaaaaaggcaaccatcagtgtgtgcggaacgaccgcaacagatcgttgctctaaggtacggctctgctggtaggcacacggctcctcgctgacaaatcccactgtaaaccgggatcttctctactcacaggggaagttcctcaacgatacttgctttcggcacagttggtgcttcttgagtaagtgctccgtgtgtcatgctggatcgaatatcgaaagagacgatggccttgaacttcaagacgcagcagggtctcgtactaacggcgctaatgatgccggcgggtgccatgcatgcctgggtcgaccgacgcctcaaacaatgctgcaaagcggcctaacatgctacaccttcatgcagtgtgtggccaggctggtggcaactacacgaccataacgctgtcgtggcgcacccatcgctcagttaacgattgatggtaaaaatacatgcgcgtaaaaagactgtgcagctgtggtcccttcctctctgaaatgctcagatgacaatacgtcctacgctgatggcttagtgaaacgcacaacagcctcttcacgtagtcgctgaagagcagcaagtggtgcgaatgatgtacactccgtcccgttcatgagaaaagtgacacactgacaaactagtagtttattctgcggggtctacttaaccctctaaccaggcacagcaggcgactttcttgttatgtccggctcgcgacaaaacaggttcgaagaataaggagtgctccgaccccgggttcactctggctgaattcggaacatactgcaataaagtgatggagaaacaacgctcgcgtgggtgactacattcagtagctcatgctttacagacagggagtggccttcttgtcactttacatgcacgaacactcactacgttggatgcagcgccgcgcagcagccgcagcgcatcttgcatgtggatttctccaatgtagactggaatcgggattcgctgcagcatatccaacacgaccaacattatgtacagttaaagtagtgttcataagtttcggaccatgagtgtcagcagcacggcacgatccgcagttccctactgtactgactggtgaactcgctggacgacacgctcttctcggaagcattccttgctgattccagcatgcctccatcacctgacgcggtattggtcatcagtaggaatttgacgagtgccaggactgtgttcctgaatggttgattcactgacgtcgtcctggtgaagaggcgggatatgcggtgccggctcataacgaaccacttcttcaaacatgggtacatccacatatctatcgacgtactttatctgaggcatctccttatacgtcaccttgtcaaatgtcactggttttcgcttgtacgaaactcgttcgtgaataacctctttcggtacgtacttatacatgtaccgagtttctggaacctcttcatacttgtcgacatacttgatatatggcttttcgacgaacttctctactgtcttatggatcagccgtgggacttcgacgagtttctcttcgtaggtgactttaggaacgaatctgtcaactttcttcaccaccggaacttgcacaaatttcgtcttgatatctactggctggagtacgagaacgcgaacccaatctcgatcacatttctctccgacgacgctgggcttcagcacgcggctgtccacgaagtcttgcttccatgagcgacaatgagagagaccgtgtgcaccaagaatgtacttccttcgctgccagtcgttttgctggcagccgctcatgatggacacacacgagggcccgcgaagcggaactggtcaacttgaagatatttagacctggaaaaaggtgtgttgttctgcagtgaggcagtcaacccctcaggcacaacacagtgtgcaccagaaacaaacgggacggactccgagcagcgtcgggacacgcacgaccttctcagggatgtgttgtgcgcgctgctgaggtgtcggttaggattagccagaggcaaaaagacttcctgatggagaaaacactgacgtaacgcagggttggcatgatatgtgtttccgaagagttagcatacatctgcgtcgaagaacgatgaagcttaccgaacttactggcagctacctcaccacgtcacatttctccacgcagtggaaggatcatgatctgattcaaatgtggtgccagatgatgagtagggcaggattctagttcatcgcgacgatgtcgcgcgacaaactgatttttgaactaaaacaatctcttcatgacttttggcagcttggtaagtcaacggggacacaaaaaagtaaaaaactgcaacaggaaagcctcaggtcgccatgcatctgagagttgaaattcgagtcctgtggctggttctcgtcaagtcatacccgagagcaatcaaattgaccgcacggacgtctcagcaacagtctgcccgcaacggctgtcggggggggagcgtcgatttatgtaaggtggccatcgttggacactgcgcgaatgaggtgactgtgtgttcactgctttacagagtcacaggcgatatgtctctgcaagccgattaccgctatccctgacttgttctttttccactgtgttcacagatgaggaggtggaggtcagctctgcgcgcgcttaacagataatgtgacttcttccttactaacgctagagctcccgagttttgcccatcctaccccgtaaacagtgcgagctggacgtttggggccggccgccgccgctagccagtatcctggatcactcgacaggaacctgctgcagtgcacccggcatttgtgttcctttgtttccacatgttcatgttcgtgacgacgaagtttcctttgtctctgctgccctgttgcacgttatttggagggaattgtacagctgttataagaaaatcgtaagaccaccgtgagtcaccagtggcaccattttaacggttcttttcgtggtcacctgcggagctgtgtgtgcccctgctgcgccagaccgttgagcctgttgcttgtaatttgtggtcagtcgtcatttcaatcacataaatatcaccattctttctttgtacagtatctgtcaggggaaaacagtgggcgtaaagtctactgagatgaacgtatccggcctccgcagctcgggctttttgttttgactgactggcacacctgcagactatgaactgcagtccatcggttattcacaccatggctcagtaaatgacttctaaaccgcatccagccttgcaagcttgccgtctcccactcttcattcagaggtggtgtccgcaaaa

SEQ ID NO: 2924 - DNA, 3780 bp, Toxoplasma gondii
  source 1..3780: mol_type = genomic DNA
gttctgaagaagaacatcttcgtccaagtgcaagaccgagagcgcggagcgggttcctgcatgcgcggactcctgcgcgggcacaccctcggaccccaagcgcgactgcgccgaggcgcccggcgcggcgcgcagcagccgccagcgacagcggcgatccacgcgcgccaggagactcttcacggatccgtccggacagaccccgcgggcacacacgacgccgatgtcttcttcgtccggcgcaccaaacagcgtacatgcaggaagggcagaagttgacgaggaacccgaggacccggtaggaaatgcgtggtgcccagatgttcgcgagctgtgcaggcgttgcgcgaactgacggacttcggttcgacgcggacaacagaggagccaaagcggcgcgcctgggtgaggaagtcttgactgcggttcttcggaggtaggcacaggctgatttccgccacccaaggggaaagaacgcgggagacccgcgacgagcagcacctcctcattcgcgtgcacgatgtcaccgacagctggagaggacgcgcgcaacagagaaaactccgagctgcagagcggccggtacggatgcgaggcggtgcagcaaagaggcaaaagaggcgcgtctgcggactcagacgggagcggggcctgaaacggcgagggtgaagccttagacgtgctgaacgaaaaacccggtgtgccagaacttataagcttttccagagaagcggtgggtccctcggaaacactcgtaacaccatttgagacgcctggaaactcccccagactgacgtagtacggctgcttcgcgctgtaccaggcgtccagagtcgaccgcaaccctacttgcgccccgtacgcaagggaggcggctaatggtggaagcggcattttgggaaacacgcgcgagatacagtagaacaaaaacggactatcactattaaaaggagaatggactttatagccgcggcaaacgagatagcactccgcgtgctgatgaaagacaagagatgacacactgcagcagggggtggcgtggcgccagcagctccgtccgggtgtacggacacttgagagagcgcattcttcggctggcacatgccagaaatgccacataaagcttgctcttccttctagtcacgcagttaccggtgtgcaaagcgatttcaaggcggacacacaataggcggctcggcgtttcccttctcccccccgccagaggctacgacacactgtcatgcagcgccatttccccagcaagtcgttccatgtgagtggaaaatcttcacgcgctagaaatgaaaaactttccggtagaaaaggaagcgaaggaaaagaaggagaagggaagggaaaggaatcggaacctattcaaagtcggcctgagaactcgcgcaaaagcgcacgagtgcggtagagaggtgtcgcaaaacgggcgcaagacagttacccacgtcaacagttctggagaaaacagagctaagagactgtatgcatttaaccctgtatgaaagcagtacatagacatgcaacgtgccgtctcgatacttgcagtgtcgcgtcatccctcggttattcggcatgcaacaagacaagggacgctggggggtggagggtggtgccgcgaatgttgcgattatttcgccgattaatttgccacgatagccatcgaaaattgggaatggagttctttacgagatattccgactgtagatgcgatgaagtgcggatctgctccacttttaaaaggacaagaacaatgacagcgctccttcggcagtcgctgatctcggctgcccagccgccggtgcccgtctcaagtgcatgcacatatgtgaagtatcggttaaatgaccaggaaacctgtcattttcattggttcccttccactaaagtgtcacgacatagcttactctgcgaaatagtagaagccgaagtggacgagaatctctgttgaggctgggaacggcacacctctctcgccacgacagagatattacaccagagtagaacgcgcttgtgtgcctttctctctgggtttggatgcggcggtctagtgcaaagcatggatgaggcttgccacaaaccaccgtatgaaccgttactaatatcgggttcgagctggagctgccgcagtaggagttcggaacttcaacgacttcgaagcggtttgtgttttccaccgtttacgagcacaccctcccggcctgaacgatctgaagacgaatggttgtcttctgtgtccgtcgcacgtacaggtaggaaccctcggtgcgacatcacagcacaacattagcagctttgtaagtcgacaccaggcgtcactgtgatcttgtttccgtacacgttccagctcgatttccttcctgtatcggccaaacgctagcgaaactcgtcagggtcggaactgacacagtgtgggtgccactactgcgttcacggggtaccaggaagcacttacactataagaagaaatcagtgagacatttctgccggtgatgtgtgaaacacgaactgtgcaagacgagcgtcgtacagcagcgtggcgtttcagaaataagacgtcttcttctaaccgtcatgcaccgacggatgcccgccccggtgaacgacccatcgagaaatgagggaattcaccagcctacgtttttcagcacaagctgcacacaaagtactctgagctttgaccgaggggtgatctaggcaccaaccctatcaggaccaactatgtttttttcagtgttgctaagaaatggaggctctttccattgcgcgtgagtctcaaagaagtacttttcttcgtccattcacccaagtcttccatcatgttttcccgcagtagattctctagtgaggtgactttagaggagcgtgcgtgcaggtagctgtgaacacgaaacacgtagcagccagtgacgaatttctccactccttgtgtcacagcttctcaaaaatcggatatgtacgcagaacagccgatggaatagcttgttttcctgtactctttactggcttccagcagaaagcaccttctgctgcccgaggcttcgagaagatggtgtggctttgtgctctgactcgagagcgaaactgattcggccgtgtgccgtgggagcattctcttccgcgctgccagtggttccgaaaagttcattcacacacacgccgtgtactttgtcacatcaatacaattcaacactggctccacacgcaagcgcaccttccatccatgaacggcttctcgagcgaaaaaaacatgcacgcgagtgattcgaacgccgcgttccggaaaagtggtggagagtgagcatcggccaggcaggagggactccacccctcctgtctcgggagatccgggcacttttcgagggttctgccgtgctcggatggatccacgcaaatatctatctccaaattctaccaagaaaaatcccagactgccctgatcatccctgtcacactaatgcacagtgtgcattggtctcgacttctgcggtagcaggcacctccgccacattgcctgctgacagcagactttggatgtacacaaagccaacggactgacttcctgggttgctgttccagacattgccggaatcacttttgactccacataatatgctagaaaataccgttcatgtacgatctaaagaggcagctgtccagcgaagctgaaggcagtgtctgtctcatgggtgcccggttcgtttgtgagcgcgtcctttgtgtgcgcaacttgcagaaagacaggagacccaacctgacgaggaaatgtga

SEQ ID NO: 2925 - DNA, 2298 bp, Toxoplasma gondii
  source 1..2298: mol_type = genomic DNA
ttcctcgcatcaattgggtacacctgtatgagcagttttccaggaaatgcttgcgcgcaccaacagttaatgatcctctggcacgttttataatgaagtctgtctcatgctagagtctcaaggtgcagggaataacttctacaggtatagcggcgtgtgtctatgtgtaactatgcttcgtatatttgcaactcatatatatactcacgtgtatgcagacattttacacgggtgcacactcgtgtgtttcagattgttttaggcagtttaagctctgtccagtgatttgttagatggctggtttttcgaaatgacccacaaacctcgctaaaagcacctccgtgaagtcgcctgtgtggcgagaaatttccgttcagcatcatcctgaaactccgcgatgttccagaaattctacttggtgaacatttgataatttctcaaatattcgtgctgttgtgaccgttggttcactactcttgttcttgccaggcggcaggaagggctgaaggcatgatcggaacacgaagcagagacttagccagagatctctcatcatgaatatcagtagtgaagcactaatcttgacttactcctctgctctgatttagttacagaagggtctcagtggggatgcgccacgggtcctccttcatgagcaaaaattaaatgagaggacacggcagaagacagggaactgatttcgacgttttctcgtagtgcgtgcagtcatcactgcaaaaacacccccgctatccgtcttcgtggcaccgccgtcaagaatgcatgtagcgtcgtactgtctgcatgagtgagtcattcaaattccgacagaaagatcgtcttcttcacgaagtgatgcaaacgcgcggaacggttaaggcgtgttcgggtggcgctgtctccacagtgccgcctcgtggaaatatatactgctggcattctctgtcatgtattggcaacgccagtgtaggtatgtaccaatcagaatcgtatgctaccttcgaaaaatgacgaatcttaactaatgttttcctgggtgcctgtgttgcgtgactagcatgaaagaatcaactgccgcagccagaatactttcagcctgaggcggcgcctctgaaggcggatgtcagcataaatggtatccgcgaactgaaatggataagaacgcctgccgataatagatgcacacgctgggacatgacggagggaatgcgcggaaaatttatattacgtttggtgagatgaaaacagttacaatactatggctttatccgtattatacggcagaaaaattcggacctgctctaaggtgccgcttattcactcgcttaaaagcgagtggaagagcctgatgacagcatctgtgtcggcttattccaaacctcaaaacacagttgtgtggtcaccgtatttttatccaacacttgtcgagtagccgcagcgtggcatcgcagccttgttacagtttacaccgccgtcgacgtgcgataattcaactgcagctgtccgcatggccaatgaagtaccagccagctttggtggtttccaatttttttgtgaagaaacgtgttcagtatatgttcttgaacgggacagcacatgcttgcctagaggctgctgcctacctcacgcttgctgttagttcatggctcttgggccacaaatatttgatacagattttagtcagaaagggcatctgttaccagcaatctggcgacagggtacgccatagagaggagtcgggctctatcgcagaagggaggactcctggaagcagttctgcagcatagcagagtacgcagtcactcgagtgtaatcatcacgcgtggccagctgagtcaggagccgggcaaacgtctcgtcaaccttcatcgctggaaccgttcgcgttgttcttgccaacccagatgccgagttcgtagaatctctcttcatgacctttatgttttttgtttcataatttcccttccttcaaacagcgtagaccagaagccgcttttccgttttgttttcagacgcttgtttttgtcacgtcgcgctagcggtcgaactgatgcaaggttgtctgaaagtttgctagctacgcatttatgtcacttcagtcagcgatgcaaatcgtcacgcgtacacaagttgttgtgctcgattctcaggcttgtggcatgaagatcttccgcatgtgttccgtgtgcggaagaagcatatggagtcccccagttcgcatttaaagaggcctggactgggtgatattgccctcttcccccgcatgtaaccagttcagttaaccaccaggctccacaa

SEQ ID NO: 2926 - DNA, 1922 bp, Toxoplasma gondii
  source 1..1922: mol_type = genomic DNA
tctgcttctctcgtacatgaggtgcaaggatgtatacctacttggtgcgtcgtacctgtcaaagacagtcagcatctatgattaatatccgcaggtgaaaggcaaccttatccgcgatatctacacctctagggtccctagaaccatctagatgtaagttgaagatcaacgtcgcacctaagtgttctaagtcggatacccgcaacaagagacacggaagagccttcgttttactacagcttcatgtctgtcttctgcgttgagtccaaattttgcgtttccctccgagtcgatgttgagttttcttgtgactccaaatggctgcggggcagcggacttgcacgacggaatgataactccaaagaattcttgaaatgttcgtacctgtcgcggtgcgaggtagcacgaattgacgaggttcccgataacgttgaccgcagcagccatgtgcaacttgctgtagccgacgcccatgtagcagacagtcgagagaagcgtcgaagaaagcacggtcgacgcgcagaaaaaaattgggtagtggatcgactgtacttcagctgaacagcgggcacgcacaccaagtaaaaagacacagggcattggcattccttgcttccatagggatgcggtcgtggaatgtttgctctgccgaagcagtgccgaactgtagaatgcaagaagggactgcggacgtgtcatgccgtaagctgaaaagatgaaaccccacggattgtgccgttttaacgcgttcagccgacgggtgtcctcgctccgatcccagcagcgaagtctcatggccttatcactttgaattttttaaactacgaatacatcgatcattatagacacacacggcacgaatcatcgcgaaaaacgaccccaagtcgttctggaatgcagctgcctgccatgtgcctggtgatgttgaggacacttacccagcttgcacctgctcaacgttttccgaagaacaggcgacatgacgaagaaaacccatgttgccgagccgaaaaggcagctgaaactcgtgttcacgagagtcgacaaaagccttagcaacgcaggagacgtctccgctaactgaggcacgcatgataggagagtcgaggggaagaaatacaccagcagcgaagccgttccgcacgcagcggaaacgtagggcaatttactcaaacagttcgtcatcttgtctgctcgcgaaagaatacacaggaagcaaaaaaatatgattcacacgaggaacgtcgagtcgcgcaaacgttcccaactttcccgcctaatccacacgctgtcacgagtcaggggtggtgggaaggtggatgctggccgcaaaggcgcgcagctacgtttcgattcttgagcaaaacgaaactgaacggagctgtcgaagcacctatgtcctctgtaattctactatgtagtatcccttcggcagaacaaaggctttcatggtacgacagcagctcttggcgctggggttgaacggatgtctggtcctctcaagaagcgtgttcaagtcttgcatcgctgtccgtccgcgtctggaggaacgggactacgggccgtgtgtctcgccgttgtggtcttcgattatggggatctgccttattgttcgtgttcgtccagacgtctcagcatgagtgtttcatctcgtctagcgcaatcgtgccactgaaaaacgctgcgtggcttctcaggtgagtcgtggtcttcctgcgttgcatgcaccaggagtgctggtgtgcaagtcgatgtctccgaagaactcctttgggttctttcgctgttcttctcccgaccttctgcgccactcagttagtgtgtgtgctgtgtatacagatggctcaactttcagatcgtggaacctctcttgagatttgccagggtcgccctatggggcggctcctcccttctgggagcca

SEQ ID NO: 2927 - DNA, 2569 bp, Toxoplasma gondii
  source 1..2569: mol_type = genomic DNA
acaccggaaccatcgttggttcaggaacgcgatggttgcctcgacctgcagagacacaggcgcgcctggatagagagcgcgcagaagcggctgcggaacatcgtcggcctctctgagggtcgctgagaagcctctgggggagcaggaaccacagcctgttaagtctggcctcccttcgtctgtgctctgagagaggcgagcgacaggagacaaagcagatgaccgagaaaacgcagaagaaacagcgtctacacggagcctgcccgtctccgcaggactgcgcggcggctgtacagccaccggagccgccagaagcgaggatcctgtcatggtcgagagggtgaggggctggcaaggcgagggattgagacacaattttgcgtctttaagctcggatgaaaggacgaggcagataagtcagaggccagagggagggagggattctaggacggagagagggaaggaaacggagacagacaggtggagaagacaaagagaaagacaaagagaagaaagagaataacgacctgtctgtacacggaaaagtcgcactgaaagtgccacggcgacaacccccaagaccgccccgcaaaggcctccggcaacacagcgcagaaaaagtggaggtgcatttgaagatgcacaagtacacctgcatacacttaaagaaatacaacatctgcatgcgtatgaagactctttggaagagctccatgggcaggcaagactgcagttttaagacgcgataacgacagaccttttgagagctcttgtcgcgtctctcgaggcggcactgggcgcaggagccctctggaacggaatgcgtcgcatgaggttttctcgtatcttcgaaagcaaacgagaactcctgccttgacatgcatgcgcgtttgtgtaagttctctaagctcaaaagcagccacaacacactgaccaccgagagtctgccgtctccttgtccagtggagacacggcgcaggcttctggtacctctctcgagagacaggggaaaagcgtctgcgtgagcgatccaggcacagagcagaagaagcacaaaaaagttttcgtttgcgcgttcgctgaggatctgtagccacagagagctttccaggtggcgacagcatgcgagtctgtcgccacgcatgccgaagacgcgaaagacagaactttctgtttgtctcgaatttctggagtctcctgctcggtgccaaggctctctgggatacactcgagtccgacagacgcccccgggagattcagagcaagcagagaagtcccggttttggatatgaacgagcctcaacaaatcgaaacgcgtccggacatgcgcggactaccagcaagctggggtccagagactgcagcgcgggccgagtccgtccttcggagttccagggggtctctgcacggaagagaacgcgcgaacaggctgttttcgcggtggagaaactaaagaagaaagcgaggggtcgaggcacctgagtttcggtcgcggtatccgagcaaaaagtccgagtttgaccgggcgcgacttgcgacgaaaacgctcgcgtgcaaagcgcgcagcgcgaaagcttgcagtgtgcatacacccgagaggtggggcgtcttgagtgtgtctctcggaaaaagcgcgaaaaacgcgtttcgagctggttctcccagcctttctgcgcttgtccttctttcgagcgcggaactcgaaaactctagcgagttccgccgccgttgacgcctgagggcacagcgcacagagcgaggacccccgggtgtatgtacactcgctgtttggcgggcaacgtggtttgctcgtgaatttccagcggttttcgtcgatcctttctggcctcgggcgttccttcgtttctctgaagattcacactgctgtagagcttctttctgcttctttcctttcgccgaacgaccctgttagctcgagcctcgagcgtttcgcacggtggccggctacgtctcgcttccgaggtctgcccaagcgtcgtcgctctctccttcttctgtatgtttctctcctcgcgttccccgcttgcgtctccgcggtccgtcccccttcttggacgcccaggcgtcttcgatctcctcacctgggctcgcgttctttttttttggtaacgcttggctgccgcgtggacagagagcggtgtcctgtctcgcacaacgacctgcaacaggtcgctctttttcaactactagtttccgagtaactcctcgctcttcgcaactgctttccttcgcgctcgcttctgtcagagtgcccagcttctctctcttcccctgcctcgtcgtcgttctctccctgttgtctcctgtgcttcttcgtcttctttctcttccttcttcttctctttgtcttcttctgtctcttcgtctgctcccattcgtttttcgtcctcaatctccttggtggttctccttcctcagcgtctccgtctctcttgggaaacccccctcccccacccgcgctgcgtcttccctccagcgtctgcgtcgtcttcgctctctttttcctcgttcttattgtgtcgttctttcaccgcacatgcagcgagga

SEQ ID NO: 2928 - DNA, 1179 bp, Toxoplasma gondii
  source 1..1179: mol_type = genomic DNA
cagccatccacagaccttttgccgggttttcaacaaaggaaaattcgtcttgaggcaattgtcatccccgattcctgtagcaactatctctcccaggaaaccatcgccttcaacagacggcggctttatatgtatatatatatatatatatatatatatatacacatgttctgtggggtgccctctgttatctcttgagcgactcgacaactcttgagtgcagcaagaggccggggaagaactctgtctgctaagcctagcatccaaaggcagggtttgcggaaaggcattctcctagagggtacagacgcctgcggtgaccccttcgaacaaattccaccacgatgaagctggtcgtacaagcgtttctcgaatgtcaatggatgaaaaacttcacacaaaaagatgtgcaccataagagtagtacagctgtggcactgtgctgcgtgattggaccactgcgtgtctgaacgagaacgagtgatcgagagactttatcactgttggcgaaaagaaaaaaaatcccttgtaggactgtggcatttccctagaaggaatccgaacagggcatgcgcttgaaattctctgcttttctctcggtgatccccctgaagaatacactctgcggctctgtcgctgtggcgactagctggcgaccgagtcgaacaccgccgtccacaaaattttcctacgcatcctttgacagcaaatcggacgatgcctaagcgactcctagcgtggcagaatggccatcaagaaaataattatcagaacggaaccttcaactagggacaaccagagcaatctgttagtgttgcgcgagactttcgttcttgtcgcttaatgggaacgcgttcttccagcgtataatccgtcggtttcacgtttcttggaaagtgcatggcgtcgaggagtgacatgaaagacacagttccgatccatcttcttcaagtttggacgaaaagacgaactcgcagtcgactgcgctgtccatccccctctgttgctcacggttgaggggtcgccgcggccgtttgaactgtttgtcatgccgtggatttctcttcgcgttttcacacagttgttttttccgtcaaactctgcctgccttgcgccgttgagttcatctgggctcgcctttcctgcccggaaaactgtatcgtgcctttaacgcatgca

SEQ ID NO: 2929 - DNA, 4190 bp, Toxoplasma gondii
  source 1..4190: mol_type = genomic DNA
attattgcctctactgctgctaaaaggtagttgtgttacgtgacaagcggtatgtttaataccagtgtttatgcgcaaatatagtttgatacaaagaagttgttatatcctccgtacaacgtccgtatgagaggaaacctctgcgaaatctgtcaacaaagcggcgaacagtgaacgaacaaaataaatgtgcgactgtttttctcaaaaattgttcagcgcgtacaatcgcagataacccacacaagacatcagacagatcgcttttctcgttgatcggaaccgttcctagtccccgagagctcaccctgtttcaagctgagtacgcgagtgtgcgtgcatgggttgcccccattcacccgtatgtatccaacccgctggacgccctcgtttcttggcgagtgcattgcaacatcggacttacgaaagcttctgttttgtgggcaacgtgcccacaagaaccatagagtagtagtgagggatgagaactgagaaggtgctaggatgtgcccctccattaatcttgatgacatctacaagtagcggctgggcactgtatgccaccaagaagagcaggacgacgccaacttcgatagcatgctgtctggtcaggacggctcttaacaagtcgccccctgcctgtcccattgtcgaagaacaaacaataaacagtcgccgacctcttttcgagttccccggtgtaacaacgaacggtaactaaactgagtgtcggaatccagtggctgtgaacatcctcttccgaaagagatcagcacatgtgttgcctgcggcgctgaaggcgcagctgtaaaggcgtcggactgcgagtacgagtacgaaaacagtcgcttcttcgagttgcagtgcgtttgagcatgcaagtaatcgcgcagatgtcgttacagcgattttttccttaagtgattatgccagacctgaagtggttgaacagggaacagaggcagtggccaaccgggacagggcatggttgtatggcacgcggagggggctcggctgacctacagttcgcgaggatagagaaccctataaacggcgaaatcggatgtggtacttctcggagacagaacaaaagtacaaaactgggccacgaaagtcaacacacgggtccaatcacggggcggaaaggtgggtgttgccggaaacggccgcgttcgctcgacgccagaaccctgtggcatccccaaaaggcaattatcctaatcttttcggcttccttcacgtccaagttgtaaatgaaatccgcctcaaaaagtcttcccgccggctgaaactaaaaggaaaacaaaacaaaaacaatgaaccgtataggctccgtaagctttccctggcgaagaccactcgacacgctggtccagggtacatacgaacggttgcccgcggagacaggcacacaacacaggacggaagacaaggcaaccagtgtacgctgcataaaagaggaagtgtagaaagccgaaacacttgcttgtcgcagaataacaacgacatccgcttttgtaagtggccttctcatatgaggagaccacttgccaaatcgtcttgtggggatagtagcgttacatggcattgccagcccgcgcccttccagcatgcgttgctaccacccccacctgcatgcaactgagacatcgaagtcaaggaacccgtcggcgggtggtgactgtaaggcagtgatgaagaggctcctgctagagagcgtgacagaactgcatctgatgggaatccttatagtggagacgtgccgcggattttctgccgacgcatcccctttggggaaatgcaacttgcgtatatgccgttgggggtctcaagctgacccgtttggctggccaaaacatgcgtggcacatttcctgtgtcaacatccggtgactagattcttgtaggcaagcgaaaagaaactccgcattatgcttagcattctgaagctccagagacagcagtgtttattctctcagtggggcactccgcagtggattgtacacttcactcgtcgaggcgaagaagacaaaaaccacctcttgagcaaaccctgaaatggaatccgtctgtgggggacgaatggtagtacaggacagtcgctttcccgttgcgtggtctgagcggtcagaatctttcgggcttggtcaatacaggtagggcacgcagtcttggcgagcattcgacctgaacagcatgaaaaaagtgacatatcgctccaagcggtgcacgttagtcgcggtcttctgtcctgtggttaatttttgcaacgccgtatatttagagatgccagtttcctcccgcatcgccgtggtaatgcggcaatatgttgcagggtgctatgtgtaatgccgccgcaagcaggccatagagattgcgtccagaagtaggcgctccggtagggccgtagtccgaggctcatcaacagcagctgtcctcgcagttgtgggatgtttgggttagcgctgtccaacaaagaccacgtatcgcctttcgcgcacccaaaccgtgcagtcagatgcgtagcaacattcggcagctgtggcaaacgtgggggggtcaaagacgcagaaggcaacattctgtacaagcaagcacccttggaacactagtgcagacatcgtgttctgaaagcgggcagccggaaagcggtgtcgcagtagtaacgttggtttcacgtatctttactgcagagacatagatcatttctgcacactgcatgggccgagcgccagagggaaatacattcagagcatgataattctttcacagctgtacggtatggagattcgttcgttctctttctagatttatacgcaaggggacccacaaagtccacattaaagcacgttgaatcctttgacgatgcgcggattttaccattaccgaagaagcggagaacacacgcccgaaatgctgcaagtctgtttgcgtgttttgagtttcactgttattgtggtttcatgagaacactacacttgccggcaatttcttcagtgaggtgcaacgcttcgcccagcataattacacgcgtttgcggacaccgtgcgaagccactgcagttctttgaaagtgctcacatgcggttccaccatttagtctctttcagccacttagacatgtcggcagggatcacgagacactcagcagaaacggaacgacttttatgttttcgtcttttctgagcttgttgggccagacactacgctgtaagttgcgaagccgatctcaattcctaggtcgacgtgaaatcggaggttattgcattgtcgagctcatttcagccactggttcctgggatgccgtacctatgagaaccaagagaacttgttcgaacccaaactcaccttagtagctatgctggttgaatttattgcaaataacaagccaggcctctaagatcacaaagacaccagtaaggtgacacgcgcgcaaccataggagactaccgaattccgagctgctggagactgtgccatccccattcccaggcaaaaaaccgtcacttatttacagagcgataaagatactttgacggtgtaaacctcagtgcaggaccttgtaacgttcaaggtgttctggggaattttttgctagtgttgcgccgcagcggtacgcacgatgcagcacggtagttcgttgtacttgtgtgcaagactcaacattctggctcatggaagcgttgaagattttatggcaatcttgaaagcacatgcaattgcgcatcgttacctcgagccctcacagcaacagccatgtcggaaagaccatgtctccgagacctttgtaagtggagacagggtctagaacaatggtgttcatgtttgtcgattatgcagagcctcagtgttttgtgccacgcaatatggccggctcgtggatcattatgttaatcttgtaaacgtgaaactggacgtggtggccaggtaaaatttggtagaaagtcagtgagtcctgcgaggactctatcacacactcacccggcaacggttgatggcctactggtgtgctcctatgggttgcacacacaggacaacaccatttcactcttccgtgtcttgccagatcgcctgattgctgtgcctcaaaacagcgtgtgctcctatgatgtacctagtgctctggtcgcacatatagaggcactttttcatccgaaaaaaagtgggactgtaatttgttttgcacatacca

SEQ ID NO: 2930 - DNA, 1600 bp, Toxoplasma gondii
  source 1..1600: mol_type = genomic DNA
atagcgagagaaaggcgaagcacaagcgagagaaggcaagagctttgggggcgaactcgagcgagcggcggcagctccgcaaggaagctgaagagctcgcgaagcgtctgcgctcttctcgacttgtctccttcgccctgacagccggcgcctgtcctctcctcggacaggtcgcggcggtcggtttgcctccacgagtttctctgccgatgtgcggggaatggagacggcgcaaagaggaggagggacagaaacacaagagagagaagagaaaaacaaaggagaacccgcagcagcaggagctctgacaagtacctgtccgagcttcccgcctgcggggcacaggaggtgtcgagtaacgagcgtcatttcgccgacagacacaagagagatccgagaagaagcgaagaacagacaacaccctcagggtaaagctgcgaggaggccagcgagacaaaaattcaagtgcgaacggcgcagagtttgaggcgaatgccacacaaatggcgaggcgaagcaaacgaaaggaggaagactggaggctgcaggcaagggggaagaacagacaggagtgggatgtccaacacggtgaaagagtgaggacacaaaaaggaaacgcgtaagaagcgaggcggagagagagaaccacgctcttatcttcccttccttgtatggacacaggaagagcgcacttcctcgtagaatcctctcttccggtttctccacgcagcgccgcccccccaccggccaccagaaagcgaaagcgttttccagtggaataaaatatgtttcttaaaagacgcagtccaccacgaaaaatatctagaggaagaggccgggcagtgagatcaagcggcagccgggcttctctcactcaacgacgcttgctgggtaatgttccgccgtatggagcgcagcagcttcctcggtacccttcggctgcgtctcgctaacacaggccaatctaagcacgcaatggagctcgctttccacttaatcaaggcttcctcttctttctctcaccccctcgtcgagtccgagacacacgcgcggggccgttttttactgtctcctggcgctgcccctcctcgtgaagcagagggtcctcggagagccatgttctgctcggttgaataccgcaagtctggcaggaaataggatgtatggaaaacccagaatttcctccccaccggctacgggcgaacaaaaaatctgaaaattttcctctggacctgtctgcaagtcttcaactttacgactccggccccgcggggacgcgactgcgagaagacaacacacgcgttctcagtggcgagtttggtgaaagcggccttgaggaggctcggcagagtttttcggcaggacaggcgcgaatctgagagttcatcttcacattcattcgttttcgatccccacaaagcgccgcgtttacaacacagccttccactccggttctcgttggagagagctcgagcgggagacaagctgcgcgttctgccgcaacgctctcttcgacagcatcgatagcttaaaagacaagacgggaaaagaagggccgtccgcagcagagagaaaccggatctccttttgctcgacacta

SEQ ID NO: 2931 - DNA, 2152 bp, Toxoplasma gondii
  source 1..2152: mol_type = genomic DNA
gagtagtgaagccacacgggtcgcataactatcatatcttcctctttattgttcctgttgtaagtaccgttcgacgtaccaggtaccaaggaactccctcgccgcgggctgtgctgttctgtgctgctcttgttagtttgtctgtctcttcgctattctgctcggtctcactgctccgctgagagggtaatgcgtctctcactctgacgaacttctaacgtttagaactgcaaccgggtggcacgcgtcgtttctagccttaactggttgggcgtcacgtgattgtgcccagtattccgctttaatattctgtttcagtgtccagccacggcttacgcggcagaacatgaccctttgcgacttcagcaacatgttctgaagaggactgctgacgttcaagcggtcaagttggtaacactgcagcatatttagcgtttacctttaacgcactgaaatgtgttctgctaatcaactacggtttatcatccgctgtcgctatgcagaatttggaagttgcggtctgccttcctgaagagtgtccgctgtgtggctgtttccaccgacagtcagaccggaaatcgttcgaagagccgacgtgaaattcgaaaattgcagtgccttggtaattagcttgagtagcgagcagtaactgagcttcagctgaccccatgctttccgctcgtccaaatgagaaacgaaatgcagggacttacacagtaatcctgcacgacagtaggtgatcatcgcggcatgcagcgacctgacatgcctctcacacaaggtttccctgtgtaaacgcattttggtctgcaatcatccgattgagtcttaaggaaacagagaaccagcccgctatgttctgacgcgatgtgtgcactacgtgagagaacattctgtagaatcacaaagtgtatatgacacggcgacgtgatacgctactgcgttgtccgtttgtcgtaactcagtcccctaaacggaacgcagcttgcagagaatgggagaaacggaggacagtgcagccgacgaaagcaggcgtgtgggtgaatcccgctccagacgccgggttttcgcggcttaatcggcaaggggcgtcgggaaaaggtgcctacatttttatatttctgtgacgtttaatcagccggagccgcctccgagcggcgcgctcaggctggcttttcacgagcaacggattctgtagtttgtaccatgaccataagcgcgcgtgtgaaaaatacaagtaacaacggttactcgagacaccgttaagaaaagcccccagctataacatgttccctcacctcggcgagtgtgtatcgttactctgtcaccggacgaaaagacttcaaacctcggaagaaatcacggttgtcacttttcggtgaagagtgcccatttctgggaggaaccacatcttgtttgtgtctggtcaatttccgtacgtcctctgcagcagcgcgcatatgctacacaaccgatagctttatacagacaactgactgccgttactttttgcgggagcagcaggctcacagaaaccagccccgtaggccgcctggaggccccgacgcgtgggaacgtgaggtggctttagcctacgaaaggcaccgtcccgagagtcacagcacgacttagaggaagtggctgtggtaagggaaaaattttttgaggcaaggatagagtataatgagttagagtggaaggcaacgcgaatcatcgaatggtggggaggtgaggggaggagagcgactcagctcgttagtgcttgcctgccctttagcttgttttttcttggactgtggggctgtataacacagcccgtgaaccgacgacagcacacaagcggctcaccaaggcctctcatgacactttcggcgagcaactcgtcggtggcaatttggcgcccttcaaggtatgctgccttgaaggaaggctctttgctacggggtggagcagtcggcttctttttttgtgtccaccggagcatttggttgatttccgtacccagcggctggctttgcaggttgtcaaagctctgccgcccggtcgcggcacaaaacaccgcgtgtttgttgcaggtacaaccgcttcgggatatgtcgcctgcttttcgatgaggagatgacgctttgaacttcctaaacctacgccacca

SEQ ID NO: 2932 - DNA, 2471 bp, Toxoplasma gondii
  source 1..2471: mol_type = genomic DNA
caaccagatgtcgatggtaaggaaagtggaagtctttttgtacgggaagtcgctgcagtttccgtgtcgttttcaagtacttgtcgatatttcgagttcgccagaaccgagagggactagtcagtgaagctcgccaaatcgactcgagcatgcgaaaaagtgccggtgtcactgtgtttcgtggtctcggggattgccgctggccctaatgcctgcgttcgttcgcgttccttgcacatgtgagttaccgtttttcgtctttctagcttgaactgttcggccagaaattattttggccacccgcttctgttcatcttctagtggcactccgttactggaacgctctgccaataatatcctgacctgcgcttccaaatgtggcgtccccaggactgcctctaacagatcgtagttgcacaagcgttacacgcctcctgacacatcttttgcttagagcacctttgcagtagacacgatagcccgtattctgtaggagctacatggtggtacccgccagtaacagaaccctttcgggagcaggagaggcagtttgatgcaagggaagccaggtgtacatacacctagcaggctgctcacagccgtcacttcgccagtgactcacacagttacacattgttatggtggaacattcggtgagtgttaatttcttggcaccaatttccaacagcatcggttggccatgtccacggacggctccagaagatgcgtgtctgactttaacggcctctgctgtcgtccctgcaaccggcacagctcgacttcgtccactagtcccgcgtagggttttgctgcgaggatgtcgtctggtgcgggactctcggggttgtcgctgaaaccgcagcgcgctgacggggactgagggtgctgtggatgtccggtggccagttgtacataccgctgcgaatgcttatttcgcagaacgcccgcgtctgccagttacgtgggtcacaagcgcctactttctctcaagcgaaatgctgggctgttcgcctgttgatggtacgccatcagtcttcaacgacgtctcaagcggctactgttgaacagaaacaaaattcctgtcgagcgggaaacaccgctttctcctcttgcgcttgttgccggtgaaaaaaacactcagccgattgaatgagacgcctttcgaacatgcaggttccctcgaaagtccccgtccggaaagactctgcgcgcctacactgttgcgggaaggctgctgatgtttacgggtcagttttcggcacatggagctgacctcatcaagagatgaaatgaggaaagagccatgccgcagagactagaggtatccttgactcgtttctttgtgatctgacggtttgtgatcaccgtcgttctgttgaattacactgctgcttatcataacacctgttcctccctttcgccagggcacacagtttcaggggccaggatgacagttcgttatctgcagagtcttctccatggaactcgctatgccagttggaggctgcagactcccagaattctgaggttgggtaacgacgctttggtttctgtatcgagatgagacggcaagaaggcactgggacgtggcacggcaagcataagcatgtgcgccaactcagactcttgcagccaccggcgttcttctttgagcatggagctagtcgccaaacgaatagtctcttgttgtctgaagcgcatctcatgacctgtgcagaaagtctttttacacaagacatcgctggtgctgatgctcatgtcactcttcaaaacccctcaaacccagaggctgaagcaagctcgagaaaccactgattgttactgtccagaaggaggcatcctttctttctgcacgtccgattcgtggaccctgaggaagtccttatatccctactttgctaccgccaacacaacgcagaccggcaccctcggtcttgacccgccggcaccctcgaagctggactttctttgcgcggtgtgtcaccgcgttccacccacgacggcaaagcgcttcttatctcttctgcccacaccgagagtttgtcgagaccacacacactcgtgcatgccattaggtgtctggggaggatgccttttaccaaggtacctttcctctcaaggttgtctggcatcgatttgaggtgcacgcatgcacgcgcgttttgtcaaccgtctaagaagcgtcaccgaagcctgagaacgcacaagaaacagaattgtttccgcttagaaaaacgctaattcattcaggtatgaccgggcagcctcgccttgtcattcggttgtgtctagctcctttctaaagttcgtttatcctcagagcggctgtcactagaccggagacggcgcacgggtggcggctgcagaacaagacacgcgacttgtcggaagcgtttcagagttttcacccttcactttggtctttcggcgacggaggagtttcttcagatgcttcaaactgcgcggaaaaa

SEQ ID NO: 2933 - DNA, 3957 bp, Toxoplasma gondii
  source 1..3957: mol_type = genomic DNA
gcttctccgtacgttctcgtcgacgtagaagcatactccttggcaccggcgaagcagaatgtactatttcatgcgtaggagcctgatcgccagacatcaaacacttccgggatgaatagttgtggtagtgcgcccacactcttgctccagggataaacttgaacggtgttgatgtggtgttgtgggaacacagcgtcaaatattactatagttgtcaagatagaggagccgtcacggtttggttgaacgaagagtaccgttatcctgtgtgcgctgctggcactcttcaaagtctgcccacgtccaacatgcttgatgtgcactggagccgacaagcgcattcagcatgggacgaagcaaacggggactgatcaagacatcgagagacggcgagtcttcagtgcaccctgcgacagacctcgcaactcgaatactatcgagtgctgtgacgttttggctcttctacttgcctcaaatttcagcaacgactttttgcctctcacgctgtgacgactcaaggccaggcgcagaatcgtgtttctattcggtgcctcgtgtgctaacctgggaacagacctatggatgacttgccttaccctttgttgcatttgtgggctaacgggtcgacgtcatcatcgttgaagatgactcatttgtatcctttccgccactgccgaaaaatgtcatcgtagaactccggacttcggcaaagaagagtggccaataactccggagtttggtgttgggacgtggacaaagacaccggagttcggaagtgaggagtgggcgaggactctagcgtttcgcgactagcagagccaaccacgcgccacaggccagctcgacgaggcggaacaaacgtgttcgacgcgcacgtgctccgccaaaggagccgccatcttgcagttcacgcgaggacctctccgaatcgccttgttcggcacagcgcgtctggtccctctggcgagcgagcacggccagcacaaccagcagaagcgttgtgaagaaaccccaagccgtcgtggactcgatccctcgctcaagcgccggtgcgagctcactggtgttgcactctggagtttcgtgcgcaaggcggccccggtggagaggacacgaggccaaagaaatgtggcaagtgccaccgctttttgaaggggaaaggcgcgaagacacctttctgtgagtgcgcgttcgcgcaatagtgggtacgggcccgttgagcggtggcgggcgtcgctcgttttctttcggctttcttggaggatacaccctcgatttgaccctgtggcgaagtgtcgtgtcgttgttcgtgcggcttcttttgttctgtggctgtgtcttttggctgactgttttcactttacaacattgttaacctgttttgccttcctgtcaagtgactcttctaaattttggagaaacgggaaaaccacgagtttgcgtacacgaattgacaacttgtcagctgtcgatgttagaaacggagaaaatggcatcttcgacgaaaaaccgccttagcaacgttatggaaagcgttagagacggtagtattgccgggcctactcaagaacactgtctgccagtgcagaggaacacagagggagatggtcttattcgagtgcacattcatcagcagaggtgcgtttctggcatggtggctctacgattgccgtctaggtaagtaagcgtttttggacgacccacgtacgtatccccaaagaaggtggaaaagaatgaaacaagcacagatcaggaatttgtcgtctgatagcaatagtaagggccactgttttggtacataactgtggatgcagctgcgccaaccgcgttaccgaatttcgtgcgaaggaatcttcagtagaagtgaatctgcatgaggtccccgagaacgctcagcatgtggctgaagtgggacacaccttgaatagtttaacttttcacgagttctcatgtgttgcttaacaaggggagctatacagtgaagcgccatcgttcaccgctgaaaagaaccggtgtctgtgccgttgatgccacgttttgatcgtcaattcccttcgaaacccggacaccaacacatgcgtgagggaaggtaaggcaaacgttgaatcaaagaggtgtacgtacacctggctacccactgtagtaggttttgggcccagccacttgctgagaatcagcagtttcatttcagtatggaactgtatgcggccaagcgtctgggggaacgtaaacccatgaattgtgtaacactcggcgcctgatgctaggaataaccggcatggacacgccttttcgcaccgggtcattttgtaccttcttcctgcctacgttcactgttttagaattctaccttgagagactttacgctcgcaaggcctccacgaacctgagcagcatgcctgcgtacatacttctacggagacaaatcttactgctcaacttgaacagtgtccttttcggtctcggtacggaaaaagcctgcgacaagaaagatttgagtccgcggctcccacagaggctttctttcttctgcaacgcttttgtagtgtaacaactctcatcaaacccgcggcgcaggctggcgttagaagcgggttccctgtatttgaacatcaaagatgcactctatacgcttcttctgcaagctgtagttattctctccgtaaacagatcgttgcctcagcccatgggcattgtacctcgcagcagcgcccataacacaccaatgttttgaaatacagttcaagttactcaaagtttctctgattctcggtctgttcctcccctccttcccaccacactctaataaacacttctgatgctacccctctatctcgcaacggcaggaaaaaattcacctccatgaaaccccgttttctgtcgtatgcgacacaccggctgcaggtgttactcggttttggcatttacgccatgtctcggcacctgataagcgcaaatggtaaggaactcaccgccacacaccttcgtatcatggacgcaccccacgtctctgtcgcctgagcaccgacagctcgagtccctttccgctgtttttttgttgtccagatggtacacaagaaagtgtctgattctaagcgtcctttgagcagaggcgacccgttacgcggtgccttcacgcacgccgaagcggtcgggtgggaggctccaaacgccttctgtgcgttctgttccctcccgttgtcgcccccctcaaaccatctgtcttgattgcggagactggaagcagtctccggccgacactctgattgtcgcttctgtttgttttgctaaaaaagagtgtgctgagcagaatacgccgaggcggaaaattctgttcattttgcgacactcgcggaagcagagagagaaactgggttctgtgttcagatttcctgcagagggagaagaatttacgaaacgccctggcaggctgtgcgcccccctcgggtacacacccagagcaacccccttgtgcatactcgagtttcaccgggttagcgtactagcttcagttgtcctttactctgctgactgtttttctccattcatcaagatccaaaccctctcctttctttctgttgttgtgatttttactgcgtctctcgctcgttggcgggctgtggaggaaaccagtttcgccggcacaccgcctccctcctgtagtttcccccctttgttcgccaactggtcttctgccaagtttttcttctcgttcaaggaagcaaatttcctgcagcaaaccttttgttttctcccggtcaaaatcgtctttctctcctttgtcctcgtacttgtaccctcggggtgttattgtccacactgcgtgctttactccctcccgtcctgtctctgtctcttcttgcccggggagactatctttccagaacgagcactctccgtctttcctgcgacaccgccttcgtcacttctcacccgtcaataaaacgtctacaaaaa

SEQ ID NO: 2934 - DNA, 1531 bp, Toxoplasma gondii
  source 1..1531: mol_type = genomic DNA
catgagactcgacgttggtacggtgctcgcagaacgaatgacgaacacggaagcacacacatgtccacagagcacaagagaagaacaagggcaaaaaaggcaggacgatcgccatgatgcttgcgtttccctgaagctgcagagagaagagccacttccagactccttcttccatgctctgcatagactcccgtgacggatttcattctcagaggaaacagtcatttctatggctacgccgcatgagaccgtagttcgaagagaggtgcctggtagacaaagtgtatatggaacctcctttggtcaatgaagaagcaccaattcctgttactcacacaaaccacttcagcgctgggtaatgcatacgaaacagagttgcatacctaaaattgacctctcctgtactgatattatatcttcgctgcaagatcaccccattagagcccccgaaaaatgagagactccagaggccatggggatatgtttcacgggaatatcttcgccacgaaaaccaacgacatcgtatacacgactgaaactgccctctgtagaaatatgtacgtcctgactctcaatagatgtcgctgcgatggatcagtgtggctttttagctacacaacgacagggtcactgctcgagaacgcgcatcgtgtgcctgcacaggaaaccatggactgcaagttcttacgatcagagtacaacaagacttcaggtcgttacagtcgacaacgtagggaagttaaaaaacctcttcacatcctctggacagaaatcaatacgctccgactaatactttacaaagtcgaaatgcgtacgtgtacggtcaaactgattgtaacatgcccagtgaaatcgcgtagctcagagaaaatacaccatcacgaaaagcttgcgtccaggaagcctttcagatgttgacactaacagatttttcgcatgttttcgaagctggatgaacgcaacgttggccaaaatctactgtatgtccttccggtgtcctcgaggacgcctcctttcaccgttacaaggtagctgcatgcgcatgtgcatgtcactcatttccgctgcttaacccgtgcgattggggattcccggttgctttttgttagcagcatgttggtgtgtatgagatttttgtttaatgaatgacttgaatgtgttctggtagtgtctccgtccgagatgcgaaggatgattcagccgggaaagctgagttctgatgaaatgtgtgtgtctccaccatgttggcataatcccgtcgactgtcaggtgaagcatggattattttggcgatttccctttacgcgaaaagcgcgcagtctagtcggcaacagtttcctcaagcatcctttcgggcatcttctcagaggtgtggttcgctttcacaccgtttcacgtgtacacctgcatagccgaaaggatcgtggctgtccaacgtgctactgtggtaaacacagtacatgtcctcttctctgtgttgctgcagccgcagaagggtaacggtttgacgagtttggagcatgcgagcata

SEQ ID NO: 2935 - DNA, 1648 bp, Toxoplasma gondii
  source 1..1648: mol_type = genomic DNA
gatgttggaattcctgtgacgcacacactttggaacttgcctgaataatcagaactttgtcgggccgaagtcgtttttgttctcgtacgaagacgaggagaggcggcatatgcagcgagtcaggaaccatcgacggatggtcgaaggaaagaaaagagagcagccgccgggaagcgggacgggaaagaagcggcagccttgccaagaacgtcgggtgtactgccaccgagggaggcgggcagctttctgcagaggaacgcagaacggagcagttttcttccgctcttcgactcggcttcggtcccagcaggttgtcgcgcgtcggcgcttccggacgcttctgcgtgtggaagaagcggccggacaggcgggatgcgtttgaagggaaatgagtctgcctgtctgaaatcgcgtgaggcaactgaatggtcggacgtgcgaggcgtcggtccggatggacaacaaaagcgacgcgtcgagaagaggcaagaaagggcaagctggcgcgacagccacgcaactggcctgctgcgtcccttgcagctgccgaaaagaagtccagcagctgatgttgcccaagagtggcccaccctccgcagctgctgtcgcgtttcgcgaccttctgtaaaaaactcttggacgtgcggccgtgcatcttgttcgcggaaagcaaggcattgatcgaccagtacgcttgcggaacggagcaggctaaaccctgccggcaaccgcgctgtcgcggaaacatttccatcagcagtctcgcgttgacctccactgagatgcacacaagtgaaaagagaatcgtctgcagtttccagcgatagcgcgcgaaagaagcggagccgcggagaggcgcccccggacccgaagcgggccgcagagcgcgagaggcaatggagcaaaaaaattcctgcctagaggagaatcgccattcctggtcacggtcactgcatacagaatcccctcccatcgtgggtctgatgaaaaagagaaaaggacaccattgtggtgtggagccgcggtgccgtctcggctttcccgttggtcaatgcagaagcgcgtccccagtgactagagccgaaccaccggcgactccaacaaaggggccttctactccattcaggggtgtcgcatggtaaaactgagttctctaatccatggcacacctcggaaaaacactactcacagtcgtggaatatcttaaatagtcgagcgctcaagagtaccaagctgcaatgcccagctgcctctcggacaacaccggtggactaggcagcgcatcaaggagacaccccccagaggcggccttactccagaacatgcgaaggatgtcactgttgatgcaaaatcagggtactgaccatcaagtgaacagtttctagagtatccacgtggctccaaaaagtaaagtatggccccacatcaaaccgagactagcctgtcttcgttagaaacgctcgtgccgatgacgtcagtgcatgcacgctgcagacacgacccaaagtagctgatacggtgaggaatgagcatgctgccgattcaaaatcgtcagtcgcggctacagcagtgttttatgtacatcctcgttttctttttattcaagaaacccaggtaacatgtgcttgaagggcggacttgggtagaa

SEQ ID NO: 2936 - DNA, 1755 bp, Toxoplasma gondii
  source 1..1755: mol_type = genomic DNA
tcgaattacgaaagttgtggtagccgcacaggcgttaccgaaagtggcgttgcctcttcagcggataatgcaaattgctgtattactctgcttggatcggtcgaagtaccacacagctttttctaccagaacgtgtaaatcagcgctgacaggtggagaacaggtgaggtattacagtctagttgctgcagaaggactacttgtgccgactgcacaagaaatcgtgttacccaaaaaggagtcaggggacccaagggatggaatatgaatattcttccgcaccaaagaacacgcccgtgcctgggaacgggtggttaattcttttctgatctcgaacaacccacctgccatttccgtacatctgtagcatagtgccaatgttgtcttccctcttactgtgatatttgtttcggtgcctgaggaacagtgtggctgcagtgctggttaattgccacagcagaaggcgacgacttgattacggacagcagccactggtgcacacttttgtgagctgacaagtatgtaacttcaagcaagctgggatgtacgctcatctgacgtgcatccctacaaccacaatccactgcacgcaagaaacaaaaccaccgcggaaccagctgagacacgttcccaacaggcttacggggtcgtgtcgttccttcctctcacagctgcagcaccaggcactttgccgttcctgaagaaaagaagtacgtgacacctggaggaaatttgtgtgctcctctctcaccttcacgcacgacaactggcacggtcactcgacgtacacatactgcatacgtcgttccacgtggagagcttccaagagctgcatgagttgtttcatacgacacaatatgtcgttaaggatccttactgcggctgtgaagacgcgattacctgacacagcaagaaatactgaacattaagtcgctctctgtgacagatgaatccgtgtcgacatgcgtcttcctgatgaacagccagacgtcagaaagagcgacgcgcaattgggaaactaaggaaagcagtttctacatcgatgacagacattcagagaaacttcagagcaaactaagctgggcaccgcggctgctgacgccgtcgagtacgatccaaagggacgggcatcttcctcatggcgctgtcgagtaaagtgccctaatcaattgttagtttactagcacaaagtgcggtgttaatagtgatatcctttgaaaccagtgggtgatttgttagtatttatgtcattcctccctcgcttagtacttttcgcttcgtggcaaatggcttcaaaagtcacgcgagaagcgattacgggacgtgccacccacatattttggatctgtgacagtgcatttgcttacaaggtggcaccgcgccatgttttcaaaaagattttttaagttgccagcaaaacgttcgacgtagcaattatgcacgcgtggtggcgatgacttaggcttgccgcgacaactgcacaatctcttgcatgcatgcgatccaagcacacactatcggctacggaaaggaggcttgcaaattttcgaattttatgctacatcattcccgcatctgtgtcgtctaaggttacatgtcctgcatactatcagccttttccacccggaggtcctcaaggaagccggtttggggtcatccatgcttgtataacgcatacaagggtagtgtcagtgctagctttgtcaagtaatggtgggttcaatgtcgcaatcaactcgagatgaaaatccacaa

SEQ ID NO: 2937 - DNA, 2351 bp, Toxoplasma gondii
  source 1..2351: mol_type = genomic DNA
gaagcagcttgtcactccttcatgtctgcatatctgcaggtatagacgactgtccatatatacatatatatatacatatatatatatatatatatatatatgtacgggagcgctgacaagccaccgacgcgcactcgcacatttaccactcatccactgtagagtgaatatatatgtatatgtttatgtgtatattttcaatgcatgtttattgatagtcgcacatagatggaaaagtttttaagtcggtgtatggatctgcatatgcgttgagaggaccattgtgcaccagagtcacttcaaggcttcgaggtgcgtttcactagggccgaagaacttctagagttcgttgcaatggataacaggtgctggtgaacgcggaggtcccatgctgagaacgggaggcccgcgtgggttctgcaggaacactctgtgcaaagatgctccactagacggccgcgaaagaatgcacaaaacagaagcggcgttgaggaaccaattcgtaaaaatgattctattcctaacggagacgcgactggttctcccaacaggctcaaagtaacctttagacaaatggaactctcgctgtatctctgagctcagcagcggcagcagggagagacagagaaacgaatccgtagtacaagaccaggccacgaactttgatttcctttgttctgttctcacgttgagctccacaccgcgggagtgcaccgccagtcctgtcacactggctcggcaaaaacaatgtgtagggtctcgcctcgcaactgcttttcgtcagtcccccatcccgtagtcttgagagtgcaggctagcatacgagatgttttctccagtgacgacgagtgttgaagaagcgcgacacaaggcgtcgacgcagtgtcatctgccagacatcccacaagggctgtcggtgtgcgcgacctcggcggcccaactttttttgaatttctgaagacactaacttgtttgaaacttccattttcgccgttaggatgacttcacggtctaccggaagccacctgaactggaaaagagtacagcagcatcccgaaccttcagcagatgagtgtaacttggatgactgtatatattggcaggtaaggggcaatcagtgcgagcgtaaggtttgccacgaaatttactcgggaaaacagactagactgtactagggttagatttatgatcttcagtacaaccggcaggagcgggtacactgtgcaacaggctcgtcacgcacttcctgtacgcctgcggaacatcttgtctgaagatcgtagacgaatctgtgagagttttccacgttcccatcttccagtggctcggcttctctcacttggcttccagcaacagaggcggttgttaaagagcgtttccacttttttcaacacctgcaggaatgctcaccactctccggcgcttcttccctgctttttcctgggggtagcccacttttttgttgaagttttgtcgagtccgcatacacgtttcgcggtgggtcaacgaacccccgtgtgcattgtgcccgccagtaacctgcagtttgtttcggcagcgagcgagaaagagcggtggattgcaagcgggaagacggctctgcgtttgagtctgtttccgccttcttcagtgtgtaaatagcggttgggacccgtcacttgtctaggaatgtctcttatcgcggatagcctttgtccgtcattccggcgatggtggctttctcgtccgcgtggatagtggtgtatgtttttcccgaaagcaattgaatttggcagagtccctgcagctccattttccttcctccggcagagaccctgcattcttgagcgaagagaaaggcggaaacgctggcgttttcggggaacgcagcgccgtctctcccgaagcgctgtcccgtgtccggtcagcgcgccgcgattcgcaagttccgttttttctgtcacgtgcatgcagatggacgacaggatggcaaggaccgcttttctctctacgaaaattctgctttcaaattcgtttctccacctttctctgtcttctttttgccgctctcgtgcacatgcgctctccaaacgttcgtacgcaaggggtacaccctcgacgcgtgggccgcttttggtgtccgtccgactctctttccactgcgtccaccagctttttctctgacagtcttcccgccgcgtcacctctgtctcggccttcttcaggccgtcgtccgtctcttacaagcgtttcacgcggagagctgcgcgcgaggttcccccgccgcggatagctcttttctaacctgtgccgccttccttgtctctcctcttgtctctcacgcccccgagaaatcgacttgcgcatacaaa

SEQ ID NO: 2938 - DNA, 1522 bp, Toxoplasma gondii
  source 1..1522: mol_type = genomic DNA
ttcagactcaagaaaatcgggttcaagtctggagctgcgaatgcgaaggctgatttgcagctttcttgagagtcgcaaagcacttcttttttttgtgccgatatgcctccttttttagttcgacatccttcgtttcgcgtcccgcagtcgccccagaagagagtccgggttgcggccgagcgagaccgtttgctttttcggattagatgcacattttgtgcctctgaaaatttggggagtttcgttcatgcagaagaccatgtacagcgtgcagcccataaccctgtggagggcaagggcgccattcatctgctgtagcgctcgagtcgcgtctaagaatagctgaaccgcgctcggagcgctctctggaattttcgcgaattcattccagacccacgatgacttgccaagattcgaccgcggcagaatctccggagtgctttctgcgcagcccagaactttgcccgaagatgcatgcgaccgtttttgccagcgcaaaaaccgtcaaaagttttcgatccacctcgaaccagtgctggattatggctctttgcgtctgtcgacgtttgacgtcttttctgttcgagaagcgcgacacgagagaagaaatacacgctagcaaaccgaagcccctactaggtatcgataccacacacacccgcagccttctggaaggagaaaactggtgttgagatgggccattttcaagcttttcctaaatgtttctaccacgagctcggcgactggggtttacgtcttcagtgccggtatctaccggaaccaagttctactgtgctagcgtggcatccaacacacttttccccacagacgttccttttaccggcagcgtttcagccttgtcagtgcaaggctgagagatcttttacaggactgcatggaacaagcaaagatttgggagggagatgcgtgttcatttccgcggtatatcagcgctgtgtcagatgagaaatccaccgggctacgactttgtgttcaggtgtcggagatcctgtgacaccggtggacagacagcaaagacaagatataagaaagcgtgcatttccatggatgcgtggcttatggtttgtcggcggcagcgagagagcgaaatcagacgcgccatacagtgcagtagaagaaagcaggccttggaaaatccgattcaacctccttttccgagtcacgccccagaagacattcccaactcgccctgtttacttctggctgagacaagacagctccccacaaacaacccgtgtcatgcaacttttgctgaatcgatttaagcgttgctcactcttcttccactccgaagaaccagcagcggtctcagtaaaagtgttttctccagacaacccagacacccgagtcccgttctcgtcaaagtgaacgaacgacgtaccagaaacgatcccagcacagacagaagattgatctgagcacgagtgttgcggagagcttgtaaagttattgtcgcgataaacatggtggaaacaacaggaagaaaaatcccggcttccag

SEQ ID NO: 2939 - DNA, 2842 bp, Toxoplasma gondii
  source 1..2842: mol_type = genomic DNA
tgaatcggatcctcgtttacggcgaggtctgggaagactgactttgcacgaaccctgtgctcgtcagttgtcgtggttgcttatgaatggccgcttgctcccgtttgtcagtcgctcttatattcgtcccttctctctgagcgacgcgatgacagtgcggtggccatgacagattcgtgcttttcattttgctccgagcgctctcagtgactgactattttctagacggaacaacggcaagagaaaagtcctagaccgatcagaacgcatttcgcgtatacgggggactttccctgttggtagagttctctgttcaaatgaaaacgaaccagtaaagcggaaaaatggccgcggcactgtatcttgagtcacacgccatcggctgacaacacgcgttccccgtttgtctagtggtcaccatcagtgacaggcatttggggctcacggtaaagacagcaagatcaagtggtggattctacgtgtcagggcattgtctgtgtccacacaaagttgccgacggatcgattattgctggagaaaggaaatcgccttcgggccgcagattacgctaaacccttcctataatacagaacgtggacgattcccctggatggagttgcttactttactaaagaaatcggacgtaaatgcccaccaagtacacagcaacactcgggtcagcggacgtcaagcgtacaaacacaccctaaaccctaaacagagtctgagtgggccgcaatcaatcctatgtagatgaaatagattggagatctcgacaggaacatgtgctaaagagctatatgaaggcgtactgcacgtgctgagcaagcagtttatcttgacgtggcttgtgactgctactcgcacggagacgcctcgaaaagcagtcatcggagttggcagatgtggaggtagtcctcatagacgagcaccgaaggttggatgatgaatttgggtggagtttggggggggagtgtgctagtgggacaactgaaggggctgatttatgaattctgcagaaacaccttcatctgaagtatcaagtagccttcgttaaacattgcaacacaattcagcactgcaagagtagcgtaggaatgcgttaagagctcttttcactcgacacactaacattcctcatgaacgatagaaggagacacagtaactgctcttgtgagtgacatttcgttgttattcctatcactaaagatacttttcgccgcaaaaggcaggaggtcatcacctgctcccgccgcaccgccagggtaggacaggcaaacatggacgtgcatgaacgctttctgtgtttggattgcgattttcagatatttgcagctataggattgtatgcgccggtggagtctgcccagaggatttttctgcacgagaacggtgagatcgatactccagcaggaccagcgaattgccctgtcgaaggatgactggggcgacactgtgtctcgtcctgcggaggttcagacagaagagtgataagagcacacctgtggaaggacaagcaaacgatcataaaggaaactaatggaacagcagaccaccaggacgagtgatcttgcattcaacaaaaggacaggaacatgtttctagcaggacgggcgaattgagatttcaagtattgattagagcgacactcgatcgcatcctgaggaatcatgtggaagaccagtaaccccccatgcgcaaatacataattcgagctgaggcgtaccagggcaagcgaggtttgatgcaacagaacatctagagcagtctatcggcacgtgaatcgcttaccgtgcgctgctgtgccgcacgctgcacgagtggcatgacctccccccgatgtcagtgaaaattcggcaaacgatttgggggtgctctgtatgaatgaaaatagagatccaagcctctcagcaggatggatgtctgatgagcgctgttaaggctctccaactgcaggcctagcttctgcagacgcccgtgtatgtgggagtttggctccgcactacgatgcaagtgatacctgctcgactatggagatccagtgttgctgatgggcagtgtttcgactcataggttgtttcgaccgcaacaaagtgcttagggggcccgttgatatggagagaggcaattcgctatgttgtgactggttctggccgtcggcagccccgggcaaatttgacagatctcgccaccacgtgaaacgcagaaagtgcaatatatgggctacggaactggacaccatcgatgagattctgtcggaatgacgcacagccccggatttaaaatactcgaagcagcactggtggctaaccacataaagacacagtcaatcccttctgagaagaggcacatagcaacgctctcccgcagttatggcttggtgtctgtcttctgttgacctgaagcgccgtttcaggcactcttgaacttgtcggccctttaaccgaagacggaggatttccggtgaccaatccagtttttttcctgctgactgtgagctctttccggaactgcagcttctaaaagcttgcgcatcgaagaagagacccttttgttaagttcggtagtccgggacggcccgtgtgaagggagcagtggcaactcgtctttctcggggagacacactttttgtgtacagatctgtcggtgaacaacagttctgcagagttcgttctcgtagtggcgcgcccccgtttcagaatccttgaaacggacaagtgcagacagtcgaaaagttagtaaagacaggtagctatggagggctatctctgtcctgctgctccgcgatccggaacgacccaaattcacagctggtgggtcagccttcagggaaaagcatcga

SEQ ID NO: 2940 - DNA, 3295 bp, Toxoplasma gondii
  source 1..3295: mol_type = genomic DNA
aaagcgaacaatgcatcgggttttcgccagcgtttcagcatctccagagtcttcctctacatttgagcgaggggcgtcaactccagcagagagctgagagtctccatttgccgcatcttccatttttgtctattggtaaagtgatgtgtggatgtgagtaaaggtgaggagcggagcatgtgtgtaaaagttcttggcttttcgaaagggtttctcgatcagggcagttccttcgcggagtagaagcatgataatccaaggtttctcggcggtttctgtacagagttcgggaagcatgagagcaccatgtatggacagtggcagcacacaacaggagagtggaggagagaaccgcttaaaaaacgacgtccgaagaataaaagcagcaggtggcaaacgaccacgggcatggttccgcattccgaaaagtatcgatcaattcgtttgggcgggcaacctaaaatatgcatcattctttctccgagcaaccgaagacgtgcttttctgcacactgtgtagcaccaaagcaaatacgtagaagaatctttccacgttgttattgatattgtttcaatgtgtattcaatctaaaaaagaaggaaaccgaaagatccgaacgggagatgaaaagatgctaggttcaatgagtgcttttaaagctgactgtcatgcgcccctcaccattgccggtcttagttcagcaacgaatttgcaccagctgaaatccacagttgaaaacggccgacaacgacccatccggtaaaaaacatggaaaacacgggtttcttcgccgcagaaaagcaggcggtttatgggaaccagagccgagcttttcaatgaatagcttggcattctgaacaggaaacagcgaaatgaggctagaaccatttggaacgtgcgaaacacctgaagcaagaaaatgtgtttgtttgcagagcattaagcaagagctaaacactaggaaaagacaagccgcccatccgaaggacagatctattccgaatgaaaggaacatgtcaggagaagtacatgacgcggaaacaatgaaacattgcacgaataggagactaacctgtagcgtttagtcgtttagtcgtcgcgggctgtcatcatccggtgtccagtgaacgtcacggctcgctcaaccgcttgatagtcagtctatgaagcgtggtgaatcacaatgaaagtgtgcacttctaaaaaaagacacggcaggattccagtcttgtgttgtgactcgagcggagatgaaccgaaagagctgatcaggagagacaatgcatgtgttcgtaggctcgcaccgttcccggaggaagccgagactcagttggcgaaagagattagaccagtcgtgacgggaggcacctcaaaaagatgacggggagctaaagataacgtctaggaggaacggatatctctttgctgacaagcggaggaaaaacggagaatttaccacaggtaagcacacaggcaactgaacacagcgggagcctcgctgtctcttgggcatgtgcgacaagcctcagcatagagttcgtgtgaaaaaaaactgttgtcactcgtcctttttcatgactcgtcactcgggagaatatgttgtcgtagatctgagataaaatcctttcattcagggataattagaggtgttgtttcacttcgattcgggaaacgtcaccgcggtctccgacaggaacagagccgccgctgcaagacgcctccctgattttgcgcgggccttccaggcggcagactgtgcattctgatggcctcgtgttccagcttcaactcgaccacaaaacgagagggttgattacacgaagtgacgaagaggaaacgaagcgaatgtagagtgcctcgaactgtggggtgtctaaattctccacattttacctgcagacttataaaacggggttatgccttcccaccgctggggacaaccggaaacgcaatgtttgttgctgaacagacaaatacgagatagtgtacacgcatccgtttgcttcagtgttgaaacgagaaacgatttggaagcggtcggtccagctacaatttcccacgtgcttccatatgttagtgttgcctgaaatggcatgcttcacgcactgcaccgaggctctcttgtcggagaacatcgaagtcggctgaacgcattcgtccaatagattaggggttcaacgagggcaagaacagatagcagagcaatgttgttctgttgatgctagtaaagagacatgtgtattcttcaaaacactgttgccttcttgggcagtttacagcatcgcttaatttgggggagggttgcttgtgagaagtagagtaaccactgaaatttcaagagctcatgtgtaagacagcgaacaaatgtacctgatcaaattttattcgatgttcagaaagtgtctaggggctgcccgcttccccaaacgaaaacagacgtgtacgggtccattacgcgagacgtcgcggacatgacacaaccggcccgtttgcgaaatgcgtggaagtattctctcctgtatcgtgatttaccataaagacgacatagtggccaaaattccctcccagagaaaaaaaggcggccacctcaaaagggtagttcaaatggtttcaattcaagcaagactacatccatctggggacgacaacttgcgatctggaaaatttgatggattctaaatggtttagggaccttggtgaaccagagtggcacggaaaggatgcaagtttcgaggcatgtcatacagcggcctcaagtccacaatggaaaagcgatctacagaagcgtttatgtataccaaaaaggaagttcaaattcgtcgatgacgcctaccgcagttcaattgcgttgaatcaactgcatatattgccggaaataatggaaccggaactcatgtctagtgacttacgacacaagttataaacgggtgtttcatctacacgtgtgcatgccccgggcaagcgtgaaagaccagttgattgtcggatagacatcgaagatgcacggcaatgggaaatcttcgagcacagagagcggctgttctgcgcagctggggcgagcgtctcgaaagatatacggaccacagcagggttttacttcgtttgtcttgtcttgccgtaggacttaatattgtgtgtgtgaaacttcaaattgcaaagtagaagcttgctccgtagtaaagaaagcctgaacagagagctgcgccaaagcctgcgccatctctgatgacaggctcgcacgacctcctctgccacatactttttaccgacgctctaccttttagctgccgcgaaaa

SEQ ID NO: 2941 - DNA, 1572 bp, Toxoplasma gondii
  source 1..1572: mol_type = genomic DNA
ttacaaaacactcaataaactatcaaacggctgcgtgcgtcgagaaagctaaaatttcccaggcaggcaaacctcccagcccctaaatgttgtgccagtaagagaaacaagaaaccaaagactcccacacagggctttctggttctgctccctctgctctctgagagaagcgaccgcaacctggcaagagtatcgcgagcacacgaaggacttttcgggaaaatttccgagtttcttggaatccccgcatgcaaacaaagaaaatctcgaggtcgtcacagtttaaacaccacatacacagttactgaatcaaccttagcagaccgtctgaagtccgttttccccggtacaccgacgtgcagttagttacacctctggaccatgagaacttagccgcacgaacccacgaaccacgcctcattcaagtgtctcaacaccaaataaaaaagagaaaatagtggccgtctcggtttctgtgctgggaagtctgaccgtgtccactacgactcgccagatcgctgcggcagcgctcgcggatttcctgtgggcgtggaactcgaactgaaagttcgactcccgaggaagagcctttttctcagaacctactgccaacttgtcgctgaagcgtcaccatcatgttgttgtcgctttcggcgacactccacccggaggtttgcaggaacttcttgaggtcggcgtcctgttcgtaggtggactgttcgtgctggatctcgctctgaatcgttttcaggaggtccttggaagcagcttctaccgagctgtcggcttcggaagagaaagctcttttttcagccgcaaaagcggagctctgggtgcccgtgagcggggagaagaagcgactgtttgtggctgccgccgcgagacccgcgggggctttgaaagggaccgctccgagtctcccctcgcgcagcaccgcagagcagaaggaagaagagaggaacatgcgctcgcgggagctcgaaagaaccccaggaaggcccagtggggttttggaagaaaagagacgaaaaacagaggcagaagtcgccatggtgatgaggcggggagacagcaaaaacgcacgggaaaggcgggaaggcgagaagcagacgacaggcaagaagaacaaaactcgagcggaaaaaacgacggcgcgagaagaaagggactcctgcgactcggcgaccggagagatttctcccgcacaagcagctctatgaagaaagcgcgaaacaggggcggtgaaacgctgagagagaccccgcaactttacgacgagaaaagtggaagcacaggcggcgtgtgcgtgcaagaagacttccggaattacgggaaaaagagcgagggaaagaggagacaaacacgatgtcggccaggcaccaacaagaaaaattcctattgcccgttaacagtggtgtcgtagcgaaccccacagtcgtgtctctcgagagacacgccaaaggcacactcgagacctgccaacttgttgtcccccagactccagccccgtttcgacggaagctggattgcagatgtctttaaatgtgcacagaaaaggagacgacaccaaca

SEQ ID NO: 2942 - DNA, 2782 bp, Toxoplasma gondii
  source 1..2782: mol_type = genomic DNA
gaaggaaaggaagcgatgtcaaacgaagcagcgaacgccgctgagggcaacccggcgggtgaagagaagaaggagaacgaagaaaatagcgaacaagacacttcgggaggagaaaaaaaggcggactagacgtcgaagtttccactgacattcaacaccttctggtctgtccacttggacggttttctctctccgtcgaaaaaacgaagagctctgctttcgtcgtgctggtagtcttctgtctctgctttcgtctgtatcactggctcttgccgattctgcgcagagaagaaacagcgagttgcaactccacaggaaggacgacgaattcgaggaacctgcgcgcgtcccctgtccctcaactctctcttctcgctctttgtgtcttttcccgagcttccttctcgggtgtctgcgggcagcactgacagagagcctcaagcgacgcctcggtctttcagtttcaggggaacgcatgcaagtgaccgagtcgcaaaacccccgctcaatacgtagcgatgagacatcgcgacctcatagcggttgatagagagcagccagcctcgattttcctcacgctcacacattcgctgagtttcctgaaaagggcgtgccgtcaagtccggtctcacttggaagagagctttcttcgcagacagactcgaagcgattgcaggtctcactcgagcgtttcgacgtacgttgagaaaaaagaacgtgtgtgaatcttcacttctaacaaagagacaagggtcggtgacgcgacctacttgcttgctgtttcattcaaaaaatgaaagtctacaatccgcgcttctgctgggctatcgtgcgccgggaaatcgtacagaggaagctggagaaagaaacaggttgccgctgcgtttctgcagtgcacagaaaaaatgcttgagtgtgtctgtgtgaggcctccacgttgcattatctaaatcgcgtaatagtggtaaggtggaattgcgagtttttcattcgggtcaacttctacagttctgggtcgcggcaatcgcttgctcacagacagtctccacttcacccagtgctatccttttccagttcgcggcccagctgtgtgagtcttcaacagtccctaacgccggctgtttgcagaggatgcgcggcatctcgttttcacctgttgatagggatcggcgctggtttctcacacacctggaaaactgttgaaaacaatttgaaaaagcaccatttgtacacccgctgcagaagcatcacgacgcttcggcaaccgcctacgtactgctagtctgtacggaatttacggatcggggattcttgctggcctatcccccgttgagtaactggatgaaaaggcgctgtgatgttaagcaacagagagagtgctacacaccataattggtgttgcattgccagaagtctcgttcaaaaagctccccttgttattgaaaaacattcacgagcccaaaaccgtaacttgaggaatctcagaagtttgtgatacgctcatgcatccggtgtccaggactacctgacgctaccgtcttccagcttccaaacagtcgagcgcaagtaaaactgttttaaacacaccatttgtcacgtaacgaaaaggcatcgcgatttgagatcggctggtacagaaagtcaaacctcgtactaattaactgagttggcttaacagggcggaacgagaattcgcgtgtcttggtccttgcaagggagcctcgctggaaactgcctcttgaaacctgaaaaaaccacacaaaaataaaaggatgagatgtgtgagagcggccttttgctttgcggcttccccaggcctgaaaaatccacttttttcctgtgttttctcgatgccgagacgagacagcctctcgacacagacttctcgctgtttcgcgcgctgcgctagccagtgcttttttctcccgcttttctctcgagaagagccgggcaaaagtccgaatctcctcatagttgattgacggagtctgtcgctgaaagattccccagtttccgtcggcgtgcatgcctcaccgaaaaaagtgactttcttggaaaactccgcgtgtgctctcccgcgggagcttccccttctcgactttctcctgaagcccccttctttctccattttcgtctgtttccagtttacttgcttccctccattcccttgctcgatttggagaagttctccgcttcctgtgcgcattcctccagcgcctgtcctccgctcccagatgcccccttcgcgaaattctttctcccctttgaggcgtctctcactggcgcgcgtgaacgccattcgcttttgcttgcaaaagatacttttgcggaagttttctcctctgcaagcgatctcccagctctttccaacgccctcacaacgcgcgtctctgcagctgccgacacagcggcttccagagcctgtctcaacctaacagaggttgccctgggttctccgagcgtgctctctctccttttctttactcgagggaaacaaagttgacttttacacctggctttcgcaactgttctctcttactcggcgcgccaccgcaatcagccgtctaagcagcgaagtcgctgaggagaaattcgttttccctctcttgtgcaaggccctcatctctgaactccgacagtcttctcccgtttcttcttctgctctttcttcaacctttgccttccctcgtcttccctttcttctcttgaatttcttttttctgtctcttctcgctctctgctgctctatccgtcgtttgctggccgtgcatctcgaacggta

SEQ ID NO: 2943 - DNA, 1801 bp, Toxoplasma gondii
  source 1..1801: mol_type = genomic DNA
cttcttgtcgagttcctcctccaacgctgtgatccagttcggcatccccgagttccgcgggctgccctctccactgtcacctgcaggcgaaggcaagactgcatgcggaggcgagttcgtctccgggaggccctcgccgttgaaggcaggagacacgccgttgggcgcctcgcgagttgcctctgaaagagtcatttccgccttggtgcatgcgaactcttcagctgttatttccagtccagaagaacattttcagcagcgactcctgacaggagttcgccgaggccttcgaacgtagcggcggaatcactggtcagggaaaaggcgctgatccgtgagcagaggacagcgaacgggtcctcggagcgagaagacgcgccttacgaggtgagcttcagagagactctcagacaaaaaaaaacaacttgttgcagacaccatgctcagacagcggaacatggatggccgcagagggacagagacagcaaagagcagggccggattcacccgtcgggtggagatagagaaaagaagacgaaagagaagagagagaacaagagagcgaggagagggagaatggatttgtcagggaggagccagcgagcaccaattgaaaggacgcacacagataggtgaagacgcgacagaagtaggtcgagaagagcccaggaggcagagaagaaaatctacaggccagttgcaaggtaatacggaagaaaggtcaagataggaggtgctccctcccgagcgactcgcaaagaccatgcagacacaggtgatgaaactactcccttctcgaagaaaggcgtttccgcctacatccctctcctggtcgggttgagacttctcgacctcagtgctccgaaagcctggctttcgcggcgccctctccgacttttcggctttcttctctaccgagagacgccagcggaacgcccccgtgaacggcgaagcaacgactggtcttctggagttgagaaacgggagtagacgcagcgtgtgtagagtaccgataccgcgagcaggagcgatcctgagctgtctgtacaccgaccgtggagaagcgggagtgatggcggcggggcttccgagttggaggccgaagaagcgttttcctgaagaaagacgagagacttgaggccggaagaagaaagacgaaaaaaaccgggatacgcgacagactcggttgacagacgacgggcggaatcgcggagcaaggacgacccctacgagatttcctctcttgtgtgtcaggaaagctaaagagaagaaagagaaaaagatttctccgaccgaaaaccgtcgaggtggaccaacgtgcgagagcaaaggtcggtcccgaaacgaaaaaaaatctctgcatgcgccagccattgtcacttctgcgccaggggagtttccaggggatcccaacgttgtgtgtctcttctgttacctctttccgtttccgaggctgttccacttttcttggttgaagaacaggggttccgaaaaaaatataaaagtacacatttgtcggatgcgtgatatctctgttcaccctctttcttcttcatcgtccttcctttcctcgtccttctttctcggatcccctttattccgttcctcttcctcttctttctcttcttctgggtctcctttcttcctcgttgtcatcttcttggccatctttcttcttcactctttttctgggtctctcctcgctcactcttcgtccggcagctcatcttccctttcgagccgcgtctcccgttcgacctctcttctcttggtgtctcgcaactcgccctgccgtctgcga

SEQ ID NO: 2944 - DNA, 1865 bp, Toxoplasma gondii
  source 1..1865: mol_type = genomic DNA
cctcctcttccgccgttccaccttacttcctctcctcttgttctcttttctcttaccgctgtatgtcctcggggctgaggaagaggctgctcagaccggagctccgcggtccagagaacggcgagaagcaggaggcggtgcgggggagaggaacggagtctgaggcggaggacgcggtggccgcctcgggatgcgactctccctgcgctgcagaggctgaggaggacagtccccgaaagcgagaggtgcgagcgaagagcgacagcggacgcctccctctcatcttgtctccggcagaatctcgagagagagatgcgcaggcgacctgtccgaaacagcgagaacgccgcgaagagacaagaaggagaacaagagaaactggggaaacgagagacagaaaagggaagaggagaacatgaggaagaagagttgagaacaagagagaacgagaacaggagtccgttcgtgaggttgaggaagcggtttgtgacgaggaggcctgaaggcgggtgtcggagcgacgcgagagaggccctcaagcgacctgcgtgaggctccaatcagagagaattcgcgactactctctcggcctcgagaaaatatcggagacgaaaggggagctccgagcagctgaagaaggttctcgctcgcgccaggcctccagagactggcgcaaaaaaaggcgcgaaaaagcgagagcgaccttcgttttgagaagagagaacgaaggcgagggcagtctgccagagcagaccgccctctcaggcgtttgcggcgtgtatatccactacacactcacaaacgcccgagaccggccaggcgagaaggatctccggagacttctctgcggtgccttcggagtctttctgcagaaggaacgacgcgccgcgcgcaggaagaaaagaacatgctcttgctgtttcgcgagaaggaaaacgcacctctcctccctctgggacttgctggccagtgtccgcgctccaccctctcgccgggacggcagggcgacgaaggcgctctctccatccgtccagagaagtccaggaaaatctcttcggagtcgaaagtcctgagcggcgccgcttcccgaggaaaggaagctcccgcgcttctgcggcgactcgcgaggcctcatatcactgctggccgccagcggcgaaaagtcgcctctgcatgcgcgaacagcgcggcctgctgcggagaaaacgtcttcgagaatgcagacacaccaaaaagaacgccgacgaacggagagaagaaagagagagagggtggaaaaggaagagagggagcggggaaaaggaagagacaaactggagaccgcgaaagcgaaagagttcgagaatgagacagtgaaacatgtttgtgtgtggaggagcgaaaagccggggcggctcagggcgaggcaatttcctcgcgagttttcgctgttcccctctcttttttagttccctttctccctttcttctttctccgcgttggactggacttcagccgacagcagctgctcttctcagattctcttgagcttctcttcccttggtccggtccctctctctctctcgcgtctacgcaggtccactactactcgagtcgaccgtccatcgcatccgttctcttctgtttcgacgcgcttcaagtcaacgaccttcttctctgtttcgcgccgcttgtctttcctgttcgtcgtccttctgctgttcgtcctttcctgtgcttcctgtcctcgctggtagagcaggcgtcgagcggaagacgtctttttcttccgttatttgtatttttccttctccccgcttctctgtctcctttctttgcctctcctgtctctgtttttagttccttctcggatgcttttcgcagca

SEQ ID NO: 2945 - DNA, 1748 bp, Toxoplasma gondii
  source 1..1748: mol_type = genomic DNA
agaccgacacacacgttcaacagaactacaggcacttccgcatgcatacagatacatacatacatatatatatatatatatatattataaatatatatatgtatgtatatatatatgtatgtatatgcatggaggtggcacttgactgggtggaggagaggagcggatttcctggcagatcgacagacctcccgaacgagccggctctccccacctgataaagacgagtcgccctggcgagggagcgagctgagagaagtctgcatgcgtagatcggcgccaggtggagacgcggcgccagcagagcgcgggggcaaaaccgcaaagttgttgacgaagtcgcttccgaaaaggacaacgtggttcattcccgaggaagaggggacattgacaacagcagagacaacgtgttctctgctcgcaggcgagttctgtctctctcccccgaggctctcggctctcggcttttttccagcgccggcgtgagacgagagacctgcacccatggcgaagaaggaggagagagtcgcgaaaagagaaaaagacggcgaacagagaggagaacggagagtggaggaacgcgagaagacaggggacccgcgtcgagaggggagaacggacaggagaagggagagtagcggcgatggaaggagagcacgacgcgaggggagaaacagggggaacctggaatgaggacaacgacgagagacaggggagaagagacagcgtcagaacgacgaggagacgaagacgcgaaaggagacaggaaggagggaatgagaaaccggatgaactggcacgaaggcaagcataagagaaggacgacctgtcaggagagcaggacgacgaaacgttgagaaaagaacgtgtagaggaaataaagagatgttcgtcctgtgataatggaggcagagggacgtcgcgaatgctgtttgccttgcatttctttgatgctgacaggagggaagggatttgacgaaaaaacgaattcgcaggtttctgctgtattcgtgacggccaaaagtgacgaacgaagaagcaccagaaaatcgttcacaggttgcactggagacgataggccttcgagtgaagagcgatttcctgcctctatttctctttacctccgcgcgcaccgaggaacggcagaacggcactcgtcgaggcgcgattttccacgcacagtcaccgtctgcgtcttgagttttctcgacaaagagagtttctcggactcttcgctcctgtgttcgcgaccgtcacacaacgctttctgtctctctgcatgcacacactgcgtgtatgagaggcctcctcgactttcacctgacggccgacagaaagactctcgtcctctcccgtgctcgccacgctgtttttcatgtccggagctggggagacagctgtcggcgagacaagcgacgaaagggcgtttcccggagcttttctgcggctctttcgcctcagagagcatctccacgctctctacacaaagaggaaaagaaccacagagagagagaacgcgctcgcgtagtgtcgcaggcttcagaggcctcagagaaacagttgcggccgcgcacaacggtgttccacggaggtctctcagcgccagcggacgaggctgagttctctgtcttttacgcggagtgggtttgcggctttttatccgcagaaagacacaagggctgcggcgagaaaagggggcattttcgtcaggaaaaatggaaaacgggtgaagcgcttcgctgttttca

SEQ ID NO: 2946 - DNA, 2337 bp, Toxoplasma gondii
  source 1..2337: mol_type = genomic DNA
acacctggtacgttgttcagttgattccagtgctaaaaagatttccgtctctcaaagagtattgcccctcctgtggcagcgaccttccgaggcaagcagaccgcacagcacgagcctccgttgctgggttgaaccgagggaactacgcctacaacaatcaactgctgagacaagaccatgtcacaccctcttgtgcagactttatcattttcagattggtattttaccgttttttccccgtcgcctcctccgtccccctcattcgagtctcttcagtgcccgcggggagtgaaaaggaccccccagatcggtggacttggacatcctcaaaaagaacgacgcccgagatcggcgatgccaccgccgcttcgacccattttttcaaggtcccccgccgccccccaaacgtcacgtggaaggacagagctgcaagacctcaatgatttccgcgtccggagttgcgcgacgagaacaaagcatctgagcctcaagtgagcaagacatttcttcctcacgcactccggcgattgcggtactcacggtgccatcgtagaaacggagaagcctcggcttcccgtgattgttcaccacgataaccgccttgatcatctcgggtatcttttctggtcgaaagagacaaggaaccgtggttgtttttgcgcgataactcgcgtccttcccaccagcgagacgtcgtgctttcacgcctttctctccttcctagtgaaccgcaagtagcaatggcagtgcgaaccgtacgaaggatcgaagatgagctgacagaagatgcacgcggtggacttattcctggacgcttacggaagaaatgcccttgccaccggcggcgattggcgtttggctcacgactccggagtcttccacgacctggaactggagatgtcttaccacacggaaagggatgagacaccgactctcccttcaaggcgcatgcatcgccggcgtcatgacaaggaaaacggaaccgtcaaccgtgttacggggacgaaaatgcgtgtcagcttgtacacggtgaactcgccgtacgcgaggacccccaaactcgaaagccgacacactggagtctcgacgaagatagactttgaagcgctccccaacataaatgggaagacaggtgtgtctgttgaccattgaaaagaaaaaaaacggcggggtggaggctccgaaaacgtacaatgacgagacacaagtggtcaccagacacgcatgcgcggttctagaatacacagaaagtggatgtcgacgtctgtcacgtcttcctgggactcacgagcttgtcagcgaataggttgtgtaccaagtgaaccaatcccgcgagtagatactcgcattgtcccccgatcttttgcgtgagctcgacacgccgttacgggcagttaaaaggcgcagaccagggaaaggagataaaggaggtatctgcctcgacgacggaaaaagcgacatatcattgaccactgccagaatggattaggatagaaacacacacttgtacatcattcgcactgctatctgtgctcgagccgtccatggtgacctagacccaactttcatcgggtagatacgggttgcatgcaaaggagcatcctctatccttcgctgttgcggctcaggcggaaaaactcgaattaataacttggtacacgaaacgttttcaagtcactctggaaaggggagcctctaaaccctgagaatgttttttcgtggcaatggaggctatccgcttatgtcggctcatatacgaactgctatcacgcctgcttagcttagttggtagagcatccgcctagtaagcggaaggtcgtcggttcgactccggcagtaggctttattttaagatgtactgcttttccgctggtactggtttgagatgattcgctgtatttccttcttctcggtgcagtacaggacgggaaagctgctcgacgacaaaagaaactagcgagattagtgggagtcttataggcccgctcagtgtagaggtaaacatttatccagatcgccgcggctgatgacgtctgctgttcagtgctgcgcaaagaaaagaatgctttcagcctcactccccatctccccgtacaggtgttaatgtcttctgcatttattgtacctcataacttgcgggagcacacgtccgcggcgaaggtgcctgtctcacattcgcagtaagttgtaaacccaaagacggtgccacgctattcgaaggggcgaaacagcaactaaaactgattgaattaaacgtgcctgcaagtttgtgaatcgggtgtttacgttcattggtggagcctcgcaagagacagagtctcacaaggcatctgaacg

SEQ ID NO: 2947 - DNA, 2559 bp, Toxoplasma gondii
  source 1..2559: mol_type = genomic DNA
tccttcatctgcgtacacaggaaaatctgtggatgccttcacttttcacatgcatccgaatactgacacattcatgcaacctgcgagctatggaagcggtcggaaagtccagtgttttgcggggtggatttacatgaaagaaagattgacacgagagagttttagttcattgcgtctgaaaaaagcggtctgttcgtcttcgacgatgtttctgtgggagacgtgcatgtcttctctgtctacatcggagacgttgtttctgtcatgttgtgtgttggaggtgtttgtcttttaaaagaatcgcaaatctccctatacaaacccctcctgccaaaccaaggcttttgacgcaccgtcgcattatcgcctcttgataaaatagtctctgccacagtctgatgtttgacaagcacaagatttcgtagatgttttcagcgttttcggacccacctcctgcattcaaacacatgtgcttgtagaagtcgcgtgaatttataaatataggcaaatgtgtatttaggaaaccacgaggaagatgaccctggcgtttccgtggtgcatggtgcctgcttccctggggtcgtaacgtttttaggtgacgagaaagacgaggatctacccgtctgcaaattcatcgttacaccgaggttttgagacaggacatctatatttgtgcaccgttgagccttactttgaattatttaactcaatcaggattaggttttatataccaccagatctataatcgggatgcctgtcgcttatataaatcgagtattgcttgccgagttccatgtgtctattatatagatcactatgtacttaggatcagaccgaaagagtccatagatggtactaggaaatacgagatcgtgaaagagggaatcactcgtcacaagcttggatacacttcagcaaccattgctgtccgccctcataaatgccattcaattacaaaccgatttcggttccctcgccagtgcctcggcataagtccgtttccacatttcccgatcgcctttgtttctcgagttggcgttcacaagactggccgaaataactggcagctgctgaacgcagaacttcatgtgacaacgaacgacgctatccttgagtgcgtatgtctttatacatgttcatgtgcacttgcacatcgatatgtcatctctgcgaagacactaggcatttttcgaaaaaactagacaagcctcttccttcagtggaacaaaacgcctcatccggtgcctacaaacgtggaaagacctgtctgcgcgtaagacatgggtccaccgttgcatttcacactccggatgcttgctcggaaatttgattgggttcttacacgatcttgaaaaagcaaagccacaaacccaacagccccaacacattgctggtttcacgtggctaaaaccgattccccttttccccctacaatgagctcgtgcgtcgtgcatcgaagacacgcgggacccgctttctttcgcctagacgcagtcgaaagcacttgcgtcgttcttcgcttcccactgggcgaacaactccacctttccccagaagatgccacgtttgtgctttttcttgcatcctgttttcgcacgggtacgggcaactcaagccgagaacggcagctttatttcatggatcccggtgcggtacctgcggactgcgcacaagcgtgctagctgcctgcactgagctgcagcgctcttgcgtcttagcgttatggagtgagtttcgcgacttgttcatgtcttgctgcattcatcttcagctgcttctgtctctttctaggtgtaaacggcctcggcttttcttaatctcttcctggaaatctttgccacgaagcgagaccggctcgctctttcggggtcctgggcagcggactaggtccacgatttcagccttcgcgttttggttgaattctgggctttctctgcagcagctctttgcttttgcttcggatgcggttcccggttttccgggtgcgatagtttttttgactttctcctaaaacacaattcttccgaggttctcgcgcgacgtgcgcgtgcaaggactcaaaagacgtcaccgcaaattcacatgaagaagacctctcagattctttgtgctttagcaagaaagactccgcgaggctcttcgcgcttcggtttgtgtttttttccagaaacctggcgcaggtttcgcaaaattatatgtccaaaggcgaccgtaaaacgcatttcttgcgtgttggtctgcgtctcgctcacgttgtccctcccgcttttctgatttttacaactcgagcttcccttctctcctctgggcttccttcttcgttcggctcgctggagacattctctcaaaagatttgtattttctttgtccgagcaaaacggctgttcgccgtcagcgagctactttggattccccgtcttcgataggctgctgtgccctggtcttgaagaccgaagttctagagacattcctacaatttttttttcgtctctgacttctgtcagaagagtgttttttgtcttctctcttggtccttttgttttactcggccgtctaaaa

SEQ ID NO: 2948 - DNA, 1712 bp, Toxoplasma gondii
  source 1..1712: mol_type = genomic DNA
ccgcccatggcgaggatttgctgagaaatttggaggcaaagttctctcgtgggggcgagaatgagcgcgtagaatcgctgcgtccgctgaagcagccgctgaagaataggcaggccgaatgcagcagtcttcccgcttccggtctccgccagcgcaataatatctcgaccctgtagggcgtacggcaggacctcggactggatggctgttggcgacttccaccccagagttgaaacggaggcgcatagctccgagcacagaccgagagaggcgaaagtgggcgacacggcagaagcagagattgtgggacaagcagacgcgtccggggctggactcttgacgtcctcttctcggcttttcttcttcttgacgaccgtctccggatcggataggccggcggcctttgttttcgagttcagtgcggtgtccatcgtggacaggggaaaaccgaggtcaacacaggctgaaccacgcgtcaggacaccggaggcatcagaggacgacgagcagaagagttatgcaggttggagattagcaatgagaaaaagaaagaagaaattgattgcctcctcgacgcgaaggtgaaaagagtctcgcctcttccttcttcttagaccaggccttgtttgtcagagttctcaaatgaaaacaggtttttgcggaaaccccgttctcccgagcttccccggcgcgcttggtctcgagctctgtatacagccctagtgctgcaaccacgcgaacagacagttttttcagagattttttttattagttgaatatataacataaatatttaaaagtctatttatttctaaatttttagttaaattatagaatgtataacaatatatagtccgcccgtggcacggtgagcgacctgtcaccacggagaacgctctggatgtgcgaatgttgcaggacggaatcaactctcctccgggagacgacagaaacaggatcccccgttgagagtgcaacagtggagtccaaagaagcgtgggcgccagatgttgccgcagagaggggcaagaatcagcaagaaactgagatgaatggaagcccccacaacgccgcgcgcgaagcttcggaagacaaaaacaaagatcctgcagagggaaacttttggcagtcgaggtgggagatacgatgaggcaaatggttctttttctgctgttttttgaaagccgccggtcagcaaattttgcatgcagtctcaaacctcaagggccgcgacattgcatgcacagaaaagagaggatcagctgtcgcagcagtcgcctcggatcctgaacctgtgtcttcacagactgtttacggtgaaacacatttaaacgaacgtttgctgatatcttgacgacgcggtgacaaaagaccaaggggaaagtgtttctctgcataggcagaagtgtttggctgagttttgaaggcggttacgggcgtgtgtcgaatagctggtttccgctgtctcggtaataaaacagggtttgagacgccttcagtagaggactggaaaccgtctgccggcacttgtaaagtgtcgcactgtctccttcccctcaaacactcacttctattgcaccttcgtgcccagtctagtgttaggtacaagtgacggggaactggagacagtgaatgtggttgctagctcgctcttctgataaacctcttattttattgtgtgtgcccaaatccttcccgtctccttagcacaa

SEQ ID NO: 2949 - DNA, 2617 bp, Toxoplasma gondii
  source 1..2617: mol_type = genomic DNA
taaacagacagctgtgatgctccaaaatgcattgttacatacatgacgtgtattcgcctttattcagaagacgaagacacatcaatctacatatttatatgtatacgtatgtggatgtatgtagatggatatgaatatatatatatatatatatatatatacaattatatatgtatatatatatatatatatatatacaattatacatttatacataaaattatacatttatatatacatttatatatatacagttatatatatatatatatatatatatacacacaattatatatgtatatatatatatatatatatacaattatacatttatatatataattatacatttatatatacatttatatatatacaattatacatttatatatataattatacatttatatatacatttatatatatacaattatacatctatatataaaattatacatttatatatacatttatatatatacagttatatatatatatatatatatacaattatatatgtatatatatatatatatacaattatacatttatatatataattatacatttatatatacatttatatatatacaattatacatctatatataaaattgtacatttatatatacatttatatatatacaattatacatttatatataaaattatacatttatatatacatttatatatatacaattatacatttatatataaaattatacatttatatatatatttatatatatacagttatatatatatatatatatacaattatatatatatatatatatacaattatatatatatatatatatatgaatatgtgggcgcatgtgcatagctcgacgtggcatggagcgtaaagtttggacgccctcacagtttctcctcgtggtgcaggctttgcacagcagataaacggcgccagctctgttttttctctgtagaaacgaaagtattttactgtgttttatgcatttctaggcgcgcaaaaatgcatgtgtaggtttgtagtaggagatgcgcgtgagtcgatagaatggggaacgttgttcctttctctgaatcaatgaaattgtcgagcattgctcctcgtcgaagaccaggagattctttcgcgtttgagtgagcaggccgcgcgcgctccctctgtctcctccctccattcgcttttcgttttacattaatttcaatggcctcgcgagttcgcacccatctacagaggaggtcagcgttgcatttgaatcgaggctgagctttgcttgtccagttcgctgctctggaacagaaaaatctccgaaaggtggaacagaacgaagacttccactgctcgagagaaaacgcgaagttctcttttcaacggaagagccccctccggtggctgcggtgtctcaactctttccacacccgcgcagtagctcgtagaacccctgctgagttaggacgccatgcgctgaaaggaaagtacctccccccggcgaggcgacgcagaagagaagatgtctctcttctttctctttctctgaaaagttcctcccctcgactcgcttcgctagagtttcggcgcgctcctcaaactccagctagtcagggcacacaggagcaaaagtctgacgggggcgggaggccgcggaggagagaacctcttcttagaggccgttccgccggaggtttttctcatttttctttttctccctccttcttcaacaattggaattctcgcctcctcacagaaaacagtgtgtcgtcctctttcctttctttttgacgcccgccgggccgagcgcgattttaccgacttttctcgcgacgagaggtcctgcagcgaacaaggacgtccgtcgcgaacgccgttctctctttttggaggctgctttcgttctctgcttttctctctctctccgcttcagggatcaggtacatagacagctcgagcgagagagagacaaacttcgcgcggtgcgcgtcgagtctgaggtcctcgcggccttccccagcggcgttgctcctctggttctgctgtctaccgagagaggcgcttttttctcggctgcgcttcagcttctcgctctgctcgctttttctatcccgtttttctgcgcaggcagctttgccaggtccttctcatatcggtatgtttcgcctctcagcctcgctgcccagagtccggcttcttgtttgcgggtcgtcctctctcctcggcgccggagttattattgtttctcctcgactttccgcgtcctcatcgctctgccagtctgcgcgccgcgagagccaccgagaatgacaggtctagagacatagaggagaaggaacttccctgcatgtcgcgctgcaagctgcgcacgaaaagtccagcgcagctccaactgcggagacgcaacggaggcaaatccggtagacgaatcttcatgatggtgacctgtgcgtcttcttgttctctctgccgcgtggtgcgttaaaaaaaacagacagagacaaactttccaagggcgcggccctcctctctcgttctctttccttctgctcctctcctctctctcactcctctcgcggtcctgccgacctgcactctcccctgcgccggaccttctgcgtttcgctgcca

SEQ ID NO: 2950 - DNA, 1726 bp, Toxoplasma gondii
  source 1..1726: mol_type = genomic DNA
tagatgagaggcattgactctgtcgtcctttttctcactccttgtgttgaagcgagtgcgtggatctatctgggtgtgtacaagcatctaagtgacttctttataaaccgagagcgccgtgtacgccaaatgcaccacaacgcaaatggggcgaggcatgaacatcaaggatttgtggctttctgttcatgtctgaaaaggacatgacaaaatgcgtgacgagactcgtgacgttcctcactagatcctaagaatgagggacactgaaccaaactggattggtttttttctgcacagttctgtgcaagatcccttcccctctttattcgctccttctggagctctccgggaattcagaagcatgccgaaggtcttgtgtggatgcaaacgttcttttctttaaatacaaaacatacagggtggctttcgcgggcaaggctaggtagcgaactggacaaacttttctcctctgcttcgtatgtcttctccttccaactctctctctcctttctctctgcgaagactgtttgggcaccgatgtccctttgatccaggtgtattacttggtgaagacgcttttctgtctaacgccaatatcgtcgaccctcctctagccacttgagagactccccacaaagcgtatctcccgtgcatgcacatgaattcttatctctgaagcctcgcctgtcttctttcggaagcggagagacctgttcgccactgaaatgggatgcccggccctctgttttgaccagaaaagcggaaaagcgtggactggaacacctgtggcggtttggagagaatgtctttcttgaggcctctgcatgcagatggcccccgacgatgctggaggtcgccgcaagttgctcccgttcagcttttgaggcacctggtccctctgagaaaagaagagttgcttcttagcaccctgaattttcaaaagccagtctgagttaatcacttccgttctgtgagccgtcactagtctctacgcgtggaccgcatgtctccttcttcccctttcgcgtcggggcttcgatgcatgcaaacagccagcgaagcgacttttcttgcctctcggttcgccgtttccccattgattttctgtttgcttcacggctttcttcgccacttttccttttcaattctttctaacatgttgctcgattcattctggattctgttttctccaggcttgccccccttctgcccttcggtaactggaagccgttgatgtgggcgctcgacactcaacgcgagacggtcgcaagagaaaacttttttgcatgctttgacaagagtcttttgttccatctcacattttcttctgccctgtttgcctaggccttctactgtctctgatgatctatttttttctcctgttccctcccttccctctccttttgtggcatcctacttcatattgcgacttccgttggcggcaaacgtgatgtccgcgctctcctctacctgacccctctcagagacccctgccttcatttctgtcttttctttcgaccaatccagtcttctcttctttcctcacgtatctgctgtctctctaccccaccttgcatgtcgcgatagcacattctcaaggctcactgtcgctgaagtagattttgccagactaagacgcagtgagaacaaatcaccgaacctgctggaagcgtttttcccagcctttccactcacccgtcgagctgtgcagtgtctacacacccga

SEQ ID NO: 2951 - DNA, 2992 bp, Toxoplasma gondii
  source 1..2992: mol_type = genomic DNA
gaggcggaacatgcaccaaggagcgtcgaacagcatgtgccgaagcggaggaaggaaggagacgctctgggacttcctgcaagtgtcgcgatggcgagaacggactggagacaaagaggagcgcagggagcactctggcaggaaggcgagacagcttgtgcggagacagtgtgggggtcgggaagacgaggtcctcctcgagaatcaggtagacgcagagcagagagaggcaaaacaacaaattcagcagacacaccgcactcgcagccaagggcatccgcgcaggccccgttgccgtccctgcgcccaatcccgccggcggcgcaggcggcatcttgccgctccacctgtctcctggggagacagcgagcgatcgggagatttcaggtcacggatctggacaaacgcaaacaagcgggaggccggctggcgaacaaggaacgcgcgacagaatgcgaggccgaaggcgatcgcgcgaggaagcgaaaaccacgacgaagggtaaacggaggagtgaagaatcgagcgatgaaagcgaagcagggggtggccagagaagagaggcgaaaggaacgaaggacgaggaagcgaagaagcgaagaaacaaaggtagggggaacaaacagagagcggaaacaaagggaaaggaagtcaatgaagagatggaggagaatgggagggtcgagcgggtcggaggccaccaacggctgcgcgtttgacagcagaaaagagtggacgactgaaaaagcaggggaaggatacaagatggagacacccgacggagacggcaaggaagcaaaacaggaggctaccagagacggcgcgcataattctcctctgcaacaaatccaagatttaatggcactttcggcaaagaaaagttcttccctgcgggtgtatgtacagcggacgccagagaagaggcacttcaccgacccgagcgaagttgggaagacaacggaggggagagaagcgaaggcggcggaagtcgccgggatttttcgcctcttgaatgtcgacaggattgatttgccaccatcccccgtcgttctacctcttttcgtctcccaactggtggcacaatccgtcctcgtgcgccgtttttcgagtgcccttcttgtccgctgtcccgaaaagggtgttgttgacagaacgattttgccaccgggtgaccttagcgttcttaccgacttttcgtgtcgcgcagtgagttgtgtgtgtgctgttcaccaagcgtcgtgcgccgcgagacttctccgccacgcatgcagcgaaatttcgaccattaaaaagaggtttgcaccgtgtcccccttgatgagcgacccaccacaactcctccgcttcactgtgttgtgtgtatccagtctgcatgtagacaggaggtggacgtaaacatgttgcaagacttctgttcgatttcttgcatgtaaaccgaaactacgacggcaaggacttacctgtagtacagtacatatatatatatatatatatatatatatagacataaatatatatatatatatatataaaggatgagcagacagtctaagagaatgataggtgcgggaggaaacagtcactttccctgtgtatgcacgagtaccgacgtgtccacgtaggctgaacccattagtgcgaccgttgttccagtgtaattttggcttagttttcacggtagtatatactccgagttgcactgttggcttagactttgaaggtgcttgaaattgaaatacaactcattcagcaggcgtaaaaagcggtaatccctcatcagcctaggttgctatgataaaagagccgcagaacaaagacacttgaccccacctgctcaccagggcactgacactaccggttcgccattaggagagagctgaagcttctaaactactcacatcataggctcctgcaagacctagagagcattcaacgctaaacgagctcgagtggccgcgtcgctggtcgcggcaagccacaattcgccagttctgtttcctccgtcgggtatattccactgaacgttcgaccccagccgcacttgcaaggagccgatcgcacttgtgtgcagtgcgtctccacaccagagcgtggcctgacgaccaggcaaatgacacagagctttcgaggcacacagatccaaaaaattcttattgttcgccttcggctggcgtagtcgccgttcaagagagtcagctcgggcgcatttttttcaccgccctgcgtctcgacgagaaacttccctcgcttttccacgttcggcactgaagtttcgctgcccacgtgcgtatcgcgcaggcccctgaggtaaacagaaaatttggtcggtgtcgatcaatacactgcagcttctctgtgaatctgcgcataccatttgcatgtgtgcccacgaaacagggcaactggactgtcacgggccgatgctatgcgcgaaggtgaccatgagaggtgctttcggtgtagtgagattctcgctgcattgacccagactttccacaagtgtgattttcagtttagattaaacttgttgacggtgcccctgccctgcacttcgagttttgctgctcatttccgttgaccccgtctccgctttccgattgtctgttctgcgtcgctgaagcgcagtctagatcctcgcgggcgtcgcgaacggggaggaggcggactttatgacaggagtgtatctcgcatgggtgaagtcagcgtctgaaagtatgaagtaaaacttgtgcttctggtggatttcattctcgtcactgatgcacggaataatttaaacgttcgtcgtgctgttggagatccgaagcaacgacctgtggtcgacacaggaagggtcgcttcccagtcgtcgtcttgtttatctcccacaagaattgtttttaagcgtccacgcgcgttctctaactgcttccgtcgaaaggtggctctcctggtcttcgtcggttatcctggttttatcccaaaagaagaatgcgcgcgaggccggagcacaa

SEQ ID NO: 2952 - DNA, 3879 bp, Toxoplasma gondii
  source 1..3879: mol_type = genomic DNA
gacagaaacatcagtcagaaaagcgatttgaaggacgcgtcgaggtgagagacactttagagtggaaacaaatggagacgtaacacttggacagaaaacaacttccaatccgcggcgagttttgataaaagagcactttagagaggcgtcgattttaggtgacagtcggtttcgattggtttgtgcagaacattagacttgtctgtttttccttcactcgattcgatagcggtacgagactacaggggacgaaaaaaaggtaataaaggacgaaagggtgagaaaaaagtgagagggagaaacgaccgcgggcggttcgttccgacaccaagaatcgagcacgtgaaagggtggctacagaaaggcacgcacgcgtctgttcgagccacaaacacaaagtgccatgtggtgtcaacgattaagaagagagccagtcttttctatgaagcgttcgtcccactaagaagatatgccacacacaaacacacgcagttacaagccccgcagatgctgacgcacgcacacgtgtgtagcattggaaacgtggagcttcgaggcacacggatctctactgtagatagggatagaggtcaccagcgttgcacgaagaacgctgcgttcagtcagtcagacctcgaacagcagatcgctgttagggtgtggaggaaggagaacgtctggagtgcatcgccccgagacactgctgatgaggaggcacgtctgtcagtcccgtctgcggtaggtgtcgcattttctgcaacacatttttagattcacctcttgaacagtggcggtcggatgtcccatgggattcagagtggccggcgagggcataggcggcatggtttccggtagaagcaaccagaattggcaggacgtggacgacgcgcaattggaaacgcgcgaaaactgcgcacggagctacaggaaagaaaaaggagaaagggctgcaagacggagacatccccagccccagcccctgagggagatccttccccgtgcacacaacggcagactgtcaccgcctgcaaagaaagcggcttccggacagacgattccccggaggaaaaacgaatactcgaaaccaacgcgttcccagaaaccttacacgtttgaaaagggcagaaaagggggcattcgacggtcgattttttcggaggcagttgttccgtccgaaaagcgcgaggtgggccggtggtgacacgggaagggagagaccgtaaaaattgaggctctttgcagaaagcggtaaagcagagatgaaccgaattcacacacgaagggagcgtcacaaaaaatacgacaaaggaaaaccacggaagacacgcgatcgcgacagagagaggggggagaagggaggaccaggcgacggtgactgcagtcagaaattaaacacaaacgaagatcttcggatgggagaaaggtaaaaagaaaaggtgaaagcaaatgcatgcaagccaagatctgttcacgcaagaccgatttcgagagttttacggcgcttcctgctcgctgtgtgccccagtgtctgcgcctgcttttcggaagtagttgagaagacagcgagacaccaccactagagagagacaccaagagaaggagaaaaacaacaacaacaacgttttgcttggagaacggaacgaccaagccaattgttgccgtttcctctcttcctctttaaagggttttatagggtcttttctacgtatttgcctcggcagaaaactgccttagacaaaaagactgacgagacgaggcaggggggatgggccgtgggcctctaaacaaggtcaacggcactataccactcgaaactttctccgacgtttgcgtcttccgcctcacctgagtgaacaggaactcacaactcacgcttgcacattcgtatctatacaaaaatctctatgtacggatttcaaactggtatcagtcaacacgcaaaagacatctgcggtcaccgaaatctaggtcgttcattgcgccagacgcgaagaacatgaagaaaatggatgggaggaataggttctcctcgatgcatacagccagttcagttcttcatcatgttcctaatctaaaggttctgcagaactcttgcgccgccacccgcggaacagcgtcttctcgctgtcgtcggacacagacggagtgcacttcaacgtgtgttggtacctcaacaacatacatcgaacagatctcagtctgcgtgcgttgcctcttctgttgtttggattattcactttcggtaaatagaacactcctcatctcctacaccagcgagtgtgctgccttgtctgcccgcctcattccttgtaagcgcaaaacagattgacagaagctcgaaagcgagagaaccggtccctggtgactagatccgcgcctcacaggagcggcggtagcaatgaagtggttctaaacgtgcgtgtctgccgaagcgggaaacaacgcaacgtcagcgcaccttcgactctcgtgcagatctgcggtcacttgtcacctatcactcgcgccaggcaaagcagacagtacacaagagataccgtcattggatttatcggtgaaaccctgcaaaacacactttccttcagattgcttaggtctttcacggttcactgacgagacgtacatgcggtggaaaggaacgtttcctctgaagacacctacaggatttgcagggttctgtttcttagttggtatcagagggagggatggtggtcatccgagggcgtcttacgaaagactcaagtagtatcatgtcacttcacccgttgccaggtgccagcctaaaataaggtccgcaatttccacgggtgtttattagcgctgactcagaagaaaccagcagcgtttttctgctagtcagcacgagagagtaggtaacgagctggttctcgacacgggaccaacgctttgctaagttgcgaccgtttccttcatagatatgtcagtatatgcacattcctaagcaatgctttcccggtgtttacaccagtgcatgtttcacgtggccggatccatcagaacaacttggaatcttaaattttgccgcaggacacacacgtcgtagtgccgtttccccatcacgctgttctcgtctctatccagtgtgtgaaacttacacaggcaatttttgtacgcctcgcttccgtatatctctctagtgcagatgtcttttcacacacgtagcaagtttctctacttgcttcaggacagtaaccaagataaagtagaagccgtatttaagggtttccgtggttgtcaaataatacggcgcagagtcacaccgacattctgagtactcttactagagtgtggcagacacaacattcaccttagcgtttgctatgcgtgccgattcaaacttttgtatttgtgcgccagtttttctattttttggtaagtcgcaaaaactggaagagctgtgttctgtgtgatgcgttggcaagagtagaaagtccttccgtgtgagcttgtttggctttccaccggcgaatcctgccgcatcgctgttgcctagccacgcatgctttgccaccaggaggaacttctaatcctgttcagctcgctttctcataaatggtgttcgagagtctgtgtaaggaagtcggatgcctgtttcgcctttgcggttcgtcgtaactgcgagattcattcaagtggagatcttgtgagtgtttggtccatccctactctgttatttttcgcgacacggaagattgcccagccacttttgcacgctaaattcgcctccaggttgcgagcttgtgaggcggcacttcggtcgcctacgtttgtgagtgatttcgtcttcgtttttcccagagttttgtttctgcaggttgaggtgctttttggtcaacgctgtttgccgtttcgccaaca

SEQ ID NO: 2953 - DNA, 2651 bp, Toxoplasma gondii
  source 1..2651: mol_type = genomic DNA
gaatgcatgctgcattgttgcagccttcggcgggtgacagttctttttggaaacgatttccttctgtcccggcagcagtgaagcactgagggccgctggcaggtcgagaggcggcctccatttgcccagtcgactcatgatcccgcgagggtggacacactcgacccgctccgaggcacgcagttgccatggggagctgcagagcagctttggctttttccaagcggagatcggacccgcagagaagacttgtcttgtccgagaagcagtgaagtgcaagctttcttttatctgacgtcgccgcaccagcacaagtgtgtggatgggcgcagttcgtttcggttccaagttcgtagcaatcgctgttcacggcaggttggttgccttctttttgaaacaaatcgaggaaagctaccgatggaatgggagacagctgagacgacgcgaggagattcaaggcactgaagtccgcctctacggtagcgagctcttggtgcggtggtagcttacgaatgcacacctggttttcgaaagtttcttcagctgtcaagtcagttaaatcgccatcgatcgagcgccgcgttctgcccccgtcacaaggtgttgaccgaagaaatccctcctccggcgcgccaccttctggcggagcctggtcgcaagttgtggataaagtcatctgctgtggagagacctccgtggagacatccggcgggtttgcacggaggtcaaagggttcacagctttccacctgacctgagttgtcagtcgagggtgtcggattggtttctgaggcgcctagcggctgagtcgtgcgtcgtccgttagagttttgagcggccgctttcctggtctcttcagcatgcttcgaaatgcttctgctggggagatttccgagcatcgagcttgccaggtatttagacactagcatgcgtgaagaagagtgggacggacagacagggtgatgacgatttgtatggggcgctcgtcggcacgcgttcaggacgacccgctggatcagaggaaggacgcgaagaaatcggagaaaggcacggagtcattgaggaggactccgccagttggcaaaaaagcagtgcacacagacagcagccgcggcgaggagcggctgctccaaaggacccggttccgcgatgctgccaatgagacgctgcccagcaataatcgcggaccctctctcgcaggcctggaacgaagcgcaacaaaaacttagccgccgccagtaacagagcaaaaatacagaaaaaggctacacgatttgaacgtacagatcgtcgcacacacgatgggtccactttccacactcaagaaaaaccgtcgagtacgaggcaccgaccggccacgagctgccagaccgatcaagctgccagctgtctggcagctcacaaacgcacgcagaacacatggtcttaacggtaggtcgcgaaaaaatatggatagcgaaaaggccacatcaaaacggtgagaagccgagtccttttgcgcgaaaacttttctcgaatgcgtgttcaacaccgtgtccgtttagcacccgcgacgctttcacccccctaggacccgcagcaccccccctcaccgtagcagctgctgattctccccttgcaccacagaggagcacaccgcgcgacctgactgccactgtatcgttcattcacaggagttacacagcttccacagaaacgttttggcttgtttgctgcgtgatattttgggccgcttcacaatacatacatagctggctcccacctgattcaggcagtgctggaatcgagaatcctccattgtctgtgccagcttatggtgctggaccgaagctgccagctgcagacccagctgttccagggtatgtcgcttagcgacgtgtcggcatgttcacggagcaacaagggagagccaattcccgaagttccaattcaccaattggcgcattcagctgagactgattgcctgaaggctgaaacgcgctcagcggagttatttagcattcgcagtaattagcaagaggtcattcgcttgtttacgctgggtcggatacgttggctggcactttctcgcgccatgacaggtaaccaagggtcacgtggtggacggagcaaccgcggggcgcggagccatacgtggcaacgtgccggttactattccgcggttataaaattttcggtccaacggggtaaagttgcactccttggctcagccacccagaccatgtagttttcaaccatcagatttccacagcttacgtagaccaggttgcgcgccggtatcgcgatagtgagtcacgtgtgatttgaatttccggtaccgcggcacaatctggcggtgagcgctgacacatgggttcagtactacgttctccacacaaaggctctgtcgagagtccgtttcggcaaggtatgcaaccttcccggaggtcatacgaaacagaagcaagattggcaacggtgctagccaccacctgacattcttgactgtacatgaagaagccagctgtagttacacttcgcgccgcattcggaagtcggccgcagagggatgaccattccttttctccgacgcacggaggacccttttcgccgcctggttaatgtggtctagtcaacacttcgaggtagaaatctaggacgggacaggaacaa

SEQ ID NO: 2954 - DNA, 2185 bp, Toxoplasma gondii
  source 1..2185: mol_type = genomic DNA
agcttgcacaaacgtcatcgtggcacagcatcgggtggatctttctcgatgcccagtggggtttatatgcccacctggaaactccttcaatgcacaaacagagaggaagctaccttcatgcacagtgtcgctgtttctgtaaacgtttttgatgttgcctgtacagctttcgagattgacggaagcactcgtggtttcagaggacgacgaggacgaggagtgatatgttgtggcgtccactctaaaacataggtgtttcgtcactacccgaaataccgctagtctatgacgctcgattcatcaatgcattgttaaaagtcctcagtttcgactaacatcctgttttcgtcacagtcaagttattgacggtactctgttgccaataataagcatggttcttgatacaaatgcatttcccctgtcaaaattgatcggcatgcagtttgcgacccctgttcaagtaaactgtcaattactcttgggaatcgataagtgggccgagagggaagtcagggctatgatcataggaaaaacttgaaatgaagtaagcttatatgtggtcagtcaggatagtctcatcacacagtttctgaacagtgtaatattcgactcgtaggtatttgtaccgtatataataatattgttatgagatcacgcaaaaaagtttagcagcctacacttcttgtagccgcggcggaaacggcttttaagtggcctgtcatactgcggacaacatcgaaacgagcgaacttatcatagaccctatcatcggataagaatgtgaatccgaaaccggcgaagtgctgtatctaagatgaatgttccagcttttcaaccagccagcatggttcgcgtgtccggagaaatctctgaaagcctcacaacgctgaagaacaccaggatgatgcgctgctgaatacttcagtcgactgttaacaagaagtccatactgctggtgacagatagttcttccgggcaacgtacgcttcgtatgtgaccgcagtggccacgcgtgccggtgacttaaacaagagacttactcacaaattagggcatcacggatgtcccctggttcaatgccgcacggaaaaaagaatcctctgtcgattcgatggcacgtgctctatactccagaatccctatgcagtggagaaaaacggattcttttcttgagacactcccataccctgtctctttggaaggagtggaactgtgtcaattttgtataaagtggaatttgtcgggtagggggagcccaccgtcctgaaaatttgccgggaatcaaacgatgcaggaagcattctatagctttgaacgcacatgccttgagtgacagagcaaatcaaattcctttcgttgacagaagtgactttaaagttttctgctagccgtaactagcttcgtttctcatagcatgcggagggaccagagacaatgtcttgaagtcgcgagcaaaaacagaagtgtctacgaaacatccagccttttctctgtcaagagaaatcgcatcggaaagcgaaatgatttgaaagtgcagaggagttgcttgtgaggaaccctcgcgtgtcacgttctgctcgcgctcacaagtgtcatgcaactgtgcttggccgcggccggggagcgcgcgataggtagttctgcgattgcagcgccggatgagtgctctgtcatatcggagctcttctttggttgcggaagcttcagaaacgcgggaaaagtccagagtcgttcgaatgttttttgtgccagtgccgcggatgccacttcgtgtggtgagaaaagttgccgtcgagttatgtacggtgagatcgtccgagtgactgcaggtgacagctgggctgtcgattcgtggtcacagcgagtaggaatgcagtcagaaacacacttgggatatagtcgtcgatgcagctctttgtatcagcctttaatcactgaggaagggaccgtgcggaggcagcgctggagctgtactgcgcaaaaggagttatcacctacggccgctaccacggcggtgaccaagagctcgtttttctccgcagcccttaggcaggcgggatcggactgcccgtgtatgaggtccggtctaaatttcactgaagtacatggtgcttgcgaattgtcactgacacgacggattgaaaggtaccctgccaggacttcaaccagtaaatctcttccagaa

SEQ ID NO: 2955 - DNA, 4148 bp, Toxoplasma gondii
  source 1..4148: mol_type = genomic DNA
tttcgtgcgtatcgttctttcacccgtccattcgtcatgtttctcaaagtgtgcagatcctccaaaaggtgcttccactataccaaaactacaaggaactggcgccagagtgaagacgacactgggaaaagccgtgtgcagaatgccgcgccactctccagcccgttatgtggcttgtgtcttgcgttaagcagcgatcggtctcgctatcccctaaatacgacgttcccttctctgcctttcgcgtgctcagaatggatcgcctccagtgctcagaagcatgcgcatgcgtgtgtctctacaggcgtcttctctggaaggaagagacgctgtcgcccaacccccgttcggtcaaacgcatgtgcttagcccctaccagctgcacccatttctggacagtcatgtagccgttgaaagagtagttgctgaaggcgcgaagaaggtgttgatccatttgcgcagagacgtagagaaagactgcgccgtccttctgtcggcgcatgtagacccggttgagaggtccattctgcctgccttcgagggggtctctgggcgtgaactcgtcgtcgtcgagaggttggggagtgagatgggtacccgcaggcgggcctcgccgcagtgtcgtccgcaaagagaccaagtcctctctggcgggcagctgcagcgtgcgcgaggcatcccagtcactgcctgggaacggacgctccgcaccgaaacgcgaatcgaactcgcctgtctcgccggcctgcagggaattctgcagagccgcgcccacgggacgaggcgaagcaagcatctcgcctcttctagaaacgttgggggcgcgcgaggatgcgtggtaagaccgagacggggatgcacacggggatgcaggcgcagacggggaagcggctgcagacggggaacccggcgcagaaggcgctgaagtcgaccgagaagaggtggaagacgtcgaagcagcggatcgcgtggagtgcccggcgtcggacgagggggacgcaagcgactcttccgcagtcgtctgacggcgggaagaagccgggaggccaggaccccgtccagtcccgccacggaccagcggccgcattttcaggacgcgagaagcaagggcgcggccggaggagttcggtggagtttgcgggactcaaagacacgaaaaaagcgagcggacggagagaaacgaaaaaacgccgacaaaatccaaaatgtcgcaaaagtgacactcatgcactggcctgtcgccacgcgcgcgcctggtcgcgaggtgtccatacacccgaacggcgcgcgacgctcccgtgggttctgagtcaaatctgcgacctcgcacgggccaacacaaaaaacaagcctctttccactcaaagaaacgctttttcgcgcagacggggcgcaaattcacgagtccagccgcgaaacgcgcgaacgtgccgggcaccttcgcgcaactagcgcaatggtcgtgtctggtcacactggactgcgcgcacaggccacagtgttcttcagggaacaacggtttgcagaaaacgcacatgagttgggcgacgagccgcggaaattacaaatccagaaaagaggaaagactcatttcgctggtgaagagaagcggagaaaaaggcctgaagcgcagtgcgttccaggtcgcttgcctctagcccgccacttgagtagtttgccatagtctccacgccaagacacgttgtccagctcctgggggtgcaagcagttttcgtgaaagtctctttccctggaacagacacacactttcaaaagcacgctcggcattcgcgttcccataactcggatttgacacaaaacgttcccggaaaggacatgaggagaccaagggcgtagaccactgaaagtgtttacagtctagcagcgctttttcgcaatacgcgtctctgccccacgcagagttgcatttccgggtcgcatctttagagaagggaaaagcaagtctgtatgtggcatttatcgaccagcgaaaatggcatccgcatggggcttcgcgagcggcgtatgcggaggagcttgaaagcacgttctgcacgtcacttcaaatccaaacaagagttcacctcaaaatgcgcgtctgtgtaggtctccgtactttcacagaaatatacagcctctgctcggagccacaccagatatggatccgctctgactacaggctgggtgagaatttagatggaaaacggaggaactagccacgctgacccatccagcgtcatcggtgaacaggggaagtggggcacagagatgaccacagattcacgtcgcatacatgtgtctgcgcagaattatgttcacatacagtaattagatctacatcgaaatgtgtgcgtcttcgtgtctgaactcgtatacgtaaggacagtgaatcggagctgggacatgcaaagaagcaacggcgtttcgtatggcgtgtctacgacgaagagactcgggaggaaaagcctcttgcaggcactatacctcttaatcgacaaaagaaagcgttcgacgacatttaacgccagcaatcgaagcagccaagcacctaaaggtgcgcttccatactccaaacctgctggcaatactgacacctccccacataaagccgttagcgtcgtagatacatacgagcagctatacatcgacatatagacatacatatatgtgcatgaatttgtctttgtgcatgtttttcacagatcgtgctacctatgtttgtgtgtgtgcctttctgttctacccacataactgcatctgcgttctgtctgtagatacgcgcgtgctcactgtgcatggctctagatgcaggtgtgctacgcttgcgtccatagtttaaattttgaaagagtccttcagcgaaacgaactgagaccgattctacgtgctcgtccactccagaaagacgacttcgcttcctcgacgaaatccgttttcggcgttcatcgctggatgtctgcgtctcggcaaaaatgcaagcaccttttttccgcttcgaatctccttcgggtgtctccacgggtaaacgtttcttctgttattttttctgcgcgtgtgaactcgcccaccttccctccatgaggaagcagcggatctcgtcctctgtcctgtagtctgtgggggaccttgccaatcgtcagatccaaacagatggatgtttgcatatatatatatatacatatatatatatatatatatgcatctttaggtttcgttgttattggagtattgttatctgtatctgtatcttgttttgtgcgtgtctattttatatgttacatttcttgattatctcataagtgacacaaatcagtatggtctaagcgctgcgaggatacctactttaaagtacagctctagataacggtgtgcgtctggttcgcggcttgtgcgttccacgcatgcattgacttttgagggagcttaaaaaagcaccctttaattccaaaaagtgaacgactggattttttctttagttttcatctgtcttcctcccttcttttttgcctgccttgcctttgtgtctctgaggcggagagacacgcagacgcctccggggtgtatcgacagctggtagctgccggtcgcagcttccagcgggctggggcattgaaagcgttttttctgctggtccgatcgcgcggctctttctttcttctttctcgacttcttctgttctgtcttcacccattctccgcgaagttcgcgttctgcatcctttttccaccccccggaagtcctcctttccggaacgaatccccctcgagtgtgtcgcgttcgtccaggcaacagacaccgcagccgttgcttcgagtgtttgagtgttgtcggctggtttttcgctcgagcctcgcgggtcttcttcagcgtcgtgctgcttcctcgtgaagcattatccctccgtccttccgcttgcttttctcttttcctttccctccccgcggtttctcacagcttcgactcaccccggcgtccacccgcgactcgttctgccagtctcgcctcctacccaaagcggcctgcgcccccgtctccggatctcttcccgccgtcatcattctctcgtttctctctcttccttcgcccctcctccacgcgtcaacggcgttctctctgtctccgccctgtctcctttgcggctgcagtca

SEQ ID NO: 2956 - DNA, 2075 bp, Toxoplasma gondii
  source 1..2075: mol_type = genomic DNA
gacgcagttaaaactctaccggcacaaccttgacaaagcctttaggcgaggacagcatccattacggatttcccccccatttttctggtcgtgctgcgagttatagaatcttcccgaagataattggtcggttcgtcactcttttgaaaaagctttgattgtagttttggtgtcaaatccctgaaaaatctgagacagtttgcgcgcaatggtgcctgctagatgcggcacaacggaagctgcttttgttgtggaacagaagaaatggtgacaaaatagtctctttcgtgaagtgccacccagggcgatagatctccacttgaaggaacggcgtaacgttccggtagtaaagatctagatgttaccaagcgattcgcgttccagttacagcagccgcacctcagcacacatgcacttgtcataccccaataacgaatagaaagcgtgaacaagttggaggtgagtccgatcccttctcaacatgcgtagagtcatgcagtggagcaacagtatatgccacatgatgatggcgagaaacagtgctgcagtgaaatatgcgcgttcttctgccgtcgaacagactctgaccgataatgcagcctctctctttttttcaatgcccgctaagcaaaattcttcttcgcgaatgcctgttaagacgacgcaacaatactgcagagacagatgttaaagatcttgttcatgctttggactggatacgtttaagtgttctggatttgcggtttaatgttgttagcttacgccataccacacggttgacctgtgtacgtaacgttgtatgataattcgtaacttcgcaatttcaacaaattgcgatagaactgtggttcgggtgtgatggctgtaccagtcagatacccatgaaagccttccggtgacacacttcaaagtgggtgaacattgtttcatgcgaccattcaagctcaacctcatacacagtaccagaaactattggataagagtccagagttgaaagatacactgtgcggtatccctgattattggaggtagtgttattcgtaaatccctacctcctcacggcttcggcatttcggtgtttcccggtcgcctgcttggaggcacatcattcctgttccatgcggaaatgagtttatccttcttccacgcaaatgagatagaacgggcgggaaacgactccaggggaaactcttgttagcgtcgtaggaaagtcacattgaaaaactggtaggccgtacctttcagttacccaacacacgcatcctgcgtcgagtcacgagttcttcggtgcatgcacgctgggtctttcgtgtaaggcgattctcggtggactactactgaagatttggcagcatctgtctctttgtataacgttcctaggaattaaggacttctctgtgattgcatacggtgagagactcaatcgcggagagcgtttcgatcgttgagagtcttgactcttttctggatccttcaccgcacgcgcgaattcgcgggtgctcacttacgcgaggtagggggaaatctcgctgagtgtttgcgtgttgcggtctttcacgactgtatctgcaagattcacgaatcaatggttttcggagtggcgtttagtatcgtatctccggaaaggcgcagaatggtacgcacacgcgtgcaatgcttaacaaactctgtcgatggaagaaaacctgaagcctttggccgcggggaactcttggaaacatcctgctgacggtttcctctctttgtctaatccattttctccgccacagccaaatcatttcgcttcctgtctggctttccacaccccatcctttcaggcaagcgcatgtgtgtcattgctgcctgctgcgttgtcttttccgtttagccccaccagcatggagaatcgtgagggaaagtagccagtctcttttgctgcagtttctgaaagtgtttctgatcgttatttgtcttctcccgcactacggtttgttttgtcgagtggcagacacgtaggtgctacggactcgaggtgcctctccgaaaggcaggcgtcaccatgaactgctaggttctcgcctctgcatgcggcaaca

SEQ ID NO: 2957 - DNA, 2050 bp, Toxoplasma gondii
  source 1..2050: mol_type = genomic DNA
gttcatgtcgaattcaggaggtagcaactggtgtctgagggagcaggatcggctgagtgtttgcgttttctgtagccgagacgcgtgcaagtttcttggttttgtgaagcgacccatatttcaatcttcttcgtctgtccgctatcaaatcaaactgaaggttgcttcagtagcgtcggggaaatatgaccgtaggtggactgctagacaggcatacctttctgcatgcgtcccgcgtcgctgagaatgtcattggttgcttcgctcgttttgcttgcctctgatcgtgtcccaggagtctggtgacacgacacaacaacctggcggtcctgacgatgccgctgaactcgacagacctttagagttttttgtaaaagaaggaaacagctctggcagtcgacgcccttatgagagagcgccagcttcaagaaagtgaagccgctacgcagagtatctaccatctaccctctatgatccccccgcatgcaaactagccttaaacacaccgctcgtcagtacaaaccgtgcaagcactacaagcattaattatgtctatttgtgcatctaaggtggtacttggttatatatgttgaacgctaactccccgactagactttgagctattaaacctgcctgggatcattcgagaagactctgatgacgtcgtcctaaaagtatctccagggcccaccggtggtttgtgagtctctatgtcatcaacatgtcaatgaagtattgatagcgatgaaggtttttgatcatcatagcagcataaaaaggctaagctgcaccttcagcatgttaacaaggcggcggcgataattgtatcccaagctcggttttaggttcgaatgcaccactgccgccacacggttttccatgtcagtacaatctccgcgaaagttggtgtaccataggtgaatattaaccctgcctggtcacgcaactgtcccaaaacttcgacttccgttgaaaggccatccaccgtaactctcggtgctcttgctgctggctgcagccacactcgtcgtgggggaagaaagttcactacaagcaaacagttttctttccgtaacgcgctcaccacaccctgaaaggtcttgatcgaagtggtgatgtgttcgacggcaacagtacgttccacacggctgcggtgatcgtctgtcctccatctagtggttctaccgccccagcagaggccgtctgttttctcgatttcggttttcgggcgctctgcttccttcttagatgcatgtcgaaacgctttcacaaacgaacctagtgacatgcgccctgtccggcaaatgcaagagaaaaacaaggcaggatttcgtgctatcagtcaagtcctccgtggccgtacgttagtatcacaagcgacgccgtcgtaaaactggtggatctaaagctctgctgcaccataagtctcacacccacggtttctaattccagcgcccaactcgcatttgtgaagacatgttgacttcttcgttatacacgcctctgagctgtcggcagtatgttaccgacttctgtatcggggtgtggcgcagcatagaagcccctacgatgttcgggacatgttcttcccaaagacttcggccggcgggcatacaagaagtattttatttactaaggccgcgaaacaactccaaaactgccgacagagtcggactcctgatcagttgccgttgctacaattcatgtctgcattcctccgacgctccgtaaaaagcacgggtgcatgcgatttccgcccggccgcgggttgcggtcttttggtgtcgatttttcgctggcgcgtttgggcaagaactgagaaattgattcaccggaattgtggctgcttatgactgagtgaacacttgataaaatttccacagtctcaaagtgacttttccgctgcggttcaccgccgaattctccgccagcgtctgcacgcaggaacgaactcggtactgcgcacccagtggtgccgttcttgctactctttgtgtttcctagtggctggtgcgccacgagcgttgtgtttttcttttctccggaaaga

SEQ ID NO: 2958 - DNA, 4714 bp, Toxoplasma gondii
  source 1..4714: mol_type = genomic DNA
tctgtataccgtttccggtatgtgttccatcacaacgttgaggaaccggttgtggtcgttgctatcgcgttcgcccatttccgtgtagaagtagtcaatgagtttaacaacattggggtgtttgagttccttcataatatcaagttcgcgatttttgtaacgcgggtcctgtagaacaagcacacattcgtaggcggtcggatctctccgcgagttcagcgaagacacggggatcgggctgtctgtcgagagctgaaaacccctgcttttttccacgtacactacagcgcatccccttacctgaaggactttcttgatagctacgacttcccccgtatcaacgcatcttgcctctgtgacgacgccgaatgatccattgccgaggaccctcccaatatcgtaagtcagagtcgggtgagggttgcctgtgtgaacgcggctctgccgttcccccttcacggctgttgtccgttgacttcctcctccgcgagcgttgctactcttctgagcagctgcgggatcgtactgcgggtccggcatcttcgcaagaagaggacgaaggaaagaaggggtcggctgagacttctgccttctcgacaaaggccaggaaaagatgagtggagtttcaccgcgtcctcagcaaggcgaggaggagcatgtctcgtacattgccacactcgctgtggctccaagtgcgttctcacacaatttcagaactaaggctactcttgaagcaaaaactcgcacgactgtcggtcggagcgagagccgagcaccagagacagcgacttttgttcacagctggtgagcaggccggccaaatggatggccgaaatggttcccttgattttcagcagctgttttgatcggaaaaaggacaggacacaggtttttcaagcgtagactgaaggctggtgccggaagaggaggcgaaaaaggaggtgaagacagttgccagccaacacgggacccaatgagacgctcgggtgctgacacgcaacaaggcacatagggacttttactggttaggaacgtgacaaaacaagccaattttttgatatctctggaaatggagcaacgagccgagccgctgtagaagaaacgagttacggctgccgcgcaacagcaccgtgggaccaaatagcccgaagaccacccatttctcaccacgctctctctgcagacaggctgttcaagaaatacccggaaacgattgcgaaaaataaggttgatggaactcaaccgtttctactgccttgcaacaaagaggttgcgttggcgacagagggtgtcaaagaaaacctgtgtgaagggggttggcaaattgcttttctcccaacggatgggcgctgggttgcccagccagctaaaactacgagttttttatccctttgtggtgaagaaaaacgttttcaagacatgccaagataattttgggctcgcaacaaaaagtgaaagagagagctgtgcacgctgttttttcactctcgtttttcaccgccaatttttcgagggtttttcatgccccgtgcaacaacgtcagctgttgttgcagcaaccctctcagccacacagccggaaaaaagccgccgtccctacatagcatctctctcacgggaagaacagagagaccagaaaagcccagacattccagactactggtctgccacaagtttaataaattgttttcacaggggaagctcgaaaccaagagagacaattaaagtgtagcaggttccagtacggttgtcctcagccctgcagacagatgtgcgtgtgtcgccaattggaagcccggactcacatacacatacattcacgagaacacgcgaggacgccctgcatgtgcaagcgtccctcaaaggcatacacaaaatacgccgttgcctgcgaagcggcacttttctgtggatgaggacgtaagacaagcggaagaaaaacaattatgaaagtcgcttagagaaccacgcgggaaaataacatgacaaccacctcacctctttctatggttctggacactctcccttcacactggaaataacgcccaagtactcaaccacaatctattaccaatctctccacggagtgaaatattgttttcaacgcaagttctatcctaaaaagggagtctcgaaaagttccttcgaggcgccgcgttgttggtttcacagcgcgagtggagtatcaacaagaccacaggaggcaatgcagaacattgtgaggcaatgattcagagcagggacaaccgttttcggttcctcaaaacagacgaaacaatgtgagttttggctgtttccttatgcaggtcacccttgtgcagtgttgggatcctcgtcagatgcgaggaaattactgaagcgggggggctgtttcagctggctctcagatgctgtgtgaagaaacttgccgcgagtacgtgcacgtgaacgcgttcagttgcccctcaaacaatgtttctttgagttgatatcggtggaagattatatggctatccagtctcactcaaccacactttattcctttccgttcctgaagagggtaaagtggcatttggaaactggagggaaaggatgaccggtgtgaagttcgaccgaatcaccttgtaaaacaagagcagcgtaatcacaatagtcagcgaaggcacgaacatacgtctcttctgccctattcaatttaaacaaatgccatttctccggggaacacggtgacgtcagttgctccgatgcaccgacgcaggtgccatatgggttaaaagaaggaaaccgcagacaagtaagcgctgcatcttcgcttgcaacattctttaggaggactggtgttgatagacaacgggggatgcataaccgcacttttcgcctgaaaacttcccacgttggctgctaccctggcacgcgatgtcgtgcagagcgtgctgcccgtgcctaaatcccagtggcatcaagcagcttgattttgcatatcgagatctgctacgaagtgtttgtgtctctacttcacaaaatatgtgtgagagaatctactatcacaagacgagggggtggagattttgcttccagaccatgggtccctcccttaccgacggtctcagttacacgctcacatcacatcacgatgggccccggggcctattgagtgtgttatgaatcgaaaggatatggtgacctcatgcgagtcagtataaatgaaatcacatccggattaacagacttggccaatttacaacagacggcagactgcacggtcctctggaggagactgggctcgatttccctgtgtttgctagatgaccggatcaggcgtgcttcctcagaactagttagacgattgctcctattaaaggacgaacgttacatgagaggacagcacactgttgcacgtaagaggatttctcttgtgggagtgaatcaggagggtgtctagatccaccatggagatcgcaaagcagagccacgtatggctactgtcgcagagggactgaaatggtcttaacactgcttgaaacttgctccgcacccttaaacgacagtcctcgtctaccatagtgacattcggttgccagatcttcaaagggatttttcccaggagggaataccgcgacttgggagcagcctcattcttctctttacctctgaagctccccgcgcatgtatatatttgccaatgaaacctcgtttcccttgttccatttgtcttctggaacacagggttcttgtgggcataaaatgcttgcagccgtcttagcaggttccacctgccgacaacagactgtatcactgaaactgttcagtagttacacgccacgcccccattatcccagcagcctaaggtgtggaagtccaaatgtgtccggggcttagcaactgttttcaacgcttttttggtagcactgtctcggttcagatgtgagtcgctcaccctcgtccagactgactttaaacacattcccgcgcgcttttcccatccaccagaatgcctctctgtgacgtggacacagcttttgtgtgggagacagcagtctgccgccttttgggcatttcgttttggctggaggattagactctcgcccttggcgaaaacccgctggagaccggtgattatgctgattacatatgaacagatgacctctgtcttcgtaactcgctggaatgcgttcgtgtcagtgatttgtttacgtgtttcctgcgtcacatctatgttaaggatcaaattgggatgaatgtagttgtgttttggcggaagtcctacatgaaattgcttaggtctctgcattgtagagaacggtacatcagcgcatgaaacgtcgtgcttccaacaatcagacgtaaatgcgttcagatttctccctagttgttcacgagtacgactccctgtgggttgaaagtggcgaatcaaatatgttatcttcgtcttgtatctcacctcaaacctttcgagttctttactgccgaaaaatccggcgaacatctttgaacgcggtcatacagacacacatcagccaatgacgtgcgttatgtttcttacggaagggtacaccatcgtcttctgacagcgtctacgaatcatgtcatacacgtctgagatgtctgttttcgagaggtcgggagggagcccctgaatgagggggaaaaggctatggtaaatatcttgactagttcgccaacagaataacgctgcttttcaggttcgcattccattcgggggctccaccacgaaa

SEQ ID NO: 2959 - DNA, 4426 bp, Toxoplasma gondii
  source 1..4426: mol_type = genomic DNA
tcaaagcatgcagttcaaaggcatcttttctggatataggaactggaatcggactggggaagcgaggcctgcctcggagagccttcgaggtgaagaaaaaaatgaaaagattcacagcgctgtccctagggcgccttcctttgctcttcagaagccacacatacgagggctctcaacggtttttcatgtctggagcgattctcttcaagcacacaaggacggtctgcttcctttttagaatctgttctcgctcctcgatctcccccttttattcacccgcactccagttcacacaaaacgcctatttctctccgtcgtcttatcaaaccctgtctcttttctactcccaaaggggattctttttgttctcacattcccaaacacaacgtggagacgacggaaatcttgcaggcgtcggacatcgtttctccacagccgcgcgcttcctgcctctctctcacatcagacgcagcgtctccctcgctcttcgccgttggcgcggtgtctccggagtctctccaggtgcatgtcagcttgtgttcttgtttcctgcttcctcctcgacctcgttgctggcctggggcgcccagaagtcgaaatcttctactctgggaaagccacctcagattctttcctcttgtctctccgcgtctcccgtggctttccttcttgctgtggaatgtcgctgtcataaattggatcttccttatccacttcttgctccacactctctgcgtcttcgactcggtcggggacgtgacctagaaaaagaagagagacgcagaaagtcgatgggaagtgagtgggggcgcgagaagagaggaaaatcgtttgcaactcgacacagacttctctgtgacgaatcacagacactgttgtctcgtctggcgcttcctctcatcttgatcggtgcacaacgaaaggctccttgtttaacggcacacatgcatgcggagatatatgttcacacatgtttacgtagctatctatatgtatctgtattatgtagaggtgtatgtatattaaggacaaagaaactgagtgattcctgaagcaaccgatcaggcagggcgctctgtcgcaggccgcaccgctgcttccagataccagcaaaaagacacggagacacccagatttcatcgtctcaaacaggtcgcaccgcgacagagagaagaccaccgagaatgccctttttccctgttctgctgtcgcttcttaacactagcgagaagggaacgctgagacacacacactcatccgcagtagggcttgttcccgcgaaaacgcggtggcctttggcatgtcgttgaacttgaacggcacacaaccgttccgccaccacaggcactggatgtctgtggatctacaaatgaatgtcgccgatgaattcgggacttcttcggacacaccccaattaaatttcccgcttccttgtttgtgcgagcgttcgccgagagctctcgatttcgagccggcgtggtgttccagttttgaggcatctttatcgcggacggttgccatggtgtcgagaaacatacggtcacattattgaaagaaaccgcaaagagatttggtgttcgacgcgtggctttccatcccccgtcgcgtttcctagctttctcgcgttcactggcggcacaggcgagacgacgccgggggttgagtctctccatctagctgaaaaacggagacgagagcacgaaaaggtggacgtcgtgaacggtgtgtgttcacatgtcgcctagatacggaaggagttgggagagcgtcgacagcacaatgcgtttctccagctccttatcaaaaacaacgggatagaaagcctctccatgactcaagtccgcgtactctcgttgaagagaaccgagaaacgaagacgctttcgggtgtcgatggtgtcgattcggcaaacatatgcgggtgggggtctcggtgaccgtagagaagcaaacattgtgtagaagccctgcagagaattgcgctttgctaacacgatgagatgctttccagggtctctgcttctgttcacctttcggcaactctagacgtattcaatgggaaggaaagctgccctatgggcagtgtgcacattacctcgtgcttggcgtcgccgtctcaaagttcccctgtcccgcgcgcagaagcgggagagttcctcatggggctttgtctttggccgagtgttttggagtggacgcaaacaaagggtaacgtcgacaagaggtttcaccaattcacacacaagaagcagttttcctgagtagccatcaactgacgaacatgggcacataaaccaaagtgaaggttagcgtgtgcgacagcgaacttcgcgcttccacgctggcgttttgtgcaggtgaagggtgcaagacagcgaacattttcacggcagtgaactgccttgttttcaatgctgagctcgtggtcgcgacctgtgctttggaatctcctgcctgtcgccactgttgcaaacggcgagaaaaacaaacgactcttcagatacgactacggtcagtcccatcgtactgagagcactcgttcagcgtgaggcaaggtgatgaactttttctttttccaacgaattcctttccttcctcgccaggaacagagtgcctttcgttcctccaacagtggcgcctcccttgcttgcacacagaggcggcagttgcgccgcctgtgttttggccgtcttttccgacaagacccattcaagacgagtttcactgattcagctggagagcgtctcaagacctctgacacatgcatgtcgagctagtgcgtgcgtacctgctccaaacgccatcatgcgttgaggaaaaaaaactcaatagcgacacacactgccctgtgcgtgactcggtaactaggccagcgagcattcgctttctctttcttttcagaaagcaagaaccaccgaagaatgtgccggcgtccgcagccaaatggacagcgcttcacaactcaggattcaaaaagcgaaatggcctcggcagagtagtgaccgggtcgccacactggactccctttagaacacacgggcaactcgccttcctgaaggcagttttgcggacttggttcaactcggggtgtcttgctcgctttctcgtggcgctttgtcgacgccgttcactcctgacactcgaacaggacagaaatggaagcggcaagctgaaatcatgcgatctgcgcttccgcaggttcttccctgccgtcaggctttacgagatacatgcgtcgaattgtctctgacgacctggcgcagctgtgaaatacctggacgagcaacagcaccgtagaggcggaggtcttgagaccccgagctcttgcctgtttcaagccgtccaacagcgtcgcattttaaagctttttcgtagattcgaaaaacgacgggactctgatagaagcaactccatcctaccagagtcgggatgtcaccctgtttctaccgcgtttacgcatgccttagtttatcccgcatctacgaccaggaaccgtgtgtcgggctccagctggtcctcgacatcgcggcgacctctttgcaccgaacgttaatggcagtttccagcatgctttgcggtgtaaatataaggccatccacctgggaggtacggatgggtgtcagcttgttcctcgtcggttgtctttcgttcgcggattgacccgttacaatcaatcagtgtgttcttaatgtccgctttggatgtgctgtgtcacacgtaggaaagtggaatttctccttccactctgcaagtcgagtttccgagcctgacgtaaacctcaacaggaaacgaacaatttccagacatggaaggctgtcttttccgcggcagagagacaaacatccaagctgttgttattctcgttgcgaagcgaatgaagaaaacgcgctgtgaatgcattaccggagacactctctgcgcaaccgtggtactactcgagttctcagaagacatcacagcggtcgaacggttgagtgcatgcggtgagtgaatcgcggtttccgtgaagggatccggacttcagagcgactctcctcctccgtttcttttgttttccttgaagtccctccctcaggtttttttaattctttcccccgaacaagaaattcccttcctcgttcgctctttcgcccagaaaaaaaggagtgaccctgcagctaggttttcgcatgcagttcgcctcaggtcgcgctgtttctcttgtcagcgcagacttgtttctcgcgtctgcttgtctgccgaggaatgtatgtgaggaaaaagaagaattcaggatcccccccgaagctttggacgcactctctcctcttctgtcaaagctggagagacagcaaagggaagaaaggatgcatgccctcttgtcttcaggcagaaggtcaaagatgtgtgaagatggatcttgatttctctttcgtaggcgaggaaga

SEQ ID NO: 2960 - DNA, 3625 bp, Toxoplasma gondii
  source 1..3625: mol_type = genomic DNA
tccacacagtcgtacgctgcgtcgaggaattctgccgtttcttctcagagggcgatcgtctacctgggccttgtttctccacaggagacccaggtgagtctgctgtccagccacacatgtgtatatggatgtgtcctaagatacataaacagcctgccccaaacatggcttctgtctcttgtcagattcggctgaggggaaccagtatacctttttacttggggatggtctactgcagtgaggttctcttgagtttctaggagggccgcaatgggtacgcattcgctggactccacacactcacagacatatacagatgcttttgcaaagtgcaatgaccaagcgaactgttcgaagcatgagctcacacatcaagaccaaaattcagcccgtcggtattttcttcttactgttcagaatttctttcgcgagcttggtaaactcgtcgagcgttaggtgcgacttctgcggtggtggggtggcaccggaaaagcaactggttttgttcagtgcttgccggtattcatcagcggcgacatcaatgaccgtatacaagcagtcttcatcctgtaagggaacaaacaacgtgcagaaccaaaatgcaaatctaaagtcgggagaaactctccatctgttctgagtaccacggtatttctcaaaacccagaaatgaaatgcactgctgtagaatcacggagattccacgaggcatcatgctaactgacactggataaacctgtacatcaatatgcgtacatgcggcaaaatcggtacactgcttactttacccgcgtcggactgtctgcaagtacacaagtgcggtatcaccatacaaatgattcgcgatgcaggacgacttaagtcataccgaaaaaaccgagacattacagtgcctaggacaatctctgtgactcctgttatgagacaccgacatggctttcaccactgcaagtcagctgcatatgtcagggtagcagaggaaaacttccggcgttgtaaaacaccagctaaccttgggaacgtgggaaaaaatcggtgcgcggcaaaggtaactgaaaacgctctagcattcgaggtcggtagtcagacagtcactgcgtgcttgtttcttgaatgaaacactaagaacataactacaggaaacgagcgttacctcggattcggagtcgaagatcgggtcatacgtgtccatcaccttgacaggtcctcgcagctcctcttccaagagagacattttcttcccaagcgctttgttcgacgccatcttgtctcgtaaaaacgaatggtttcctgtttcacacgactgacgttagccacgacacacacgaatcccccagaactttgttccgatgtctttgtcttgtcttcgagcgaaacgtccacccgggatccggggtttcaaaacgaacctattttttctcaaaagaagtacggccgcattacatggagctccaggaggaagtcacataaagccagttagccgttacactagcaacgaggcatcagtcacggcgtttcttgtcaggaaatgaagggtgacaatgtccctgtgccgacatatgcaacgaaaagcttttcatttatggcgaagccaccgagacaacgcgaaccgtcaatccagagacagcgggtcgcgctgaaggcgcgtcttctccaaaaacgcttttggctacttgacctgcgcgagcctcacactggcgacctccggaataaagtttcaacggactactgccacagcttcgaggtgtagcacagccagtagacaaaagctcactctgcggaaaaaagagcaaaaagcagacgccggaacggttacactgtagcacagaccgacgtgctcatcaagaggcacaggaagtactggtgctgcgagacccaaaacagatactcttcttaacccggatatccgcgcatgagcccccgctatttctgattttccctggagcggcgcgaaagcttttgttagaggcgcccgccgaggaatgagagagacaaagccagcaaagccctgtccaagcgcgctgtgcctgagaaaggctctcgaacaaaaaacaaaggcttctagcgaaagctcggtagccgcaaaacggaaaaacgtgttattcgccttcttgctcggtttgaatgcttctgtttcaacacacctgcgagacgaggaacggtccgagggtcgcagtgccacgagcccactagcggcggggattgccgcgcgacagagcatgtaactccatcagaaccccccaacagtcggagcgctgctcttgctcgtgggaaggtttttcatgccgtggtgaattcgtgacgaagcgtgtgtaggaaataaataaaaatctctcgaaaaaactgctaccacccgaatcgacttatcagtgccagtctgtggctactctttctgcttcagaggtatggcagaacgcctagctaccgttaagagccgctacacgcttccttattcagacgcgccggcagtgctttgaactgagacggaaggcgcgttgaggtaagtttgccagacgtttgcctaccgcaaaagacacatacacacgcaacagtcaggcttctgggtagttggcgaacctcgcacgctgcgccctgttgccaacgctctcgattgagcagccgttttaaggcgaagtggcaagagggcgttgttccggacttgctgaccctcgagaagactaaagtttcactttcgcatactgggaaggttttaaatgtagctgcgcatttgcgcggacggaactccgacgcagtcgcagagactctgagagaagggaaccggctcgctggaggtggcactttccagaaaggtgtctgtacgcgaatgcaggaccgcttatgcaagacgtgcaccgcacgcgcccaagagacagatggatgtgtgtgcatggcagcacatctgcatgcagaggggcgacatgaagtggcacggtttgaagacatcggaaacccgagaaggcgcaatgcgtttcggtcttttctcttgtcttgcattttcatgatagtttccgaaacaagcacaagctggcgcccagactacacccggttgagtacgacagtccggccgcggatgtcacaggctgattcttgagacgctttttattgctcgtttactcctgcggatactcccgaaattaaatcggactgtagtgtatcattcgacagctgacggttcaagtcgtatttttcttgtgtgtagtatctcctgccccctgtacatgttcttacaggcactgtacatgtctcatttgacggagactgcctcgatctgtcgtcttttctccgtgaacagcacccgtcttcacacatcgcgtgtcacccggaggatatcgtaggttgcggtgagtgtccccctctgcgtaccactttttgacgttgtggaacaaatgatcgagtagcctcttcagcaaacactctccacaggctgtatctcccgccaagccttcagatccccggcaacggaaccacacccagcctgactcagcaccagggacaaataaatggaccagagccaggaaggagattcattctgattcgctccattcttggaaaggcggtcggccgtcgtactttttttcgccgggaaaataagttcctaactccctcagcagcagaccctgcgagca

SEQ ID NO: 2961 - DNA, 4264 bp, Toxoplasma gondii
  source 1..4264: mol_type = genomic DNA
ttcttcgacagaggttctctcgcactctctgctctctccgcatcagacgcagccaacgaccttcccggcgagcccgcggcaggcgacgaagccgagtcgttctctctgatcttccgcctcgcacactccatggtacgcagcagcgaggagagtgccaggcaactctctcggacctccgccaccgtcaaatccgtcacgagttcctcgggcagcgcggcggcagaggtcgggagccacggcaccgcgcgcgagcctccggcagagagagacggcgagcgctcgggcgcgaggagaagcggcggagggaagggagcgagcaggcgtaagcgtgacgcagaggcttcacatgcgccgcgagggtcctggggcagggaggaggaaggccgggtgggcgcagaggacgagaggaaggaagcgggagacggcggcagagatgtgacagcgggccagcgaggaaagacaaagggccgagctctcggtacttctgggagatgcgcagaagcgggaggggaggcttcgtcatggaactccgagggacgaagccgctgcgtcgctgtgcgctcgcaggcgtcgtgcctctcactgccccactcactcgtctcacgcagatacgcttggtagagcagaaaggacagaaggcgctcgaggacgccgatatgggtcttgaaggggctgatggctgccgagcagaactggagctcgagctggcgtctgaagaaggcgctgctgccgggaaagagcatcgcggttgtaatgttgtagagcacagcgagggcgaagaaggaggcgaagaggcccccgatgagcacagaacagaaaaaagaaaagaggaacaggaacaaaagaaaaaccgcaaagaaaccgcaacagagcacgagcggaaacgcgttcgctgcggcgaaccggacgctcgacgcgactgccggcttgagcgctctgcagactggagcgaggacccacttgctgcaggagagaaaacacgcccgaagacgggcaaaaaaaaggggaccgaaacgcacgctcatcttgtagacaatgcctcggaacagcggcgaaaggagaaacaaagagagctagcaaaaaggatggcggagcatgcgggagcgcttcctcgcgacacccgcagcctccgctctacctaagaccctccgagaaaagtgtgaagttgtctctcaagcgaatttcagaaacatccgtcatcagtggagaggaaatgcaagccgacacgcgagaaaatccaaacagcgcagacagagacacaaacgctggagggttggcgcgagtgccacgccggccgcgggaacgagcgcatttttcgtggtgaacggtcgttatcgaaggaacgccgacatgaatcaagaaactgtcgaggcaaagagggacagagtaactttccgaaattgataaaccaaggttctttccagtacgcactctcgctacaagacatgcaaagcacagacccgcaaaggtggaccgggtgacctaccacccgacgtgaagctcacggagaccgtctactccgggaactaagaatggagcagcggaacacgggaccgcagcgtgagtggtggtggccatttccacattcaggaataagttttctgtaccggtttccaccctgaaaggacaaggcttccggataggtcacgcatgccgccgctcaactggttctcctctcgtttctgctgcttgtagattcattgttaggagtcgagcgatcgcgtctgtattttaagcagatcaaagaacgagatggccacacgaatcgccatcttttttcctgctaccaagtcgccacccgtcagcgcgtgatttacaaagtggtaagtcgttgcttcgccctcaaacgtttcccccattttcctcatatgccagtattggaccctcgaggggccgcctgaagaaggcaggaagtttctcgtccagctgtatctgtgctgaacgcttcgatcttgagaattcctcgaaagactggcgagttcgagacagagagaagcgatcagatacattactgtatgcaagcagctggctggccactagcgtaacaccgactcacagatccagacttccctgtgagccagagctgttggctaacagtcacgagcgccgtcgcacccggctgtccaagagccacccatcataagttgttatagaagaacaatgaaggccgactggtgcgtgcggttacccgaggattaatgaattgctcaccgaaaatgccgcaagggatccctgccagcagtggtgtgcaccggggttcacggggggctcaagtcgcgatattcgcctgggctggtttgggaacgtgacctcagtacggctcagctgcctcggagcagaagtttccccacgcacatgtaacttacagtgcagacggggtcacacggtgtcctcacaaaccaactgctgcatttggcaggcacctccagcgcaaaatctcgttagcgccgtgtgttatacgtgcaatgttctgcagttcttgagacagatatcagcgtgaggggcatccaatgcggacggacgatgggcgctattggttttttcgcatggtgcgacttgtcatagagcgcgagttgtgcagatcgccggaaatgccgaagagcgagagaaggtggcccagtctccaatctatcccttgtgtctgttcacccttcgctctttaaccttatgacttcttttgtgtctgccatcatctgaagctgctcgcgcgtgaaaatgccagcatatccgaacacgctcacccccgaatacatacctcacagacggaagcctccctttgtcaactctagctacaaaggagaatgctttttgagtgcttttcctacagtgactgaagaaccccgtgttttgattgaaacggtcctcgcgtttctacaggaaccagctggattattcgctcgtggcttcacctggcttgagtgttctggagagcagctgctctcggtcttaccacactaacccgaggccaacacatctcctttccgaaacggattcgctggtgggaatcgtatccttgctcggtatgttcgagcttcgctgtttccgtgccggctgcatctgctgtccctgctgagcggggaccggcagaccaccatcctcaccagattgtgttgctttaccacttactctgccaagcaacaaatcagcaaagtgctccgcaaggatatgcacctagaacggtaccgcacacccgcgcattctgctttcggggcaaatttgtatggcggtgacgcccacacaggaataaagtagacagaacgcgagagcacacacagatctgtaggcaatcctcaacagctttcgagcccccctttcgtgcaaaaggtgtgttcttcatcccccacaaccatggtacacaacgagtgtcgtgcagtggaacagtcggctcgcgtttgcctggttgccgcatcattctgtttctcccgagcgatgagagtgcgtccctaacaagcggggaagggaacctccgtcaaggggggacagcaaacgaagccctggccacgcttttctgcaggacctcaccgctccacaattccggttatgttccggtggacgcacttttttgggcgtactttttctgcacacgccggcggaaaaacgagtccccgctgtgggcacggcgcgctgtccgttactgcggctggacagccttgcggttgcgcgggttcgtccacatagccgtcagacaccccggttcgtccgaaaatacatccgctggtggcaggaagtagagatcatggcatcggatgtcgggtggggaaatggttcatatcggtcttctggtatcgccgtttgctgtcttgcgacctgaaactgcgaagtgcgtctgccggtgtccgcgaaccccgaagttgtcgacccacgcgaagaggaaacggctggcatcggtcgtgagaacgacgagcagaagcgcgtgggtcacatctgtgacacccgactgttcgtgcgccaccgctgggggacgctggtggtagggcacgaagtgaggagccgctctgttgtcgggggaaaacgtctccaatatctcactttttcttgttgtcaaacgtctgttcttgtattcccaagtgcggccgtgctccagatcaacccgggtgtagctcccgtgaagcttggccgattccgttccccaggatttaacgagatcccctcacggctccccccgaggctgttgcaagcgtggtcgggagccctgctggtgagccagttgcgtttggtcacttctcgcaattcgcctttcccatcttcccaaaactaagcacaa

SEQ ID NO: 2962 - DNA, 4234 bp, Toxoplasma gondii
  source 1..4234: mol_type = genomic DNA
tacattactgacttcaacccttctattcgcttggtctctggtagcccagcctgtgtaaactcggatatagcatagacgcaggggcgggtggagctgtcggttgtactcgataacctccatgagacgttccgtacgtaccagcccatctgtgttcaggttcggcgaacggatacatgggcggaacgtacggcggcggcggctctctgggcatatcatcagaagttgacacgtctccttttgagcgcccctcttctccaaagtctccactgtccccacctccgcctcggcgcatccgccttctctcgagaaaagcgcgcacacgaggcgtaccatatttcagcagtgccatcgttaagacggcgagagcagccactttaaataacctccaccacgtcctccgcagcttcgtggtttcggaggtcccagattgtagcattcttatgccccctctcactaccgccctgtgcgacgtttccgttccctgtggttgactgtttataacattttcctcctgtgcctcaccagcaacaacagaggcgacatggtcctccatgatcttgaactctcccacggcatcttgcagataaagaaggaaaggagagaaaggatcccgttgtttcggcggtacgacactcactagatgtaagtacagcatgaccactgcttttgtcacggggagactagcgtcaaccgcctcatggagaccattgatgtccaaaagagcaagtgcagacgcaacagaaccaaggaaacggctcagaacttcttgaacctcaggagcggacttcaacagatctgttataaatccttcttcatttttggctgcatcgagacgcattagaatcttcttcacgccgttcgccgtgctctgaagggatcgagatagctgggccgccagcacatatttttgaacaaaacctgccacagttggtatttcccgagcactagttaaacgttccaatgcaacatcgaggggtaaacgcctaagaactccagagaagtatgacaaaccatctcctagatagcttacgggcacaatgagctgctgaggagttggggcagtctggggtttctgtgtgccgaggatgccttcctgctgcggttgatgttggacagaataggaaattgtctgctccaaactggcagctgcagccactgcttcactcgttagaagcagaaacgaaaaatagaaaagccagctacaactcgaccaccccgacgagcggtccccccgcgctatcgcctgcattttgtgcttagcagtgggaacctccggcacctgcgacctagcacgagagcaaaaaggtatttctttatcaaaaagaaattgccattacattcacctctgctagcactgtacacgtatgctgctacagaatagcatatgtctgagtgacgctttctcaggcacctgaccaggaaaagagacgcggcatctcgctcgttagcgcgtctcatggcgaaaccgacccagacttgctaattaccgaacttgagtctgcttccctactcgttttttttcctggttgtgctggcagaatctaatgcagtatcagaatggagcccaggagacacatctgaacgcggcatcaaagaacaagacttccgtaataattaactgggtacacatgacgtaatggtgctgcccttccttgtcccacctacatgtcgtctggtgtccttgtcttgcacgccacagcagagatgctgtcgctgcattatgctcagtttcttctgacaacttcccaatgcgttcacccgcagcatatttgtgcacgtgtgagagagaaaaaataaaaggtctcgtggaatgatatagtcgatgctccttgcatcttcggtggacatttgcatgattagccattgtgcgtgagtgtcaaccttcaaggaacaagttccagaagagaggtacatgaacaatgattgcgccaagcaagcacattgacaagacagagaagcttacgtacacgctgcgagcggcacgtgtgttcagtgtgcgctataaacagctcttgtggtatcacgcacatggtggctcgttcagccggtattccctgtgacagtgctggtgtccgagagcgtctagtttcatccggactccctcgcgtcattccccttccagtacttcgggggttgcctccttgctgaacaactagctttgccggcctcgtacagtataggaacgggttgtgtgcgcacattatttccgtgtataactccggaaaccagggctagaaagtggactgaagttacagatgacctgaaattgtaattgatctcagcaagcgcgtacgctgatgcagtattgtggatgtgtcaaaaaagcttatttactccaaatgacagtattgtaggtatttccgttctatttgtatctctgtacgactggcggtcctgtgcgattcaacacacctgctgtcactaaaataagttgtgctgtttgcgtcttggccacctctgtataacctttggaatgcacaaaccattcgtgcccacttcgaaaaatggagcggccatgaagctgaggctaccacgtgttcgctagaagccgtgtgtcttggacgtctatcccacgtgccagtggacgtgtcatcctcattcgtcactgaagctttagaaagttggagattaccttttcaaaacgtgccactcggtcccatcgcccagccacagtgaaaggttcaaaggagactgagagcgtgagtgcacactctggcgatagtcgtaacagtaattcctgttctgtcaacgctggctgaatcgcagaatgaaagtgataatgctccaggaagtgaacagcagagtgtttgaccttttgtcgctgtaattccttaatcttggcgacccggtcttgttctatttcagtgcggactcgcccaagcaagcttcacctgagtaaatatttctctgaaaattatcatcactagatacaggctacgagtgtctaccagcatttgctacttctattcactcacattcccaccgccagcaactgttgatgtagaacctctcatatgccgcggttctgaacgtcaggtagacaaacttcgtcgccacaggctgtggaattcgctgaagcgaaggactctcttgtgtcgccccgaaagcactcagcgagtcccgtagttcgctgatgtctgcctgaaacatcgcgaccgagcagcttgactggtctcaatgggaatagccctggttgatcggctgtagtctacggtcgttttccggtgtcagcggaacgaaaagctagtcttcatgaagctgcctgcctcttctgcagatgacagaccgtgtgtcgaagtcattggtcctgtaggtatttatattaaaatttctgtgcatgttatgttgatgtcgctttgtaagggcgagattcctgggccttctcccgttcgttgacggctgcattgttatcagacgaccctactcgtaacgtaagaagcctcttgggtgtcctccaccattctaagttcacgtgttgtttctcatggacaagtggcactgaaccgaacagcggaagcgcttcgcaaccgcggcacgcagggtgccaaagggtgtcgcgtccaacgcacaaatggactacggccaaccaggagactcgaacgcggccgtcctacaaatgatctgtttccccagtagatgtgtccgaattgatgtcaaagctttttctgcgggttgcgatattttctcccgcacacataatgccccctttgcatgcgtgcagcgaagtctcacgtaattcctggcatgccagtggccgcatttgtcccccaagtctccccgtatttatatcggcatgtgtaatctatgtaggcgtcccatctttttttggtttccacgggacgcaggaaactggttttaatttttcgatcgccgtttttttccgccaccaaacaaaagatcaaccattgcctgagcgtcacagtgtgtttcatgttaaccgcgttgccgtggtttcagtcgacttagaccaacttgcgacgtctctcgtgtttgtatacgaaactcagacgtcgaaagagtgctttactctatactaccactatatgaaatgtaaaacatatcgatgtcgccccagcttgacgtcttccgggtgcccagagtgtcttgattttcctcaggtcaccggagacccggcaggactcgcgatgttcgattgtcagagacatcgacgctgcttgcccaaccagagaaaaaaacgactaccccattatcgatttccgttcttcatttcaca

SEQ ID NO: 2963 - DNA, 4186 bp, Toxoplasma gondii
  source 1..4186: mol_type = genomic DNA
gatatagacaggtatcagacaacatagcgtggagacagcgaccatggtgatcgctgagaggagttgggccgcccacaagtgcagggactcgcctccgtcatcatggcgctcttcggcatgatggctggaatcgtggacgtgggcgtgaacggactccgttcccgtccccccttccgtcatttttctccgcgttcctcggcgtcaaaaatggaaacgaaccgcgagctgggtcatgcgaaacgcgggtgtccactagacaccctgcaagaaaattgacagttaccgcggaaacttatgactcgacaactagaagccgggtccacattcctaagaagtgcgcgcggtgtgcttacaccttaaaagcacgtgaaggtgtctcgtcggcgaatgacagccacccacggcgcaacaaccagcttcactacagagaaagtggttgttgatgctgcattcaacagaggcgcctcgcctcttattcagcacccaatgaaaaaaaaacgaatcgctcttccgcagcgtcaaatgagtgcctggctccagcttcacatttcagctgctggtgccccaattgaaatccccgaccagcgacgcaaatcagtcgttctttcgcgtgagaacagacgacgtgcaactctttccgtttcggagcaactaaatcaagggacagacaacatgcactcctggcgttgcgtttgcgcgatactttgggggggtctgaaaaagattgacaggaagacgaccttctaacacatagattgtgtttaccgttaccgtctagggatctctcgactcgggtgaagcattcaatgcccatgtgcagaacacctgaagcgaaacgcaaacgccctgccttctttccactgccttgaaacgctgtcatccgacacgattagaaagtcaaaactgacggtcgactggtgggaactgtaatcctttgtttccccgccaaccgtcccagtgtatatttacccatgaggggcgcctggttactgtccctagatctttggaacgaatgaattgcgtttttgcgccgtttctgtagaaagagcaggcgggtgcaagtgacgcaatcaatctgccgcagcccctccccggccccgccaacagtgacgaacgcttgccagaggcagcgtgtcaaacgcgatttcgttccagtggaaaccaatgacggttcttcccagtactcgagcgatttaccacgtgaggaaatcctactcgggtacgcaaatctccccgcactacatataaacaaacaagtatgtaaggaaccgcgaggggacctatgttacgcgtcccggagagaagatggagaaccaccggcatttgtttttctgcagacgcggcaggaaaacacacgcgccccttcacagcagaggacagcataaatccctggaaagaccagcacgccgaggcccgccgctgcaacaaagaaaggagttacgtcaggggaaaggccctgccagtagctggcagcagttaagcgcgaaagtcgcgcagaactgaggttttgctgaacgcggacaagactggcgtgctacgccaaggatagaggaaaggcagaacgaccactacgacacacttttaagcgaatggtcatcattctcccaagtttccacagcggaagaaaccacggagaaagagtaacgggaaattgggtcgtgctcgaccaacctttctcaactcgcgtacatgagggacaagaaaagacgctcctcctcaatcgactgtgaggggctggcgctccttttagcgcgaccccacaagggcggcgtacgagacactgctgcccaaggtgcacgttgttttcttcgagtaaatcagtgagtcatcggttaaaatcgtagcacgagcaaagggcacggttcgacctatattttcagggagatgtctcaaaatttctccgacagtatcacctgtgaagacaagaagggtctcatgaagctgcctagtgcaagaccttacggaacctcttacaggattcgtctgaggcagcagaaatagcctttctttgtcaagctgagtgtctggcatttgaaatttgtcaaagaaaacagtggaacctgtttaagaaaagagaagacgtattacgacgacacaacaaaaaaccagatgacagccttttctgctgccaggaaaaaccggatggcatgtctaacagaaagggacatcatcaatgaacgttcctctgtggatttgccgtaattcggtcctccgctcttctttttctccccgtacacttcctctgtcttcctttgcgtccttccacgcttcttcgccttcatccaactgctgtccctttttgtgttgaacgatgatgacactccatcattggtttgcctgttgcagcgccacggtcagtcgtgaccagtccgctattttgtgactaaagggatgacggcatgctacattcaataacatacaagtcagaacgaaattctttgctggaagcagccgggaggaacggttagcgtggattcagtataaagtaggaagggtcaggaacgcaagaataacatcccaccaatcggtgccatggaaaactgtatgttcaatatcacgtgacacactccacaaaaaacaaaaaacgacaggacaaccgtagcgaaaaagaaagtaggtgatggagatattctggagctgaatgtttatccgcactcacatgccacccgtcgactgccagcaagaaggcggtgttacacgactgcatttacgtgcccaccacctgatgggagctttcggagtgagctgcattccagatggtagctttgtttatgtgttttttcataatagagttatggtgatggcggtgtacttgttgacggtatgcctacattgtttaacgaagagcctacgtacccatttacggaggataagcgggagataaaagggcatcgaaggaagataatgaaacagcaaatcacttgttgagtctttgatttttagtaagtctattggggattctggtacaccactgttctaaaactgaaccactgactcgtagttcggtactcgggatcactcacgtgtggagccgcgttgtttgttgttctaaacgaacacgttgtgctgtttatttgcagcttcaatacactcaattaagacaagagggcaattgccatggctcgaatacgtaaccttgcaaaaagcgtttcgttttcccgtcaggtcgcccgtttaggttgtgctgcaaacattccgaaccgtgtacgaaggttgttccgtactgatatatgaacaaaggcgtccttgtggcgcgtcgacgcctaaaatccaacgctatcttacacctgactcgcggactgtgtttaagctattactacgccagcaaggttaatggccacagcttcgttgcaagcatgggactcaattcgtttctggatttgccccctctgttttcgttctacaacgactaattgaggcaagacgcagcgctgttgctttaacacggagaaagagaagtggaatactgctttatacggacgtagcaatataggtacacatgaatgcagcatgctatgaattatggtccatttgtgaacttttgcctggtacacaaagttctagatcaatgatgcatgcttttcgccgcaatcgtactacaggtacttccttgatcttttacccagttacatttgcaagcaaaggacggtgacaccacttcgacagctttcattggcgcattggtatataattctttgaggttatttcacctgcggcatctttatatctcagccagactgacaacgacacctgtgagagcacccggcacccaaggcactcgcatatattctcggagacgttcacgcctcttgccctcaggaaaccctgtttattcggtcgccattggatttcttacatttcctcctctcgactacgtctgttcgccgtcaggacattttcacctagcttcactcacacgcctcttgtacctgctccgccaacacatacgctgccgggcagtttctgttttcttctataaagtgatggcctatataccacgatgccgcatgagaaccaccaacaaaagagaaggcattttgtactttgtgtgatgcattctttgcttcgtcgttttaagtttgtcacgtagctagcctccatcgcggtggtaagaacacgaaaaatggtacttgagcgagaggcacctcaccacgagcgtcacggaatgtgggtaacgacaaggcca

SEQ ID NO: 2964 - DNA, 2308 bp, Toxoplasma gondii
  source 1..2308: mol_type = genomic DNA
caacgcggatttaggcaatgtcttggccagacggcggacgacatacacgccgcgagtacggctcccccgccggcgccataaaaaggccgagaggagactgcactgtgtatccagggcggatgggagagaccccgcagtgtgaagtcctcgagtctggcaactgcggtccaattggcacttccggcccccatgtggagcggactggattcgttgcatgaagcgatttgcattggcgcgtagggaggaagagaaagtatgtcggaatccccgggcgaagaaaaagtttccagaggtgcagccgcagaagcgaaagaaaagcagggactctgaccttcagaacggcggctctcgcctctgaaatcagcaagagtcttccttccaggagagatggaggcgcgttctcgggaacaggtgtgatgtctacgacggagacactgagtagaacatccttctcggcggctcgctgagtgtatccgtctagaggaaaacaaagacgagtacggcgtctcgattcgggcaggaaacaacggcatgttcctccgaaaggaaaaagcatcccagccagcggtgctggcgtggcgaagccgagatccgagcatggtagctgtcgcctgtgtctcgccttggctgagtgtcagtgaaacaaggtgctcgaacgcgcgtcggagcctcgcgcatgccctttacctccaactatgcggcatgcaacaggtcttccggcaaaaaacttggcgccgctcttctactcagctggtcagaaagaacgaaaacaactttacacgagttggcacagaacatcgaagtctttacgcctgggatgtatgggaaatactcaaacgttcttaatcctagttgactaacttgaatgatgctgggttgaactgtcagtaagcttcaatgcccaaggcagaacttctgcggatgttcttgaattaaaaactcacacagattggagccgggaaacacagggggagtcacgggcgccgacgggcgacattcagtatgcacactcctggctgtttctgccaggtcgttgtcgaaggtaaataaaagcggctgatacacttgagagaagcgaatagcaacggcacgtcccagaaaacagacgccgtgccgcactctcccaattccagatggcgaagagtccgttttgcgctacatcccggttcagacagttcaccccagccccatatatgcgaggctgagggtggttgactcgcacgcagaccgaattcaggcaagaagcacccttgaagtagccaccattttaccgatttttgcgaatgttctttcaagagggaaaacgaagcgacggaaaagatgtgtttgcttcggagaatgggcaccccgaacccagcgacaggcttttcgtgctgcaagtatacgctgctgcatgcgttttcaaagcgtgcatggtcacttgagtctgccgcagaaaaaggagacccgccaacgtacgcgtcaatggtccctaagcagcggttccctccgcagaggaaaagatcttgaccattcaaaacggcatgctgcttctcggtatgtctgtggtgcaaacggttccggcagcattcggcaaagcgctgcatcattcaatcggcaatcgtgcggaggacaacaggtgtgtttcacctggagttcgccaatcgatttgttctccactctccgtttggactcagagagcatcactcggagtgctactgtttcgcactctctcaagtcgtgtcagaaggaaccctgcagcccactaaactactctcggcgtgtgcagcagggacgctgcattcctttcccgtcttccagattcgccttttcgcttcgaaacgtctgtcaaagttctttccgtagcacattcgtttgcgctgcctcaccagtcgagtctagcccgtcgaagctgtgttcgttccgcttgtcagaatacacaggcgcgtctcgcgtttcggtggcctttttatgtgtacggtgggaaggcactccatgtttttttttcaaagtttttccccattaggaccttgttcaagccaatcacgtgtcacgtccgttccatatgcgctgcttttccatccacagttccaagaaacactcgacataggttttaacgtgtggccatttcaaaaatagctcgtcaagctctcgtccactcgaacactcgtgttggggttcgaagacgactttttggctcggtgagtttagtgagaaaagtccccccggtctcgttccgaagacgaattcaagtttgtcgaagtcggagcaggaacatagacaagcgggaccggcctgtccggctcttttcggcgatgtgaccccggaa

SEQ ID NO: 2965 - DNA, 1602 bp, Toxoplasma gondii
  source 1..1602: mol_type = genomic DNA
gcctatcactcgctgtgcttgcctgtggaagccgtcgaacgaaaattgtaaaaacaagaaagttgccgctgtcagacacaccgaaagagtgctgagttacactggtggcagctgtgaggatgccttgtttgagtttaccgccaccgtataaacctgagagaaagctgctttgatgacgatgtagacgagccgctattgttgaggcacagccaccataaccccgatagaaacctctaacttcgtgacactagtgtttaatcaaggtggtcgtggaaaacaatggagaaaaggaacagacaacacatacttgtaaacggaaggtcgcggcgttcacatctaaggaatgtccggcagtttaactgagaaaacgtacgcttgacgtcgctccgaggccttttctctgctttgcattttacgtcttgctttttgttccggttgtaagtatgtagcctttggatgggccgaacactctgtttttcaaagagaagacgaacgaaattatcttgcccgcaaatcaagaagaaactgagaatcgctcgacggcagggaggcgcctttgatgcacaagtgaaatttggtagtctccgccgaagctgaaatgttcagcaacggatgtcacacgttatgcgccgatgtttgtgctcaaggagctgacagacactagtaacttcattaaaataggttttgtttgtaaactcgatgatagacacacactccgcaaaaacatccaagtatcttcatatatatatatatatatatatagtgtttatatatatgtaggctaatgcttgtagagatacatttatatatcaaccggttttcgggaacaaaggtgtccactattgtatagagcagcggctaatgcgcagctatctcctatgcgttccgcaagcaaaagacgctggctgtcttttttctttcaagcgttttgtttcacgacatgtacaaggagctcggatctttaaacacaatcgcatctccaggtgtttttccttctttgccatgggagatgatgcagctaactctgagtgtgcgagactgcgcgacctgcagttagattcccatttgcccagaaattttgtaggggaattttcgcagttttctcccatggtttttggaaattctatgccgccgtaaagttgtggtctttgtcagagcctcaaccgtcgcggttgtctctctttttttcaaggtgttagtgagttttttctgcagagtcttgtcgtgtgcctttctagtcacgtgtcaaccgggaacacgcccttagtgaagttatcgggctccggttttgtactcgttttggcgatcgttcgcttgttggtttcccagtaccacagtcttcctttcgttggcctatcggtattacacgtggttcgctgtactttcgcgttcatatcgatataacccatgatacagatccgggttacgtgtgtcttcgtagcagacagaactcacggcagcgtttttgtgtgtttagggaccgatacaaagacctacttgtgagtgccttgtccggcaacaacagaaagctgccctctcatcttgaattccatgcagccttcctcatccttccctcttttttggtacacctttttgcaacca

SEQ ID NO: 2966 - DNA, 1974 bp, Toxoplasma gondii
  source 1..1974: mol_type = genomic DNA
gaaagttcagccgacaatacaggtcgaagaaaccgtccttttccacgccacccttctcgccagaatccccaggcatgtagaacgtgtcgagattcattggtggctgacgcctctgcgttggcttcacagcagcggctgtctgctcagacgctaacgggtcttcaacagcatctgcgtcatcgtcggaccctgagaacaaacagaaaggtgcgtaacttgcaacagaaaacgagtgacgcaaagaatacgatcctgcaacgataaacatgaagaggggtcatgagcatatctttctcgcgagctttttacgaggggcggtaacaaacaagcatcgagggcggttcgtgtaaagccgcggttgagagaagctgtgactgaagggaaaccagatatctcttcaaggaaatctgtagtatcttcgagttgtaaaaaaatgcaaagcaatagaaactgcgttctgatggtcagctctttccattgttaacaccacagaacgaggcgctgcggcggtgaagcttcgagtcgcacagacagtgtgtcggccaggctactcgggtgttcacaggaagaagaaaggatcattaaatcatgccgttacgcatgtgcactattccactcctcataaagcttctttcgagaacccctcgaaaacgaaaaccaccaattttttcctcgtttctgaaacgctggtcactgtgtgagcttgagcaatcacggtctgtgttgccgagagtctggcattatgtagcgggaccggtgctaaacgttcagacggcgaaacgcatagcgcctcctcttgttttggtgaccgaagttctgtcacatatctgggcagaacagcttgaaagcaaccggcttacagcgccttcgagcactctcttcatccccggtgggtgaggcgtctgtagcacgcagagtctgacggtcaacttcttcattttcgttttggtcttggggcggcggagaggttggctcttctgtttcgcgaaaaaaaaggcggcttgattgcgacggacttgagcccggtgagtctggaagccgcttgcgccggtcggcggacgaagcgggtgacgaatccatggcagaccacaagaagcagctcctgtacgacttggcacgctgggtgagaatgtggtgaggaagaaacaacgagaaaagggagatttgcagctgcgaggaaaccgtgtacaagacaagaagcgagtatttggaaactgccagcgtggtggggggcactttgaacacgcatgcagacaaaagcgggccgtgcatgtggtttacaagataagacctggccgctgcagattgccgaaacagaaggttggtcgagaagactctcgtggtaagcaaggactttctgaatttgagagagtctcggccgtcagcgctcaagtctcctgcacatccagacaagacagtgagcaggtttcgtcgcgcggcacgggatagacaccacccatcccaaccccactttttgcgaggtaatttgagcatcgagttgcacatgcgcatctactttacgcatctagaaatccaggtatcgatactttatcactgtgtgtttcagatgtcagcctgtctgcggcaagatcttttttgtgccatgcttaggaagagagaacgacaacaggtgagaagcagcacctctaaaaccagggtgtttgtatgagtcacgtccgaacgttgttttttctcggcgatgccgttggtatgtccggagtgcaatgagatattgtggttctgtgtttcgtgggcaagattccttttcttgcagcgtgaccctcgtgcttgttcgtatccgtcggatttaacggcggcagcggcacttaactggatacgctagccccgcacagcagtctgttgactcaagtctcccttgggtagagacgcagctgcctgaaacccacgcttttttggatttacaaagccagaaccgccgactccacggctcgcactgcaactgggccaaaaaaa

SEQ ID NO: 2967 - DNA, 2118 bp, Toxoplasma gondii
  source 1..2118: mol_type = genomic DNA
ctaatctcgcagcaacatggatagaacgttcgatacatagtctcgtgacactgttgcgggcacttttactctgttttgtcgctctgtaggcttctccccgcaatcgcagagtagcaaccgtctgaattttcagaccagattggtgcacagagcggcatactgtactgagcttatctgcctatctacaaacgtagatgctaaccaggggccgccgttgtgcacgggtgaattaagcccgaatcggtggtctctgcttctctaattttttttgtttccacgctgagatggcaaacaccgggcttaccctgttctgtcggggaatcatctgtattcctttgtcttctggatgaatcgcattctggctgcatcccatgttcgggtgctttttcggggttcagtctagagggggtagcgagacgaactcgaaagatgtaggtttggtttctcgtttgttcatccgtccggctagcagacctgttttacgaacataaccgagtgttttgttgttgtaaacaatgtccgtcgataactttgtttgggcgggtcccaccttctgcagagatcgcattggcacgtcagtttcgcagtttctccgagcgtcgagagccgaggtgtttgtacagcccacgtgtggtcagaactttcgccatgggtgctttttttatacacggattctgcacaaataaatatgttttacaacgctttaccgcatacgcaatgtccatctgccatctagatagtatcacccctctcagtttttcagtgtctggcggatttgcagccaacctgctgcaggacggtcacgttacgtccccgttctcgcaggattctttcgacaacgggattccggctccccccaatcacacccgtctgttcgccccgggaaacgctgcgccttgctgcgaactcgtccgcttttcgcgaaaccgaaacgcctcgtgaactgtgtattttttgcgttgaactcacggaatatggctctcctgctggccgtcaccagtgttttgacggtgtcagtgcgataacagtcattcaatgttctgaattgagatgctggcctcgtggcttgtagtacttcgagaacgttgagtcgtaacttgggtgtgcataccacaacttgagttcccatgtcatgtctctcgagcgcccacacttctccaaagaactgaatatcccttgcccgttgttctatgccctgagcgtgtggcctggagtggcgaaggacgagaaaagcgtttgtgtgtggatatagataccgaatcgataggtagatctgtatagagaacaaacacagaataagggtttacctctttgcagtcctacgagtgcttgaagtaaagaggagaaccgcgtcttagcatacctacacaggggcataaagtgcgtcagccaaatgagaaaagaaaattcaagagaagttcctgttctaagggtgatcgttgttcttgtttcatgacgtacccgacacagcacatcatcaacgaacaaaattttcttggttcacaggccaccgtcacaagccttcggacatctcgtgtttagtagtttgttcgttttttatgccaggtgacatttgtgagctcttgcctgagagaaatcgtgtacgaaaaaaagtatgaacgcgaatatccagatcacgtgttgcttgttaatgcaatacgtgcaacggtcggtgtcctcgttgtgcagatgaatgggaaaaagtggagttgtctggttgtggaccccggctcgagaacctcagcgagtgattctgcttgcaagtcggtctatgttttattatatttaagctattactagtttaaatcgattgaatgctagcagtgtcatatctgaagcacgccgaatcggcaaccaccacggtccaccagcttgcggtcagaagagacgggacgcagagagagttcgagatcgccggcccatactcgaacaggagatctggagcacccgtgtctccgcaagcgtagcgtaaggaaagccgttctctttctctcagccagagctaagaaaagccgccaattttctttcttgtgtgcacaccagccagtggagtggatgcgagcctgtgatttctgcccctaccgcagcccgtcgcaacacgcttggattttcctttca

SEQ ID NO: 2968 - DNA, 1138 bp, Toxoplasma gondii
  source 1..1138: mol_type = genomic DNA
ctcgaggagacacctgccagagagaagagcaactcgatggaaagcaagaagaaacggacgcagaagagagagaagagcgagaacgaacgtggaaggaagaccgagaagaagaaaggtaccgcagcctttctgagacccgatcgacaacagacagtggaaggagacgcgggaagcggcggaaacgaagatgagaaaggttacaagaagagagaaaagaggaggaagacgaacaagaggaagatggagaggatgaagacgacgaatgggaggaagaggcagacaaaggagaaggggaagaagagaaagaggagctacgacagagggtctcctccgcagggaggtggagttttcgagctggactttccattgtgtctgaatgtccttctgcagtcaactctccccgcattcgcagagggcggctctgcctctcttgctccgtctctttgtctttttcttattctctctcgccggttattcatctgggtctctctctctggttttctctcctgtcctcagtcggtttctctccctcatgaggcagcgtcctgccctgttttttgtgtccttcgccgtcgtcgtccttttactgtgccattccttgtcgttttgtcttgctctcttgtttcctctgtttctcacttctccctcttcgccttttctctccttcgaagcactcacgccggcaaggtcacctgccagctggggagccgggagccgcagaagaggaattgaaaaagggcagaaatggcgggagaagacggccaggaagagagctcagacacacaggaaaggaaagagatcgaagaagatctggtcgagaggaaagatgatttcttccttgaatccatcgaaaaaaacgcgtgcatgcggcacggatgcatgcaggcatttcgactccagaagcagagacagcatctggcgttaccttctcgtcttgggagtttttccttttctcccccttttggagacatccaaggcacctcgcgagcagcaagttttccggagcttctctgctttcgcgcgaagaagcttgagaagtcgaaggagttctgcctgagagcctccccgccgttgcatctgaggctctcgagaaaaataggagagacgtcctcgacatgagcttctcgtcctttccaca

SEQ ID NO: 2969 - DNA, 3403 bp, Toxoplasma gondii
  source 1..3403: mol_type = genomic DNA
cctctactaaacctctctcgtgtaatgtgttctttttacgcttcctgtctctctcggagaagcaaaagcgtgaccgtgccgcggtgatctgtcgtctccaacgtacctcatgagttgctcacttttaaaaatcactcaacgcttcattccattattactctgcagaaacgaggaataagggactccgtgcacgcagtaccctgagacctcaaaacggggtgcgtagtgtgaagaaactgttgaaagtagctttgcgagccatgtggacggatggccgccggaatgtagaggcacaccgatggacgatcctaacgtagaagtttcctttcgagggaacatctgtagagctcttggatttttgcagacgttctgtctggagttccagcaatgagaccgcccactcttgcgggtggcattcgcataactgccactgcttcgcagacaggggactttaccatattgaggcagccgctcattttatttcagtaccagtttctgatcccccttgcgctagacgtaacagaaaagattttcatcaaatggagagtcacttacaagtccgtttttcaccgatgaatgaaagcagcgcatgcagtattacgaggcaacactcaaaagtatgcgtatgcatctatatataaatatgtcgcttcatttaatcaaagaaagagatggagcactcgaactattatctcccttcaactgtcctacgtgttgaagattccggtattttcacacatgagccaaaacctccgttaatcagtgacaagtttccatctacatatgtcgcttcaacctgaaaaacggtggttttttatgggaacaccatggaactgctgccacattacattttgtattcatgatggaatctctggttccgcaatcacagcgcgcaaacgggatacggaggccactggtccccaataagtacggaccacgcaccggcgttttgtgttgcgaagggaccgtcaattcccattctgtgggaatgtgttcggtgtcttcacgcttcctacgtcacagcgaaataatgtcttcgatgaagataggcaacaacgaacggaagaagacaactattttcgtgctagctaggtatgtgcatggtgacgaagcgttgcgcatgtcaacaactttcttgtaatcgtttgtgaaaatgttgcaaatgcaacccagaatcatcgcgctctagttcgatacgtgatcaaagaatgtttcaagtcacaaattcaagtgaggaaaaggtaacagtcggaatgaagaggagtgaactatcgatgactatcggcgctctcgtgtaaacagaggtttgagtaacatgaaagtgggtactaaataaaggcagctgtggtgtaatcgtgcatgccttagtccctctatacgccattcggtgcagactcaaaattgtcaaccatgaaagaggaggtatcaacgatgcattaggggggtatcaccacagactaattgaactctgaatacaatgcgccgtctggaacggtctgtagagattaacagtgttcgtgtagtgaaacttcagtagtctgccttgtcgtaattcaaccattttaactgtctaaagcagtccggttggatagtggtgtagagcaatcttgaacttggttgcctatatctcacaactgcagtcgtaatccgtatcccagtttctatagtgtctaccaccacatatgatatttccccagtttaaaataaaacgctgctgcactattcgcgagcttggagaagtatacagtgcgacaagctcctgctagctgttgcatgaacagcccgacatgacaaagacagggttgagataaacagagtggatatctaacaccagatttttctttcgcgaataggcatggctgttcggtcgccgtagcattcctaacaaaggcgggtcgcagcttccccagccccaattgcgaggacaagaagggagaaacagtgttcaaaaacgagaatgtgtttccgctgtacgagaaaagagggaacacgagcagaggctccacatttttctcttgctgttggatgggatgaaccaagacatgggaatgcccctggtttgcaattcggttctttggttcaaatcgttttgcgccagaacgtggctgagacacttggtcgttcgcgtatcttgctttcaatggagctccaaagcatcactgctctggtgtgcgtaacagtctgccttttttgattattcagaaccttacggaaaacgtattccgtcaaaacgttttcgtatattgcagagagattttttaaatgtgttgtgacaccccctggttatcaagcaactcgctcctcgggtctaaccagttcagcgctggacgtctcatcctcctttctttcttgtgtgagtacttacgaacttcaagagcgctgggggtccgttttcacacatcttttaccgctttgccggctgccggggaactgcttgtcacgagcagaaagtatcagaagacaacaacatgtctgcttgttgtggagtttgaccgtcttcccgacgagccaatgccacaacatgcgcgaactcccagatgtccccggcacttttcagtgtgtgttgcggctgtgtttgttgaacgccaacagtgggaaacaaattttgtggggtattagaacatgcatggcattcaatcatgcttggttgaacgcccttaatttagactgccgctggcgaactcgccaagggcaccttgcggagtcgacgcgttgctggtatgctgttgaaggaccttgttcatagtttttgcctaaagctttattcatcttcctttcgcttttcatatacaaaacggtgtggcttcgcatcgtctcagcacacatacggtgtacccattcgtactgctcaagaaagggaatacgagacagtatgtcaccgtatcacaaactatatgcgtccgttgccacctgtcgggtgtcaagagtacagtcagagggtggatgtttgcagtgaccgtgtttcgtgctatgattgatagatccgaaactccgatactttggtcaccacactttataaaagaacctcggcttcttcctgtcctctcaaagtagcatacttgtgcgcaaaatattcgggagcgcctctaggctgccacgcttgatacgtttgtctgcgactgcggatagagtagcgtgcagagaagtccacaacagtatgtccattgttccaagacaggcaaccaccaggcgtcgaaatggcccgtgttttgacgccccttccactgcagtcgggcgaagcgtttgtgttcggttggttttcgtctgttcttcataccaaagaagcagcgtgacctgtctctattcgctccacttttcctttcctccattttcaatatcttgccattcaaggggagaattatctgagcctttatttcgactctgcgttgtttttttacgacta

SEQ ID NO: 2970 - DNA, 1967 bp, Toxoplasma gondii
  source 1..1967: mol_type = genomic DNA
tagcgggttgacggcgacggcgagagagcgtgatagaaaataacaaatacgaatcaaagaacagatggttaatgccaggataatgcggacgtcacgattttctacactgcacacgtgcatgatgaagtcactacggggtttcccctttgactcactagacacgtccattgggcgacgtcgcagcaaccgggggaagagcgaaagctgaacaggaccagggaaaacaaagagagcgaccgcactacggacggaacagcgtaactgcttgaaccatgcggtgcgagaacagctggagactttgaatggttccgctttgaaattcgccggatagaaacgcaggaaagctcacgccgcggagacagtgtggtgtggcttgacgcgtcgcgaggatccgttatttcacaagtaccaatgcatgtataccagattccatcaggggaacgacatcgtgtcagcatttcactaattagttgaaaagaggtgacgcaccgccggaaacgcagccctaatgcagacttgctgagacaggggagacacgcggaaacacggaagagaggacttgtgcagccaaaagctgacacgctaagtgcatagacgattatgagcttctgagtactgcgacacaattgggtacatcgacagatacagggattcaaacagcatcaacgaagccgggggaagtgtgtttcaacaaacacatactacaaagatagggaaagatatcgcttccacggaaaaagacatacgttaacatgagtctggcggtatgccttttcccaggctcattatcgaatgaatgagaatctgcggggcggggggtagagcgaagtcctcgtgtagccagtgaaactgcttccaatgtgttcaaaccccggcccggtcctccaggttcaaggccgcttgagctcctctcaatacagaaaaaaattgcaaagataattaaggaatatgctaaatgtggtgggtggaaatgaaggccaattctgccggtttccgccgtgccagcgccctctgtctagatatccatgcagttccttagatacaggaacggaaactcgacgcgggagatctagtgcataaacaacaagcatacatgcgatgctagccactggaaaaacctctgcattcctgatatgtgcactgaagaaagagtgtggcgaatcaggaactccagaagcaccgtctccagcgcgaaagcgacgtcacatacggggtctcgagtgcatgcactgcggccggctttcatgcctcatcacggctagcttcgaggtgcttcatttttccccttagttaagggctgaccgtgaccgtccgctccgcagtcttgagcaacatgacataagcaatgttgaaaaagctctggcgggtccagaagtcgaattgcgcctttgcgtgtctcgtgaaaaccgacgaacttgtgtcagcctgcatacactcagtgtggtcactcacttttacgtggcattccgctgcacatggtaaacacacaaaccgggtgctcctgcatgcgaaacaacgagtttgccaagcacccgttcattgggacaaatagcgtttcgtgtagcttcaccgtataagcttgagggaacgggaactgacaattttcaatcctccgagggctgagatacggcatcgcacgcgtctcgtctcaattcaaaagttgggtgggcagtctcgcagcagcaaaactgcagtctgtgcccactgagaacaaaagataagggttgtcgaagacttatcgagataatggaaaagccccgttagaggagtccgtcttgccgtgtgagttgcaaactgtccgagtggctggaaggggtagtcgggattaaaacagatgtatagaagcacgtcccatgataatgcagtttggaagcctcagctggatccgaagtttgcatatttttcgtttggcgacatacccgagtcggggtcggttttcgtcgcttgaagaaccctgccactcataa

SEQ ID NO: 2971 - DNA, 3863 bp, Toxoplasma gondii
  source 1..3863: mol_type = genomic DNA
ttcaactctcttggaggcctcagtgcccgtctatgggaatgtttatggtagatgggtttcggtgtggtgttgtgtccctttgcagaggatgaattcatgatcatcgcatgcgacggtgtgttcgacgtgatcagttgccaagaggctgtgaattgcgtacgtaagcatctgagaggaggcgggacggcagagacggcagcgcaagccctgtgcaagtttgcgttcgagcggcggtctctcgacaacctttctgccgttatcgctgtcttccagccccccgagcgtcttcaacataaagacaaaagacctgcggactggactcctaccacccccggactcggcgaagaaaaggctgccacagcagaggccagaccttcgagctcgtcacggtctcctttggccgccacccaaagtggagcctcagctggagaccgcactggagtctccggtggagggtcaggcgctgcaggcagcggcggggacaggacagccgcgggcgaaggaccaccccgaaggcggatcaacttcgccgcgctaaagggtctgttgtagaaacacgagctgctaaagagcggaacaacttgttgatgctaatggcgccgactagtgctttctcggggggcctgtgctgtcagtcttgccttgtcgccgagtcccgccaacagtggcgaggttgaacatcacgacgggcaggcagtttgtatatatatccacacttcgttgacgtaccggaaaaaacgaggtcgagagacggactctcccggcgccacagttacgcagcaatgcgctaaaaggaccagacacactataccagtagtgaagtgtaggataacagtcacggctcgaaagaactgtgttgaggtcgagccgccggtagccacaggttcgtgtagtggaaggctcgcggcttgttcagtgttggcactcaatacggcaagattttttcgtacgattttcggtggttccggcgctgaatttggagacacagttttgtgtcaacctagtctccgctctgtccccctagttacgcacgaagcgtattgttttgcactctttgaaattctccatcgcgcccccagaagccagcaggcggagaggtcctagaacggcaagttgccgaggtggtgatccgagttgcagagggtagaaacattgtctcttgatgcatgtgtcgaggcataaatagcttgcgcaaccgtttcacgcgaagaggctggagtagcttacaacccgcgagtgtcctgaggcatctgtacacctcttcttcctgttggtcataacaatgaacacgtagggcagtagctgccggagcgggcggtgacgcagacagccaagacgaggcggctttgtacaaacatcgagactacacgccagcttccgcgtttcaaggctgtggccaattgacttctcgtgtgcacacgtgcatgttctgtatgtatgaaaatggctgttgtgtcgctcacacgacagggaggaacctgtcaaaaaggtatcctcttacgcctgtgtcccggatacccagtgtcgtacgattccttttgggcacgtgtgcttgcgacatctgctgaactcttgggggctcccccttcaaacatgtactgctataaggcaacgggatcattccgggaactcagaaagccttagacatagttgaaagccgtcatcacccgctgaggcgacggccgaaacttaaaatgctgtttgatccgtgatgcgctcgcatttccttaagctgcatgaggcctccggaaggcaacaaaaatggaaacactgttcagctccctgctgatacacaagggatgaacagtacacttacgcctctatccatcctcgagcagtcacatcatgagtgacacgaacgagacagtgccagatccactcttcgagatacatagtgaaccgagaagaaagtcgtttgtgatcgatctgcgtcttgggattgttcacaactctgtggtgggtgagccggaagtgacagcgaatcgaagacacggtgacaagtagctcatgttcagaaggggacaacgaaggttgaaagagttgttttaacataacctcttcgtcggctgtgcgtaccgcagaagagaagcagggagcaggactaggatagatcaatttgacggatgcagagggtaacaacgtcggctgacagggtgccaccttttgtgaagcgttcggggcttgcgtcaagtcgtctcgagcttctggagagagaacgcagtcctgacgtggccatttggattctttgtgtcgtattttcgcacggttttagtgggtagcgaatacaatgttgatcatggttgtcgacgggcacttggcttcaaaaggcagcatatgcatcaattcattttatgtgtgccatgctacacttacctcttacatagcagaagcctggattgcatgcgtctgtcatttgtgcgtttggtccagctgcagggttgccttactgatgccattcgccgttgtttgaagcctgcacacaaaatgggcagaaaatggaccccgatccctgcgcttagtcaaggcgagtagcgacggtgcgacacagaaacagaaagacaagcgaccaggctgtacaccaaggacgatgtgggtaatttatctggggaaaaaacggagagaaccgcgtcactgtaccgatagttttgcttgagtgttgcattgcttaaagatttgttcctcgccgattgtgacggcgtgaccgatactcagcggctgtcgacaccactgacaacaagcattatttctgctggggatcacagaccaccgatcagagatgcaaatcctagacccagacgattctgcatctaaggcatgtacagcccttgcagcggtgtgtgctgtacgccaagcgtcaggctgcaaagagtcgaaagaaaaaccacccaaacgttagaagacactttgagcctcgagctcaggactgtcaatttcgtttcccttttcttcaatcaagcaactcagcagctaagtgcgagattggaatgaattgcactgtcactagtcaggctgcacactggggagaagtgactctcgcaaccctcggataacggtcgttctttcagagttgatatcacactaaacagcccctttcctgggtaaagactcaacgtttctcgcctggaaaagtatttagaagtgcatttgaagttccggcgggcatgatcaaacgtttcatgcattttgctgagcccatgtctgcggaagcgcagggtggcaaaaccgggagacagatgtgacgcgtggcctaccataaatgcggcagtatctatgtgcatctaatggcaaggtacctcgctttgttccctctctaaacgccacactttatcttcattcgaagttactgtccagcgactttccgagtcaggtgtgtagaaatctcattcgaactgaaggcatgtgtctcgtctgtgcggagcgttggcctgccacacagaaactccatagcttttcgcaggtctcgcgtccggtcattatcttgctccgatatgaagagaataaaccactcgtgtacttttgcgcttgaaacagcactggtctccttcatttccgcattctcaatccagaaactgccaatgtcggtgttcctttctcaacagcggtcgacgcgggacccgagcatatcgcagaaagcgccgagtcccgcgtacaactgaaatgaggaaacagcggatggcgaaagcgcggcacagaaacgtactggattcgctacgttagagcgtactgtcttctgtccaagcaactggaggatggtaatgacttaccactcgagaaaccagcagaggtgcgggcgttccgcgggagggatccctacgacacgcgcttcgtcttctaagacattccacctttctgccttgacagaa

SEQ ID NO: 2972 - DNA, 2376 bp, Toxoplasma gondii
  source 1..2376: mol_type = genomic DNA
acaaaaggagaacaattttgcacaaaaacgcacaggcggcaccagcagacgccgagtgtttaatgtggtaaacagtgaacctgaaaatgcgactacttgctcaacagttggtgacagtgaagaaacacggcacacctctctctcatatgtttttaatcttgccaggcagttggcacgcgcacgggcttccacatcgccgtgaacacagcaccaggaccaagtgcatcaaccagtggcacaccatgctaattcatttctggcaacgacgtgtttgcttcgcgctagtgcctaatctcatcgctggcattgaacgcagtggtctatcaccgtggcttacgatacctttgccaatactctggaatagcttccgcgacccattaaaccaaagcaaatcatttttacattcttacgacacgtacctggtgcttgactacccgtttgcaacgggttgagaaaaaagactggctgatgtcctgggctgacacaagctaatatgccaaccgcatcaactgttagctccacgttcttggggatggccaaagacgttggagggacggaaattagaatgggctgaaatttccagctaggataatggagcggtgcgaaatggtacgcagtaggaccttcatcatcttcatccacagacaacagctggacaaagctgtacacagcttctaaaaaacgaccagacaaaacagaagacccaagtagtaacggttagtggtgaacggcagcttctgatcacagcgaaagaaacgtgcacctatcctttgtacacagaaaccaagatgtgtcgaaacatccaattgctcctctattggcactgtaaaaacaaaataatattacagactcgtcttactactaaagtccgtatgctccactaaaacgaaggcccccacagtcctgacgaatgtagaaactcgacaacagagatagcgcgaactctggactcaaccacgcatacgcgtagttggtgagagaatcaaagccttatcccagtcctcaggcacctttaccctgtcccaaataagcactgctgatctctcatctctcagacgagttctctgcgtgatttgaacaacgcagacggcaccgccgtccacccgtaaacagcacgctgtcgcacgaacctatcagtcacatcacttaccggcagcacaaatcccgcaatcgataaaggtcccctgcgcgctcgtcaggacaacctgctccgctgtttgaagaacgtagccttgagcattcagataatgctcataagcttcgacagtcttggtatcaaacatatcgtacaccgacgggatacgcgcctgatttctgaacgccgtgtcaacactcccgtgatgcctgtctatacccatttgtgaaagagcctctctggttgtgaaaacaatttcatatgctgctgagggcgcaatgccgtgccacgtgggatcgcaccgcacgtcgtctgtagaggtggtaacaatgccattgtcgttctcccccttgatgactgttgatccttcctttttttctacatgctcgcgcagccttgcctgcccacgttccgctcctggtgagatggaatctacaccatatacaacggcttcgtggaaaagaattacagacagaacagcgtaaattgctcgatgtttcagcgatttgagaggtttcattatgagtggcagggttcttcaagcgacgaaaaccgaccccgactcgggtatgtcgccaaacgaaaaatatgcaaacttcggatccagctgaggcttccaaactgcattatcatgggacgtgcttctatacatctgttttaatcccgactaccccttccagccactcggacagtttgcaactcacacggcaagacggactcctctaacggggcttttccattatctcgataagtcttcgacaacccttatcttttgttctcagtgggcacagactgcagttttgctgctgcgagactgcccacccaacttttgaattgagacgagacgcgtgcgatgccgtatctcagccctcggaggattgaaaattgtcagttcccgttccctcaagcttatacggtgaagctacacgaaacgctatttgtcccaatgaacgggtgcttggcaaactcgttgtttcgcatgcaggagcacccggtttgtgtgtttaccatgtgcagcggaatgccacgtaaaagtgagtgaccacactgagtgtatgcaggctgacacaagttcgtcggttttcacgagacacgcaaaggcgcaattcgacttctggacccgccagagctttttcaacattgcttatgtcatgttgctcaagactgcggagcggacggtcacggtcagcccttaactaaggggaaaaatgaagcacctcgaagctagccgtgatgaggca

SEQ ID NO: 2973 - DNA, 4335 bp, Toxoplasma gondii
  source 1..4335: mol_type = genomic DNA
ccgattaaacgccgttgctcctcgagtgctctctctttgtctctttttccgtccccttcggcctctcttctctggtcagagcgtgaaggaatttcgtggagggtgttcccttgcaaattgaaagttgcgcttttgccttccttgtgccttgccgcggctgcgggtcgctcgcgctcttcatccccgagtttccccagcttcgcgccgtgtcggaaacgcgaagtagcaggaggtttcgcgacgccttttccatcacctggctggtgagaaagaacagggaaatgccggatctcttgagagctgcctctcgagtttggcgcagcctcctgttcttgcgactccgggaggggatgcgaaatgacagacgcagaagagaaactctccggatccaagtgaatcacgtctctcgaagtctgccactcgcgagaaacagcctcttttctgccctccatttggcgccaagcgagcgttggatggaccttctaggaaaaacgcaacggacgacacccgaagcaagagccgctgcgccgacaacactcagaaattcatgctgcccctgtctgtgcactgactgcctacagtttcacaccgaatttagatacgcgaacgaaagagacggatgtaaagaccattcgcaatggaaaagcggttgctgcttttggagacgaacgcaacgcactagatctcgaaatgtcagaagcaagaataccaacgcggtcggggcattctgcgatccctgcacaggcctgctgcgtggcctccagtcacgcaaggggcaaagctgaaacgagaaatccaactccgtgactgatgaacttttccgccaaggcacttttcactaaggcacaaaattcggctttcaaaggtttcaccaataaaggcgcgatcgagtaaggcgggggaagccattgaccgagaatgtctgacgtgcgtcacgcggggaaaaatgccaatgaatccgcatggagtacactgcagcaccttttgctgtggaaatctgttgtcagaaagctcgaaaacgggaaaaaggaacgaaacaatctgttcttaacctgggccttctggcgcctttgagtggcatggagcaagcgagagctacaacgaaaaacgcgtttgaaagcgagacttcttgacggatggtcctttgactcttggaaactcgagaccttctgggcaaaatcataatcgaagatcgcgactcatcaggcggtttcatgaatcggaaaccgggagaaaaactttaacggggctgtggtaagctagaaccgaacgcacgcgatatgtccatgaggagcttcagatggaaagctggttatcacagcagcggatcgcatgcgagacaaaggcattaaaagaggcgtagggctgcggaaaagccgtccagtgattcggtcgtctcttgctgtcgaaaactggctgagctcgcgacggcactctgcatgtttgtcgtgcatgcgacttcgaagtcagcatgcttgattttttcctaggccccggatggctggcggcaactgtctcgaataatgtctactgtcactctagaaaaagcgggtattgaagttagtgccgaagtgttttttccctccaagtctctctatgtactgcgacagcgtccggaaggctgcttctgtgaagcttccggataaatttgaacgctctcacacagcaccgacatgaccacaagctgctgggtacgtaattaacaagccaacggagcaaagggtacgcgtagaggaaacgtgaaacgtatcggccggcatcgaagaggaaagaaatgaatcagtaggcacagtttgacgagcaatcgttgtcctcactgctacacagttgcaacaggtatttgatgcccggagacagcacgttgtcgaggaattggaatgcacgtagatacagcgcaaattccgaatgcacatgtctgccattgcatcacgcatctgctcgaaacctaaagtagggtgcatagataatcttcagctgtgtctattctcttgtatgtggttgaggacggatgaatgctctgccggacgttattaacaccgttcatcgagtgctagaggcatgtatggatgctgccagatgtctgagagaaacactcctttccgctgcgtacatcggaactctggaagtatgaaaagagccgcacaccttccaacaggggcacgaagtcctctcaccgcaatgaaacacgacaactgaaccaccccggtccttgacaaccgttcggtttggttcagtgaatgatgctcccgcttgtggctgctggatgtttcccgattaccccttgataaatgaagcaaacttatctcattgttcaagaaatcactccagttccctttgttccagacacagttgtagctagtgtcacaatgccgctgtcgtactaggtgaatattttcagtccgcaaaagcagtaccgcgttcgtcacccacagtttcagtatgtggctttgcacggcattgaccccattctagcggcaaacaaggcattagctcatgtagcccgcggcccgtttgtttttcgtatttcgtgcggcccagcggcccaggtatcgggtaagaacagatctaatctacatgatctacagatcctcggcagacaggtgtcagcaacacgaaacaagtaacgcttgaaaagatgtctctcaaagcctcccttagctgacagaaagtcgcgaagacgcatgagtgggtggagcaaaaatattggagaactcgtacctgttctacacattacaacgggacggggttcgaaccccgttgtcagctaaccacctgtcgccatttttcccatagcaggtccgtacctccgggaaggctttctggtggaagatgtattgttgcaagggtgggagacatcccttcagctctagaaaagccacttttccgtttttcgccttttcctgagcgctacggacacacaattgctaggcagtgacgtggctgcagatcctctgcggacaagcagccaagcgcttcccagagttaccagccactaatggtgagcttttcatagttgcggaagtgcagaacaagaaatcagtttccaccatgtcgtagaaagcctttctatttctccttgaggggccccgataaatgcgcatgcagccaatgcgaaaagcctctgtgccgccaaacaccagtctccgtctccaggcgccccatctcccaaccaatatttgtcttggtcgccctttagacattcagcactaactgcaacagccgctacttggttttgctgtaacctaatcttgcttcgccagtttacactgcctgggctcttgctagtggcagccgtaagctcgttacacatgtcctgcacgttgatttcctcgctcatccatccttgttttgtgactgattgcctacccatcgccaacagcagactgtgggctgagagttatattatgccgaggcgatatgtttctggatagtgggtgtgcacacacttggttatcattcaagatgcatcccttgtgtgtttttccaccaagcaggaatctcagtgctcttggagtgttgtaggtgttcttcatgatacttgcatcacttgtgagccgtgcctatgtacgaaatagacatagctgcctgtcaatgcaaaaacccctcttcatgtgtcttggcagaagttaattacctcatttacagctgcggacagagctggggcatatgctcggcacctgcagttccttcttgattgggtgtagaaatttttctccctagtgtctggttgaggcaaccacgtattagggccacttatctggctggtaactgctagccttgtcccctcgcttgctcggggggccgagtaccgatgacttttgtgaagctggaagcctctctcggtagtacaatcttccggaccgctccacgtattttgggtttgttaacgtaggtgccatgccaccgacaaagcccctttcaagcaaaagtcagtcaccatgggagacccttctcccgtcgggcaggccgtcagacgcagctccgccgatttgcgctcttcgggtcatcctttgcaagaaacgaccgaaggagaaacaagagaagcaactgctaagcagcggtctcccacctctaggccgacagcgtcttttactggccgaggacggaatacatcaagcattaaatgggccggagagcagggatgcgcagcccgagtcaggaaggctcgggtgaagagatccgcggcatcttccggtagaagcgacccgggaactcgtggaaagttcctttctcctgctgccagagacaggcacgtttattccaatctctcattctctctcggtaatcaaaccgagtctcttattagcggtggtactgcaaccgtggtcaaaagca

SEQ ID NO: 2974 - DNA, 1886 bp, Toxoplasma gondii
  source 1..1886: mol_type = genomic DNA
ctgtcttgagcagtcctgttttagctcactcctcgactcgaaattcatatatatagatatatagatatatacatacatatatatgcactgtctacgtatgaattgatagagatacacatgaagtatacgggggaaattttgcccaagtattcatagatagagaaaagcgaaggaaaatatagctagatatatatacgtatatacatatatatatatatatatatggaaatgccaatgtgtgtttgtggcgcattttctctcttgccgtttgatagatttccaaagtgtttaaggtggaaatcagtttctgttgtgaagagaaatgtctttctttctcgagtgcctcaaggtttttaaggcgctactttcagcttccggacggttcgacaacgatgccggctgccggcgaaatcgagacgcagaagtccagttcgccgaccagaagcagtgcgaagaaatgcgaatgtgaaggagcgacagacgaggcagattcgctccagtcactcgcgacacagggagctcgcatctcctcgactgtctgtccagcttggagaaagcgcagaagagacgcgacgtcaatccagagagaaagagagcgcaggagagagggagacgcagcggagaagaagaagaggagagagtcgaagaacagagaggaagagacacttgcaggtcggggaggaacagagagagagacagaagaacggagagagacagaagaacggagagagacagaagaacggagagagacagaagaacggagagagacagaagaacggagagagacagaagaacggagagagacagaagaacggagagagacagaagaacggagagagacagaagaacggagagagacagaagaacggagacaaggaagagggagagagtagagaagaagcggtggcactcagtacctttgcaagcttggttctcgaagacatgctttcgtcgtttcttgactctcacctgaaaactggtcgtcaaccttctttttctcgtcaaaaaatgcgttcgtgtttgggccggagttaaaaatatgtgcatgcgagcgcatgcatgtttcgcggaccgcaaacgagcgacgcgccagagtggttttctgggcctctggacgactgaaaaatggcgccgaagagctctgagtccgcaaatgaaatcttttgtccagtccagaaaggcattcgcgaaaaacgcgacttttcgctccacggaactgtgtcatccacgagtccccggagcacgagcgctgccagctgcgattccaagttgagtgaaccgcgttgaactgcagctccagctctgcctcagagactcccgcagatcctttctatacccagtcctccagtttttgtaaacggaactgtctcttcgcctgcctctatcccccatctctgctgcatgtgcatatggactagcgcgctcaggtacacctacatgcgtctgtactcaactatctatgcttgtgcatctgtaaatctttttttttatcaatttgtacatctgttgtgaccgaattgctttgtgacatgggtgtgtctcggtagcggcttgtatttgtgcgatgaaggagacaggcttgctttgtctgttccctcttttttccgtttttcaactcacaaccgttcttttcttctctgaacttcacctctctcgctctcctcttttcttttttattcgtcgcgtctgttcttcgccgcctctctcgcgccgagcttctgttggcttttgcatgcagcgacaagtaggaaaaaaatctggagggcgagacgtttccggagacgcgcttcagaaagaaacgctctcgaaaaagaaggcgtctgcacatcttaaacaatgacttgacaagcatttttccgaaaggtggaacagacgctccccgagga

SEQ ID NO: 2975 - DNA, 1040 bp, Toxoplasma gondii
  source 1..1040: mol_type = genomic DNA
cacatgccacgatctggacctcccttccactacaccggaaagagccaatgctcctcgacaaatacgcatatacatatatacatatatataaatatatatatatatacctaaatgcatgaatagcgatacctaaatgcatgaatttattcatataaatgaataaatatgtgaatatgcatgtggctacatacaggcatacgtatatatatatatatatatatatatatatttgtatgcaagtggaaagatgtgactgcagatatgtataagaattagtatacatgcgcataaatgactgcatatagatgcattatgcatatgtttgatgcatgcaaatgttcggttgaaaacggcctcctgccagcgaaatgttgcccgttgggcttttcgctttccacctgtgaagattcacgaaggactgttctgagcatttgcaagtacagaggccttcagacgcttggtggaaagcctttctcgcgagagaaacaaacagagtcgaaggagctgctcgagagacttcatcgatgtttaacggagacaagacgaatttccaaggctcagcggaagacacaccgttaggggagagggtcggagtcgccattgctgcgatttctctcgagaagagggggggaatcggagaggaaacggcgagaagaaggagaaagaggagtgagcaacgtctgccagagtggagagggtcctcttggaaggtccgcgagattcgctcgtagagaagccgcgcgaagcgactgaagaagaggagagccaaaggctctcgtgagagggttgtgttctgaagaagacgaagaccggcaaggaatctttctgtcctttaccatggcacagtgtcttcacggcgaaacggcagagtggacgagggagcgcttttcgagtctcttcgcggttcgctcttgcgcgccttcgagactcgctgcaaaacgaaggaacactgaggaacaaagaagagcaggagacgaaagagaagatacggagacgaagccggaaagaaagacgacgcagcaggagaagacggtcacgca

SEQ ID NO: 2976 - DNA, 4320 bp, Toxoplasma gondii
  source 1..4320: mol_type = genomic DNA
gtgctagatgttctgtcgttctcggcccagttggccaacgtttttctcctcgcgtgtgacttaggttgccaggtctgcttgccttttgggattagagaagtgccaagaaaaacatattttgtctggaggcctcgatgctcaatcgaggcgaacaggttccattccaggagtctcgctcgtggtttcaggtatcacttgcgtcttgcttttcagccttcccgttgcttgcgcctcagtacacgtcggcgagagcttgctagccaccagtcaacctttttgaaacaaataccaaatctttggatatttatgcgacactgaatgcattggattttcccgtataatccaatgttaacttcaccgtaaacaatcctgattcagttagactcgagtttgacggaaaacagccgtatcccagttgtgtttgcatcgtgtttgccaggctgtgaggtacaaaagccatcttttcgagcgcctgtacccatggagtcgtttcgctggggtcagcaaaacctttggctgccctgcggccttcgctgcggccgccaggcaagcggcgggaagttccgcagcagaacaggctgctgaggcaggcgttgaggaactcgcgtccatggagaagtttgcgcagggaggggacaacgtgtccgtcccagccgagtgggaaagcgagagttctacagagccggcagaggctgcgagaaaagtgtatgtgacagaagctgctgaacgtcagactcctcagctggagcttatctacgctttcgacgaggacttggtaagtcttgagtgactatgcttcgatagaatgcaaggtttcaaaggtccactacactggagtgcttgaccacggcgttatctaaaatgtcccgcttacgggaaatcaaatcttctcgtaccactaggaagtgttgtatgtaatgcgtgactgatatctgaatttcaaacgggggcaatttgagtgttcgatcacccctaatttgcgctttgagttgggttctgagtttccaaactggtgatcattaactgaatcgtgagggttccgcgaacaggaagaatgacggctgctttgggcgtcttgatgcatgctgcagattcgtattcatccttgctttggctacctcgccgtgggtgtggacgacgttccgagagcagtggcgacctttcaggtcaatgcaccgaagcgtaaaccgaagaaattacggaaaaacaacggtgatgatgatgacgatgacgatgacgaagttgatgacgatgacgaagtggatgccacaggggagacaacaacagcgggatgcagcgctggctctggaggcagctgtgatagggcaaccagtcagagttcgacagagaccgaatgttccgcaagccatcaagcagaggcgattgccgcagctttcaggggaaagttggaagaaaccgggctgtcgctggatcgagccatggtcgaagatagagacgggtatcccattttgctgatgagcatgcgccgtgctcagcagtattacgccgacctccacagtagtcttcgtcaacaccgcgccgctttgacggagggcacaggccagcatgagtaggcgcgtttgtggtcgtgaattcgattccagcgtaactactattgtgtaaatgcaaatccaggtcgagctgacagcaaaacgcacactgcacagcgacaaactgtgtggcatttttagctcccgtgcagcatgaggtccactttcatacatcttaattagttttgaggacactcgtgctctggaactaagaaacgtgcagagccccacgctcggtctgaattatgcatgacaggaacggcagtatctttgaaactgcttacctaggtgacgcgagcgggcctccatgcagcctccggcataaaactggaatcccacggtgttccgccttcattttggggccttaaagttgtcgttcgaattggaaatcacccggaggaacagggatgagcaaagaggtcgcatgaaattgtttgacctctgtagtttctacgtgctgtggcgttgccctggtcactggcaggtattttcggttatcagtggggaaatcgagcggtgcttcgaatgaatttgcgctcctggactgccatccgaatttttgtggatgagacactacaggtgaaattctgtgcatgaggcaatacacattgtaaaatactgatggcaatcgggaatccacagcaggcagtgcccctttttaagggatattttgagttgatgatgtgggctttgaaaatggaagcctgaaaacagaggcaatcagcaagttcggagctatcctgcgaacctcgaagtggtggaggctacagttgtacgattgcgctatagcgccgtgaggaactgcacgaatgcttgttcctcttgatttgtgcaaaaatgcactgagcctcgaaacatgaatcattgttttgaccggtacagaagaaaactttctggaaataactctgtcacggcaacacctcggctgagcaccgtaagcaggctgtttatcttctctcaactacgatgaggccgtattgcttgcagctttcagcatggttggagaatgctacaagcctaatctagacaatgccatgccgctcacgaagcaaccggataagacaaaatcatttctcaaacgcttttttgatgtaacgctataacagttcacctggcttgcaccgacgaatgccaataggcgtctcgtgacggtgactaggaacggtttcggcatttaagtccatgtaaacagaaagataacgtgggggccaagcggaaccaaatattgctaatttgatccgtttaataaagcaacttcttttgttgactagtggctcaaattgcgttagaagacggacgcggcgtgcgtgcgtggtcctgacggaaacactgtgtggcactccaccttcgctaatcctcttgaggggggttatgccgcagacgagcgaaaagccacatttcttctttacaacgaaagataccaaattagtgtcagccttatagaataaggtaatctactctgctcgtcggtgaatctggttccccatcacgtcaaccaccagtggcgaccttgtacccagtaccatcaccgacggctaggggggggttgggagggggtggacatctacttgcactccaaaaagccgggacaccatcttggtaataactcttgaagatgttaccatctgaacaccgacacgcgaacactcttggaagttgaagcttttttccttggcgcgtaaagttgacagcttctgccagagctgttcttgtgtgcagtgggctcgttgtcgcctcgcaggtcgttagcagctgactgagcggctggctgctgcagtggcttgattcttttaggcctcactggccagccccacaacagatatttcctttctaaacgtaaaccacgtcactctcgtgtatatcaaatctatgtttcaaaggtattctgcagttttaatctgtcagccttctggatgacatgacctcccctggaagcctgtcttctgggagaatactcatcaaggactgttgtcaggcgtctggtaaatctgctcccttttcagcgttctagtaataaagaatttaaagtcttttattatgcattttgggcgctaaccatgtcagtgtgcgctggcctaagcgacacagaaaagaccggcgctttgcatgcagccgacacacacagtccacaggtggctgcgtgaagagccgcgctagcctaagttacggccggcgtgaagccgggagctttactgcctccttttggagacgagtcttttctcgccctttctcgacgttccggcgacttgcaggcatgacttatcgcagtgtttaaggtcgtccgccgtggtcctcttcgcgctagctactgtatcccctggaattgaaccctagtgcactgtttcctcgctttctttgagcctacgaaagatgtctcgtatacccttgtaacgatcgccgctatcaagatactgatctcgactactccacctattttaaggattaacccgtgggagcttctgtgtcgccggcccttcgggacggtctttgcacatcggtggcccatgtccgtggtatagtatcgtgaatttcggtcttagaaggggaagcggaatgcgtcctgctcgaaattcgatccgtctctggtgtcgaatcctgtgagatttccttactacaacatagttgtgaggcggaaacacacggcgggacgtatatgcagtgagcgtacactcgaggtaacgctgtggctctatctcgactgcatagccctgccactcgcattgagaatgcttcatgcaatagaagcatttggacgcactcgtgggaacga

SEQ ID NO: 2977 - DNA, 2284 bp, Toxoplasma gondii
  source 1..2284: mol_type = genomic DNA
atccacatggtttgcttcagtggaagaatggtcaccgatttctgccggaggcacagtaccccaatcgactgaaagcatggacgagctttgagacctgatttcggctggggaaacgaacttcttttctagaggggaaccttaagagacctacggctgctacctcgcatttctactctgttgtatgcgcatagacagccttcttttccgacagagaactcttcgccattgtgactggagaagaagctcggagacaagggcaacggcgtgtgtctccctcgaagtcggtctcgtccccaacgggtcaccacacaggctgtttcagtgcatctcatggacctgtgcatctttctgtctcctgtctatttcttttctgctttcttcctgcacctctggtctcactttgtcggtttctcggttctctgtgtacagtcgaggagttctgtttctcagaaaccgtgtgacgaagtgtagcctcggatttcctttcttttgccttccttttctttgtcccaatcacccggatacgaaggcgctcttcactgagagaaccattcgcgaaacgagtcagcaaactcagctcggcaaagaagctcggaggccttcaaagacgcgggaagacttggcggcgcagtgtgtgtgtcagaggcaaggccttctacgcttcaggattggtctgcgatggcggggcgccaggaatcaaagggtcgtgaatgccctcgctctttttctttcttctcaatggtttatctcgctgacctctctgtttctttcctcttttcttctttgtctttattttcttctcttctgccttgtgtgccttccaattccctctcttttcctttcctttctttctcttgccttgtccttccttctctttctttctcttccctttccgcattcgcttccccagaactaaggcttccctttggcggagttctctctcagtcgctgacgactgcagccccgcacgagcctctcccttctctcttgcggcctgacagccaatcgcgttctcacagtctctctctctgtctggcgaagaacagaaacaggagcttgctctctggaactgccaggcatcccgcttgaagacagagaaagcgaggaagaagacgacacacgggggacagaggagcgtacaagcagagaagaaagagaaaagaaggagaaaagaagaagccaagagagatgaaacagagaagaaaaagcagagagagatgaagcagagaagaaagggagaagaaaaagaagagagatgagaaggagagatgagaaggagagatgaaaaagaaaagagatatgagaaagaaaagagatatgagaaagagagaagaaatggagaagaaggagagatgaacaagacatgaaaacgagaagaaagagaagatcttttttctcgttttggggtaacgaccttgagagtgcaggcgccagtgtctcgcagttcaccgtgcatttgtctggcgagaggagagcatcacacgcaccgagcacagattttcttgtgcgttctttcatgatttctcctgtttttttttggagagtctggaacagcgtcgtcaccggcaaagaaagatttctcgccttctttctgctcgcggcgaaaccgcttctccctgccggccgtggtgttcctcctcgccagccagcgaaaacgcgcaagagctgcggtgacgaaccgatgacatcacatgcaacttgcaggcagacaagaacggcgaagcggccggctcagcatcggacagggaaatgtcttctccttttttttcgccgcttttttgaccgccgccttccacgctgtcgcacactctggaaaaggtctccgcgatcgccagttcgggatctactgtcggcgctttcttttttctcctgcgtgtagacacctcgacagactattcaaacagccatgcgcaaagctctccctttttagcatccagcttcttcctctttctccgttccgcctcctgcaaaacaacgccggagcgcctcgccttcgtctttctgcgcgacgaccgctgaagtcgctctctgaacgcgtcaaaatctcgacagcctcggtggacttcggcgccgccccgtgccaacgtttctctcgcatgacaagtccgtgcgtcaaagaagtcacgaactcgacggtgaggagccgcgctcgcctgccaagcctctccctcttctgcagtccactccacagggaatagacagcaaacgccttcttcgaggctatctgcagacaagcttcttcttctgcttgtctgatttcttctcccctccttcttcgccacaa

SEQ ID NO: 2978 - DNA, 3084 bp, Toxoplasma gondii
  source 1..3084: mol_type = genomic DNA
gtgtgacactctcgcgactttttagggccatggaatgcatagctgtctagccacacattcactagtcaattgcaggtatttgagcaaaggcagagatattctatgcaggatctgctgcgaggcaccgactccaccgtgctggtttttctgggtcaaatcgccgcggcagagatcggaagatacaacggcgtctctctctctctgagagttgaactaaaagcagttctgtacagcggcagacttggtcgagaaaaacacggttgtcacggatgctgtttgtgcagcacgcactccctgggcagctgtccagatgactagtcacgtgtcagtgcctccgcggtggtccagcacctggtgaggcaggaaacaaaaggcgagatctgcgcagagcttcttgcattcacaaagcgttcacttgtctaatcagtctgcgaactgcaagacgaaactccagaaagtctcgaaacatgacctgtgccgggcgcgcctctacactcgcagaaatcggcgattcgcggcaaaggctcacgcccagaagtcacacgtttttgcagccgagtgagatggcgaggaaagcacgtggagattcaatcaagagtgatgggcctgtacgcgagcactgagatgggggatcacgtcgtccacagagagatggtcacaacaaaagcgcttgttggcttccactcagcgtttgctcccggatgaaacagcatccccgccgcggaacttttagaaaaacccaggtcagacctctcagttgtttgcagaactctagctccacgtgtacagtctccgcctcatgtggtgtgaaagtctgaatagggaaccagctgtctccagatgttcttctccgggaccggagagcagttttgagtctggcaacacgaacgacagaagagtttccaagaagacaacttctctttagctaagtggaaacggtttctcattccctgagagaatccccagggtttccaacttcaacacgaatttttctcccaacacgagaacgtctcctgtagttcctcacgcgtttgtatgtgataggaggggcgcaagacactgaggcggatgcgctatgaaagcaagtgcagagatcggtggaccccgtcctttactttccggtttgagcatccatttgtctgcactcacttcccctccctcgccgtcaggatgacctcaaaggcccgagaagccatgtggtcggagcggagaacgggacaccagactgattttggctgaagagtatatacaagttgattctatagaaattaccgctgccgaactggaaactccagtcgaggatacacgccctacacctgccgtatccagtgaccattcgcgtaagtggttccattcaagtaaatggtaccgggggtgttgtctgcggtaaaccgcgttgttacgagagtgacgtttgccagtgaaccgagcctctgtttgatgccttctgtatgggacccgtgaacaggaaacggtggtgttcgttgtcgcagaaacaacggtgtttcgtggttaaactacagtggtcgtaaacggataaaagcgaatatcggtggctgccaacaacatactgcaggagtcacacactttgtgtttgcatgcactttgacgaaaccgcaacgcatccatcagccgaaaagcaggggaaggtaagcggcgactctacttctagcagcgaaaacgctttgactcaatcccgtcgaacaggtgtttcgtttcacgcacggggactggagaagatctgctcgcgtgtatcaaacagggagttccgcgcctggagggcgaagatatgctccggggaacgtgcaagcgaagcattcgaggaaaaaagagacggctacaagtctttacagaaatctgacccggaaactgatgtttctgcatcacgcctgcgccaaaagtgacctgccagcccggcgccggggtgtaggtacactgccgcgacagccgactagcgagcaactcgcagcttccacttttcagacaacgtgagttccccgtcaaatcacgacaagcttttcgtgtagacgatcggcagacagcgatgtctttctacgcagagtctcagcgggaattaagcagaccggacgccgtcgaccggcagcgttctgtgaaagctgcggtggtaatactttttccacgtcaacaaaaatgtgggtctgggcggcttaagttgtgtgcagctcccttctctcaggaagccagaggaaaagcgttgggtcaagcacagaacgacgtggaaaggcgtttcaaaagtgtcttgactgagtgggcatcgaggcttcagccgacagccggtagaagcacgcgttgtgcatgcatgctcctggccgcctaagagcaacgttcacgggaagttcccaagtctgggagcaaacagtttcgctatttcttgtgatttcctcctcaccttttcagcgcttgtgttgtggagcatccctctgtcgggagctctgcctgaaacgcccagcttctgttcgccaagcgctgcggtaccgactcaccgaccgacttctcctccggtggacgtcgtctccctcttttcttttgaacgtttttgtctttagagaacctggcaaaaactctctggagacttgcgaggacaaaagctctttcgactcttgcgctgacacgccacaagatacttgtggctctcgacatggatcgtcactacgagcgagtctggtcccttgttttcagttctgtgtcttttgcgacaaagatttcctcatcccctctgtctgaactctcccgcaacacccgaaaatttctccgcagaagacacattgcctgactgtgcacgtgggggctgaaagccgacagccgccgtgtgttggcggaaagaagaaagggcgagagacacatcgccgggaccattgcagaaagccgccactctcgggaaactgtttcatctttgatggatttccagaagggtgtcttacgcagagaagagaactttttatcagcagccaccatggggacacggagcgtcctgtgtcttctgcaaagctgaaaagtcgagcccgttttaagttcctgtccaaagctccttcaaggtgtctgctacttctctcgaggccacga

SEQ ID NO: 2979 - DNA, 1847 bp, Toxoplasma gondii
  source 1..1847: mol_type = genomic DNA
accggcagaagtgacgcgtgccacatttttcgtttgattacataagctttttctgggggcacctccgtccgcgccggcatttccgatcaattcctggcgggccgctgagggttcgagaattagtgggtagaaaagcaacggaacgaagagctacctttccctggcttgcgcttcgagttgaaataaatagtattggctttcgtatgtgaggatttaatgcgtttggcacactggttacacggattcctagagtttttcgtctcctgactccggtggacgttctatttggattagcacgagctaagtgaagcgcgaacattcacacgcttcgacaacttggtgatgcaccttctgtggcgtcttgctgcgctaactatctgtccaggaacgaaccgtttctctactctttcagttccattctgagtttacgtttctgtttaagctgcacctggtagacttcaagagttgactgaatgcggcgtagggctaccggggttgatatagtgaccaggcggcacccatgacagaggttctttctttctaggaagcagccgcttcgaaaaagactctccgtggatttccaggggtttcttgtgagacttttactgtagattttttacttgaggcgccgtgcaacattcaaaaccactcccgcgcgaggcacaggcaagatacatacatctcgcggagtttcacgatccacgccacaacacgatgctcagttccactacagaagtgtcgccttcttccgttctgtcttctgtcatttcggccagtagatgtttttcagtccgtgaagcctccggggagggaagggcattcgagacgaagtgtgaggagagccgtataggacgctcggtgaaaggtggtgcgctcaagaactgagattttgatgtacagtgattaattgtttccacctgttcctcaaagttgttactcgctatgctctgacgtataacaaacataacggaaaattgtaaacgtatagagatgtaaatatatatatcaacatatgtacacgtataaagatatacatatgcgtgcagttcacatgcatgtgcatgtagtcattcgcaggcgcgatggggacacacacaactgcaaataacaacctttagttcagttcatgaaagccacgactgcaaccaacaataacggttttttggtgagtgacgcaggttcatcaccttttattagggctacaggcgtgaacccattcgaaaacgaccctgtgacagagcgcccgaagagcggctatcttttcctcggcagaatctatctgtcgttgtacgtgcagagcggacacgaggtttagcggttcttgtggtcttgcatgaatccactttcaagtgtttcgtctcttgtcttttcttctttcgccagacatgcacattctagcggaatttcgtggtttcatagtctctgacctgcatcggcgagacattcaaatgtgcatgcccccaattgcatcgccggccgttctcaaaacgcatcgaaatttccatctgtctacatcgtttttctcctcttttgtcattttcctagtcttcacactcgccgttttctccttttctacttatcttctgtagaaagttctctacgcccgtcttccccgtgcttctcaacgtctgcaaatcgacatcctgcgcgtgtgtcgacgttttccgcgcagcagatcgccgcacttttttccttctccgtcagtgccgctattccactcttacattgtcccccatatcaaccatctttatttgattccctttgctcgtttcgtttttgttggttcccttttttcacccgcactgtcccatgttctctgtcccgtttgtcgcgctttgacgccgcga

SEQ ID NO: 2980 - DNA, 4003 bp, Toxoplasma gondii
  source 1..4003: mol_type = genomic DNA
aagttattcctttctgggagtgtagaactgcttccaccgcactcgcgtgcggagtgctggtgctcgcggtacctctggttccgaggcgatgggtcactaatgggcttgctctgttcaggagccgaagcagagtcctctgaagctcctaagttcgtattatgagcgaaaatgttgacaagagctttttctgaccccccggcgctatctgggaacgatacgttcgcagatgggacgttctcatcggggcgtcgaggggaagacaccgacgaagcagcttcgagcagcgttcgaggtggagagcatccggaaagaggagagttctccgagggagaaaggctttctgtttcagcgcggtcatcaaacagtcgacaatcgacggctgattcagaatgtgcttttctgtgagcaggcgatggtgacgcagacgggtacggtgagctagagggtgaggaggaaggtgtaggagggaggaagcatggggaggggaacagatcctcgatcattgtgtcaacaaggaaatgaaggtgaggcgtgacgaaccaaagaagcagcccgcgtagacggctcactgtgcttctccctctcaggttgtccctctcttcgcctgggagccagcaagaatgcgccccgtgatatgaaaggaaaaaagtccgacacctttctctacagaaaaaacgagcttctttctgacgcaacgtgcctacgctgggtattggacagcgggagaacgtgaggagccacgaaagtgaagtggagacaaaacagcaccaagtcaggcctactcgttgatgcaggctcaccgtgggagttttacagaaagaaggatgcaatgtatcgcagtaggaagttcatgtctaggatagaagccgcgacaacggcccgtcacactgatggctcggacacagccgagcaccagcgtataaggatactcatactcacccgaaagcagtggccttccagttcactaccacggaaacggttccaaaacaaggatggaataccttcatatcgaatccagtttgcataaacaacagggaaaaatcacaaagaagaatgacaaacagaggggggaggtcgtgcgatatggtgtcgccgactgccctctacgtcgcgtgctgacgtggcgacttggtgtgccgtgcactaaaattgggagcgaagcgatcctaaggtttcttccatgttgtttgtcatcgataaaatagagaaaaggggactcgccacggtcaagacaagggagacggtccattctttccgcgagtgagcgtttctttgcgcggtgtctcggtggtaccaccacggtctacaccctcccattgaggttcccctcctgcgaatattctcaagacattcgggggtatctgtccgttaaacaacgggtactaaaaaaacagggaagctttggctcccagcgattattccatgcgagatgcagatgtttgcacgcgaactaagtcaggaaaatgcgcatattcctatgaacacacataatttcttctgatacttttcagcaaccccacctcctccccgccccctctcacgggtgactctttgcgccgtgggtggctttttacatggtgaaatcagttggctatatttgccagcggaatggaaggccccacgatgaccatgcttatctgtggtgattgggaaaacagtcgcgaagatgtgcccaagagctcgttccgtattgatggtgtgagtttgggcgtttttcagacagtcttcgcgaaggtggttgttcacgtcagagaaataccagtacgtgaatgagtaactatcataattcgacagtggtatcgcaacaagacgctgggcagcgaacgaccaggaagacctgtacaggacttgcttgaggtggttgacgaagaagcgagagacagcacaaatgctgtttcacagacaagcggccgcgtagaatctctagggaactgttcggtccgctatatcaacactaaaaggcgcctgctgtgtcttcaccagcggagaggaaaacacttgccagactgtagaggaaagcctacgactacactacttaaatgcaaagccgtcactacatgcatgcgcctcctgactctacggttgcttatataagtggaggcaatggccaacggattctcttcggaacattactactaggaagtaaatttcattccacgttctccagacaggcgtcataagcacagtttaatgcccagagcaccaaagcacatggtacgtgatactcgacacctcggcagttcatttgaccaaaccaatcaagtgtgcaaaacctggtcccaataaacgtgtataacgcccccccccccatgtgagctatgagaggtgttaaaacaaaatccatatacaaccagaaggaaggagcgacacgccattcgtgatacgtacaaggtaagcgcattctcgcgaatgcaaattcctttacattttgcgccgctgaggtgggctcatgcttatgcaggacagttgcacgcccctcgagggtcgaagaacatctgcgtgtaggcttcagtaagaaggcacaagcagtgtcacaggcgcatgcacgaaaaacagttgcggcacgatccaaggtaccagaccatgccacagcaagcgtcagggtttgcttcccatgacaggccgtgccttatgctttcggtaaaagcgttctccacaggggatgggggggactggaagcaaagtacagtccccggcttcctcgaagagagtggcgccatataactcggcagaaagaatgctgaaggcgtctggcacaatgttgtgtattactgtttaccaacctggaaaaaatccggatgtcttattgctgctgttgaacgtgcaaagccagacacgggtgcgctggtgcactacccacaggagacaggtacacgtacagctacacctacaagccacgtttcaacgaaccaccttctctgtgcacagtatgagctctcattatcagctaactaacaacgttatggcgtcgcaggctgcaggtagcactaaaataaagtggaacaagtagtggcattttttctacatcgctacatacctgccacttattgaacgtagcatgtctcgcagctgaatgaagctgtccggtttttgtctgtcccactgtaaaaagaccaagactagctcattcgaaacgaccgtatgtcgttttttactccaaatgcagttggcacagttgtaattgattacacaaacataaaactggactttcaggaattcgaacccacctttcttcgatcaaaactcacagcgaaacgcaagtgcgggtcgggatggctttgagcatgaagtgagtgtgcagatcacgaggggaaaaactcgtgcgccactcgtcgtctgatcgaattcagttccacctcttctgcatgctccaagggcgtcgaaagtgaggaactacggaaagacaaggaagcatgtcaatgattgtagcgacgttaactgtttgccatcagcagaatggcgaatcaaagcaacttcacacccagcaaaaaaaaacggcctttacagaacgagaatagtgacgccggagcaggaggcgactgcatctgattgctgtgttgctgacgttagttagacaacgagccgtcgcattgcaatatcgctactgtgcgcgtagagcaattcgaacgaggcacacttctgccggatagtgtgtctgctgactgatttttcttttttttcgacgtatggatgcgagctgagaagtcgctgatgcttgttcatattcgtgttcgactatcaagtaacgaacttcgtgggcatcgaactgacgctcaattgttaacaaacaccgtgtatttctgcggctcataagggtgtcacacaaacgcgcgaaggcataagtggaatgcatcgacctcccacttttccgtagctgaatgattatcgcttcttccagttcaggtttaagcggtacgggagcgagttgagggaggcggcagacaggagtggggcctcagatgttccagttattcctactccagtagttgattgcgctccacga

SEQ ID NO: 2981 - DNA, 2235 bp, Toxoplasma gondii
  source 1..2235: mol_type = genomic DNA
gaccactgtcacgttttcgacagttgagtccaacgtgtttacctttccgctccgttgcaatctcaaaatacagtgaactggcagccaccccggaaaaactcagtcacgcaagggagacgagaaacgtggggactgaaagctcgaaatgtcagtggcatttcccccccaactcagcgctctcgctctgctgcacaaagcaagcaggttccttatattgttctagacagtatcacagcggagaagcaccagcgcattttccttggcagttctttccgtcaacttcttttcctcttgcgaaggcgaaagcacccccaagagccaactccagtgagatcgcagagcaagtgttcgtttatcttacgtggttgcgcacaaaagcggcaagcatatcagcctgctaacaacaatatcgtggagctgctgtgcctatgccatatagtgtcacaaaggaagcagacatcatctacagaagatcgactacagcgacaggccgaacgccgatccgtccgtcgccgtcatcgagcaagtcgccagagatccgagggacctacacggactgcacctgatacagtagcaggtgtccaaggaaatgtacccgtggggtgaattctgcgcgttgatgctgagaggtgagaccttgaaaaactgcacgagcgataatgggttatctaaaatcaacagaaccatgtcaatcgctgcaagggcccaaagagaagccgtacggtgccactgaattgagcacattactagatatgagtaaaatgcgagaacgggtctgcgatatctggagtgagcacgtgactctatgtcctctgttctgtgtgaaaaaagcaagaaatcaagtatacgaagcacgcttccgacgtcttgtagagagagttaagacaaacaggttatcgatgagcggtgacagtcgagtgcacttcccactggaagacccaacgaccaggagagaaagacaagaaaattatttcttgtgagccacctggagcacaggctgacgcccctcccagtggacgctgagggcatcgtagttgtatctcgtgggcgtgcgtaacttcatataaaagttgagacaaggcaacccacatccaaaacctcctacgcatgaacgactcaggttgactgataaagccaaacacaaatgaaaggagtgactgaggtaggcggtggcctcggaggtttaatctcatccgcgccctcccagctgatgcacacgtattgctagacagaatagatgttgtatcatttcctctgcccccctcgtacctagagccgtcagcaaaaatccaactccaccgattgcattttgcatatttgagaggcctgcttatatgtgaaatccccaccataagcccttcttgcataaacacaagttcgtttctcgcgaagaaaaggaatacgccccgtctctctgcggtagtgtcgcgcttatcctgacccgctttgcaagtgtgtcagcgtgtgcggcttttgtccaaacgtgttcaccggcaatctgagtgcgctgcgggatcgccgcggcatgcaaaaaggcgggcagcctagcaacatggtctgcagtccgggcagggacagaaaaggaccgatttgtggaaggttgataacgtttcttctgcgttagcgagatcaatccagcgtaggatcgttttttctcgcagatttgtcccccctcacgctgccactggaaatcgtgacgtactgctaccagaaacgggaccgcaattttcgtcaacgcgagtgtcgaacccggcgcctgcagtgcaccacagtgtcaagtaacaaacttttcctcattcgctttaatttcgcctctgtctgtacgtttttcctgtagcgtctctgtgagttccttttccttctcgtctcggcaccttcgctggctgcgctttcctttccgctccctgttgcgtgcacatgcaaccactgggctcgcaaggagatcctccgtaccgttcttcaagtctctcgccgtcttcgtctccgtgctgcactctcttgacaagttcgacttgcttatcaacaggacgcctagtgcatgtgcctgcgtcgcagacgaggctgatctcccaggcgttgctcgagcacctgtttttctcgttaccctgcagaagcacagccggcaccaccccgtggaacgttgctttttatccggttactgagacgcttttagtttgggtggggaaccagtagagcgtcgattgttcttctctgagtctctgtctcttgccagaa

SEQ ID NO: 2982 - DNA, 2694 bp, Toxoplasma gondii
  source 1..2694: mol_type = genomic DNA
tctgtgtagtgccgcgcttttcatgcttactacttgtcattctgttaagggcgataagtcctcttctccgtttacaacaggggttgcctgttttttagtccgtcatgtgatcacatctgtgaatgacgatttttgaactcgtgaccggtgttgtttcaagttaacgcggtgtgagatcgcccaggatgtgcaccgaaagacgagcagcgtcttgcttgaagtaaaagcgaaagttgcgttgtgaagctttcacccaagcaacaatcacgcttttcggaacagtggtttgatatcttcgcatacattcacatgttgtctgctttccgcggagagcgttctagcgacgcagacagtgtcttgcgatgccgacaagtgtgtccaccttaacctgtatcaaatcacaggtatcctggtttattggcgtactgtgtgtgtaggagtatggccatgcatcatgtacatgcacttgagtacgcgcaaatttgtaccgccagtagcggtggagcggtcgatatcgggacggcgttaggggtgagtctctgtggggcacagctggctttttcctcctgctggctttcatcggaagcagagatcgagtttactaggtgacatcgagaaaagaattttgccgattcacgacaccgtgtctgagtctttttttgtagaaaaaccctagtcggaaaacagttgaaagatcgccctccaatgacgtaaacggaggcgttctccgttcctcagcaccgaatagtcactctgttgtctgtacagatccaatttttccgtcgatgcggcagaataaaacgataagatccacatgcatatatttcagtctgtagttacatgtctaactatttattcgtaacgaatataatatatatacgtgcagatgcacacatttatgttgacaaaacttcagcactggaaagtgtaacatgtgcaactggccagcctctacttccagaactgtgcgggagcttcggaacaggcagttttattacttttgacctcatggcatcaattcttgtgtgtctgctgtacgtctttgaagcgtttgtgctgaatatgactcaaaatcttcaactctgtctcaacattccttgaccttggttacgctctttccgctgcttgacaccgcatctatcgctcgatcctcgtcttcagcctgccgttgctgcaggcgtgcgattgtttccgcaattccactttttgcaacacgtcttgtgtctctctcgtcctttgacgcttctctgatttgcatccttccacgccgccctactcattgttgtttttgtcgggacctctgcactggtcgtttggcgtgcactggtcttatcaggaaaccatctctgcatgtttctcattagagtacagaaaagacacgctcctatcactctgatgccgtctgaagaaccacaacggtctcacgtgtgcgggacttccgggacttggcccttcctcgtcagttccggtgactttatcaacccagcattacacgaaagaatggtgcctttcgctttagagcacacatttagcttttcgcgaagcctttccctcttcctcgttttttgactctttcattgcgccaccgctgtccgaatatcccctttcctcaacgaggattgctggccatttttcctacgcggacaatcaacgacccagagtaaccgaagtagtagtcgaggctgctcaatagttgactcattccccgaggatgtatccagtttttgttctgtcgaaacggtaaaggcaccaaaaatggaaaaattgaaaaatgataacagactcgcatgtcgacgaggatctcagcagcggataagccgtcctttcaagtagctgcgttctgctttttctcacgtcagctacgcacgcgcatgcgtggcgtctctctgacttgggaggtcagtacggtccttgtttgcattttctctgagtttccttttggcttttcttttgaacaagtcgtgagcatgcgtctgctcactccttgcttgactctcgtcgctccacgcttctaccgccgtgttacgagttttcacgattgcgtcgtccgcgtgctgtccgcgctgctctagcgtgtgaaagcgagaacccgagccgccattttttgaaactggagaagccaactgctcattttttcgcggcctcgagaactccccgaactcttcaattcgagggttgacagtttcccccgtcctttcgtctttttgctgccgtgcggactcccgcgtcgccatccgtaccttggcgtcttgtgtctttgtccgttacccccctgactctctcgttccctattccttttctgtccgcatacttgcattttctccgcactgaaagtagcttatccctgagctgtttcgaactttcctctcttcgtcgcccctcaactgttcgtttccctgctcaccgcaattcgtccgtgtacacaaaagtcagcccgtaatcccgacgcttatgtccacgctcctgaatgcctacctacagaatgcacatctaaggacaatgcgcgaccctttcctgtaggaagagtttggccgcagcctggctagagtgtgcctgtacccttttactatcgctgttagcatcttcagagtcttacccctcagttagagttaaggagccctttgtttacaacggtttgtttgagggtccctggcgtcgctctttgtgtctttcctcactttccagacgcgatca

SEQ ID NO: 2983 - DNA, 4468 bp, Toxoplasma gondii
  source 1..4468: mol_type = genomic DNA
aactgtctccacactttgtggatcgctgcctcctcctgggtactcaacggcgtcaccgccaaccgctgtacgtacaccttggcatacagcggcagcccgtcgtgcgagacagactgcagttctcgttctcctggatctgcggacacggggaacagtatcccttgcatgcgtcccctaatcgtgtcccctgtgtgttcagaggaaaagcatcgaccgcgttctgccgccgtaaaactttgtggcgcttccccttgtgaggctgcctctccagacgggtgtcgcgaaccctgtgccgcgggcgcatgttgatttcggtgccccgaaaataccagtctctccctctgcctacctgtatttcgagggagtgatgcgagatctctctgtatagaggtgttcgagactgccgggagttcttcttcgcaggacgggaaaccaggcaagttcgctggagactgcagcagagaagaaccccctctataaggtgcgtcggaaggtgagacgcacgctggcgaagctgtaggagacgaaggtgagaacggtgtcgaagaaacgtctgcccttttaagcggagcgcccaagggacgggcggagtctgccaggaggggggacgagccacgatttgaggaggacgcagacggaggatctgaaacaactggacacggaatcactctgacgggtttcgcctgaccgcctccaagccacgtccgagaagtgaacgcgtgagagtccagactcgacgaaaaggtggcttcctcctcgtcgtgctcgagcggcgacagtttgcaggggaactgtctggaggtttccagcctctcagaacacgacgattttgaagtccactgctccaccgattcctgctctcctcgctgacgccgtccgactctgtggccagccgaaaaagcaagtccgtggtttgagcacaacagagaccagagacgtccggtaatacgcacggcgttgtgaagagattgtgatttcatttcgacagacgcaaaccagcgaagttgtgcgcgatcctacccatcattgcctttctataggtgacctgcaaaagaaaaaagggcgcggagggaaaatttgcggcaaattcccacgttctagcagagggaatttcgccgtcacagctcgacagtgccccctcggggacgggataaccgcgaactgtgcatctgaaagccttctggacagaaagaccaagtcctacaaatcggtccctctgtatttagtgacaatggaagatgctgacaaaaagtaagcgtggtacaagcggacgactctgtattgaaatgggtgagaaaacaatgtgcgcagcttgacaacgacgagacggatacacacagtctaggtttctattgaactgaaaacgttttcacgctcccagattagaaacgcgcttcggaggaaaaacatgaaagcgtgttccctccgaaaaagattcacacattggccgcaacggtacgcaaatgagttggagaaaggctctcaaccggcggcggagacagctggtggactctagacagcagagacggcgttgccacgtatttgtgttgatccgcaagtggacgtgaatcctttgaagagatttctgaacctgcctctcgcacttaccctcttctgaaaaggaaagaaatcaaggacttcaacccgagggacgaatcattccttcctgtgacagttgcggtagcatcgggatagctcgagaagtcgagcttttcgcaaatcgcatacaggacgctcctctccggctcaagttctatgtagtgtcacggcgaaagcattaacgttttatctctagaggcaagcagctggccttctccagttaatggaaaaggtgccaggcgtgtacttgagaaaatccactgaacaaacccgcctggcgttacggaacagttagcgaactgcaatagcaccggagtggcgcattgggagggctgaccaggctccgccggactacacctgagaatcctctcgagaaaaaagtggtttcgcgaaacggaggaatctccaacgtagcctactctgtcagggtgtttgggaccgcacccttttgtgaactcgaagctatgccgttcactggcaagtgtgaaaccaacgaacaggaactaccgtgattaaggtttcccaagatagcaccggctaaaacatgactgaactgtacagtcataaatatataaagactgctgccaaatccactaccgtaacaaaagtagacggacctaaggacaccgtactgattccgaactgtcgatttatgggctgcacttcgtaaactctgtacaaagctggcactgagaaacttatggcgtactggatccatagtcgcattactttagggcctgccatccctggtatgagacactgaaaccagcgacctgttgcagaactctgtttctcagaagggtggcgtcagtgtcttcgttttctcgcatcacggagttgcgaaataaccgtcaatgtgcatttggtgattccggaatgaggcgcagatatacataaagatccacacgcttctacgtataggcaagaaacaggaaacttgcatgtgtgttatagagacaacagtctccagaacgggaagggtgctggaagtcaacgcgttgcacgggcagcaggagaaacggtgagatagtgttaaagccgttgtgttagtatggttccgaagactctatttagttgtgatagtctataccgggcacatgctgtcttttctcggagagcgatagatctaaatgcatcttatgattttggttcttaaccgtgtgccctggctacgttttgccaaccggggtttgtgaagcaaaaacagcgcagttctgaatcagcagaatgaagtatgggacagagctcttggtgcgcatcactgagaagcctccatctaactctagcgctaacgtatgtttctgtgtaatgaaattgaaagagtgcccccctgggtgtaatcaccacgagcgaaggactgtatattggtacgcctactctgcaggggtaacttctacggagaaggaatgcccgatgatctttggatcagtttgaagcagcccatgccgacgctctgtatagtggccgaaatctcagtttacagctgttttattggaaacgctacgtgatgtgatgcaatgcactgtcaatcgttccagtggaaagtgtttcagagagtagatcagatgtcatgaacctcgagaataccccccggaattaagcttctgctacgagcattcttctgatgggctaacgcgttgttgagacacgaagcaaaatctatcacatacatcgttcccgtacagtgtttctaccgagcacagaacgaaaggaatttaccagacaagatgccagattattcatctcaacagaaggacaacggcacgagttgcaggaatgtacagagcgcagcgccttccttgtggtgttgttcagtacgtctcggttctggtgagcgtgttcgagaacagtgaatacctcactaactgcgttgcgcgctcgtcctcagtaaaactacagtacttattccttgatacgtcgaatctatttacactccttgctaccatgattgtaacacctaccgctttttatccagttgcccttctttcggaagaagctgcattttctccacacgtcctcgaaccaactcacaaacgaattccatgctgaaaactgctcagcgcattcatctacagagacggttgttttgtgcttcaatagcgttttacccttcgtttgttttgcgttctcaaggcagccgaggtactcgatagggtactggagaaaagaagtctataatgcgtgcagccctcacaaactcctttgtccgtatgctggacgtatacgagtcaagcattggctatggtaaatagatttagagtaaagcaaacatcccggcggtagctaaatgactagcacaccagctatgcaatcaacgagtcacgtgaactgaaagggaggtctctctttattaaccgttgcactagtcccccgagagacttactctcacctcagcgggtcacagagtcgattttacgagcgctgctatctcgacccttagtcccccgtttatttcccaacattttcgctagcagtccccgttgttttcaactgaagcccaagaacagcaggttttttgtactgttgcagttttgtccggaggcaaaacattgtgagagacagcgagaggcaggtgctgggcatgcaaacggcccccgcggccgcaggcaattttctgtttcgcgaagtcagcaaggctgccccacagaaggcgattctcggaaggagactagcagtatccgaaatttctcgtgttgtattgtccatttctccttttttcagtcaaacggagtgtcagcgaacgtggcagattctggaggtacgcacatgtctgcagtatcacacgttttcgagtgacgacggcggggctcgcccccataacgaacgctgtgtatcgcagagggtcaagaacaggactttttgtgagata

SEQ ID NO: 2984 - DNA, 4862 bp, Toxoplasma gondii
  source 1..4862: mol_type = genomic DNA
gtaacaaacgagttgctcatccgcttagcggccatgtcttcaatggccgctttttgtctccgcagtgcctccggagctgggcggtaagatactaaaatgatcaaactgactagtgagaccagcgcagctgtctcgattgatatcaagtgaggcgttcgctgcgttgcctggtgttgcgaacggcgtctgcgcactgcagtccactgtgaagactggtttttctttcctgtcgaaggcttgctctgaatcgcgtttctaagcgccgtgggcacatcactttgtgattgcgaaaactggtcttccttgtttgtcgcaggcttgctgtgattcgagttgagaagtgccagggacagatcgttttgtgcttggatttctgactcgtggagtggctcagggagggcctccgtcactccctgccatgctccgctattttcttcctcggcgcgatcgggctccgtcgcgaccttggcgtcaccgcctctagacgactctgagttgacttttggaacgtcagacagaccgtcagctacagtccacgcgggcaacggtatgctgaaagcagcgccatcataactaaaggtcaacgactgctgagctgaccctggaggagcactatttcctgtccaggatgggggaaagacgaagacagccccaaataggaagccgagcgggatggcaccaatgccgcgcattgtcgaaaagggcagtgacactcagggttggagatgcaagtaagcagaccaagtcgacacgaacagggatctgagggcaagtgctctacggtgctatggagcactgcgagttttgcgtcatttcacggggccgacgctgatctcgaaaaaaggacacagagcatatacgacacgcgaggaaaatgcagatcctggaaagcgacgtcttctggtttcggggactccggaaagtcacagcgagttcaattcacgtggcaccgcaaccgtcctcgattcacgagcccccacaatagcgacaaacatgtcgctgatactctaagaagcttgaacaacgaaggcgtttcgttttcttttgacaactcttgaggagaatgaggccgctatatgggcgtggtgaaacagaacctagaagcttctgtttcacttgacatgtccaacgactggagtcgtgtgttcaactctgaacactcccttgccatcaacaaaggagatcttcaaacataaaacggcagcacagatccctttctcatcgaagactctgtccgccagccgggaagggagactctctttgaaatatcgtcgtaatcgtgactacctcaggcactgtgtcataggggcgccccccgaatggtacttactaacgtaaaccactcacaatttcactgctgccgacccgtccaagacaatttaggcgagaaaattgtagccagcatgcacaccatgcaaagcgcacagcctgctcgagagcgttccgttgcgcacagtggacgggtggagggccaaggaagactagctacgaaactcacccggcaggtgacgaaaaagagattttggactggacggcttgacctgattgctcggaagtcgtgacgtcctggaacgttttcccttttcttgaccttttcagtctttttctgcttgcagtttatcagcttggagagacgtcacccggtgcatgcacgtgaaaagcctacacgtccccgatctaggtgtgcatcttcgtagcctttgccgtagggcaccttgcaagaacaaaaggacagaaagtagctgcagcgttcccaagaaggcaaaacataagtcgttatccaggaacggagaacttttgcatgtttcggaaccgtaccaattgagggatagccattttttgagtattcgtttgatgattataaattttcagcctaccgattggttagctggacgtcttacatgccctactgtttctggctatgctagtatccgcagaaacggtaactttctttgtacatatatctctatgggagccttttggccaacaagaattcgatctatgcattccgtgtagaccaacatcgggcaggactctaccaaagctgcaggccaccataacattagatgaaggcttgcgcttcataaagtggtcgacgttggtgctttgtgcaggtggccgcatctgttgacgttcaaccagctggatgcggcatgcttgtcagagttttcaacaagcgaatagtgcaacccagtcactgagatctgtcgctatctcagacaaagcagcaagaagttgtgcacacgatttcgctggtcacgcggtattggtggctggacaaagagctcgtctgtgcaaaccattcgagacgcagaacaaacaaactgctgtctaatgactgcagcacactatgctgggagtaggctgcaagggccgtacaagtcagaagctcaaggcatggagcaataccgagaacaatcaatgttcacccgacgaggtcactaccgcaggcgcctactgtgacaatgcatttgcttaccattgcctgaccgccgatgacttactcgtgtaaacagggttggcagtgccgtgagggcactcagcaaatccactgctgcacgaagacaaatctagcgtgacagtccgtatctccactacgactgagtgattggtgactgtgggcctgcaggacttctatggaactctcaagtgtcctgcccctgatggcacgtgagtttgacaaaactgaactgtcgagacgcatgttcctttctgcgcattttcgggagcttgttggttgtcgactgaaggaacctcttactcgcaattcctgatgtacttgagttactcaaactagtcgtttcagatatgtagagcttagattccatttcatcatgcttgcctgtttattatgcactgcctcgcaatagccgacgtcgtcagcaatgcggttcatgcggaaagtgacgcgcccgcatttctagactttagtgtttgcaggtttctttgctggagagatttaatcgaaatatgcgggggcacccttgatggggaaacacgccatcacaggcacacactgttaagtgacctgatgtgcacatcccgtatccgtctgacgaccatccgaaaaggtcttcaatgacgctggcagccggttttatggtggatggtcgagtgaagtttcactcgcgggtgttaatcactattctttagcgacagcagcaacagtgaatgctgtcgtagaaaacgggaagccagcatgtgaggatgcagtgtatccgttgagttagcacgcttccgtcccgcaagtcgccagctctgtcagctgagggcaaagagtgctcttgaccaaagtagagcaactgcattcgcgcttcaggatgcctgatgcttatgtcgctggatctgaaatgacaaaaacgtttcagaaccaaaagaactgtccagcggctcgtacctcctgtccctgcttgtgtaccttcaccgctgctgctccaagcacactcagcaaatctttggcctccgaagaagtcagaaatcgacgatcatatgcatgcccaccgcccgacacccccacttcccttttggaaaaaccgttttttcccaactgcgccgtctctcggtgaatctggtaaagtcgcaggctgcttgtttcgtctcgagccgaagtaccttcgtctcaatgtgggtgttcctggcgggaggctgtcggttaaaagattgtcgcagcaaaagaagttaatatgctgtctagaattaagcaactccttcaatacttgaacaggccaggcaaacggctatctgcaccactgcggttgtcgcaaaaaccagcgagacaaaatcgtagacatctagtgcgtattgacgaatccccttcgacggacaagttgctccgccactgcacattgccggcagtgcatcatttctatttctcgctaaatattttgagaagtcttgaaacggagtgcaatgccacgtagccttgaaaattactcggaaggctacatagttagcgtttgcgactgttcgtgcactccaagagaaacagatagcgacaactacgcttgatcgggggggaggggggggtcggaggttcgtggaaagagaggtgacgagaaagtggaggtcgactttgtctcatacaagaaaaggggggagaaatgacataggggccagctgtgcattttctcgcactcagtaccaagctccacgactcgacgaggcagcaaagtcctgaggaaagggcagaaccgaaacctggttactgttccttttcttctgcctagtttcagctcgtctcttccgctctgccacctaccagtcctccactcctcaaagaaggaccccggcggtctccgcgctggctgagttttccggtggatggtctcttttgattaaaccctttcactgtgtatctccaggactgtcttttcccgtcagccgcagtccgttgtcgtttcgtgaccctgcctcgccttctctctgtccccccgtcatttcctgctcggttcgatattcttgtcgccgcgtgtctttccctgtttagtcgctgtttcgcaccgctctcttcgttccatttggctcctcctccttgtctctgtcctctgtttcccgctgtttctcccgaccttccctacaactcgtcttcgtctgccgagcgccccgaccttttccgaagcctctcccggtctctagtctccggacgtcgtcactccgcttcggctcttctttcctctgtcggcgctggtgtctggcaaacgacaagtttctcgctaggtttttcagcaaaggcacccgcgggtattcgggttcccttttcttctggcctctcacagctgtgacagtgaccgtctcgctttttccagtttccaggagctgttttctctcgtttgaagggattgtgcattagacgtagataaaaa

SEQ ID NO: 2985 - DNA, 1649 bp, Toxoplasma gondii
  source 1..1649: mol_type = genomic DNA
tctccgtcttccttctcgtcgacgcattctggttgtcgcgaagaaaccggcgcgagcccagtcccctctgagtctgcgtcgcacatgcggtctccatctatcttccgccgcttcctcgaattgaggttctcttcgacggtgtccaactgccgaggcaggcaatgcccgcaggcctcgtcccagttccgtgctgtctcctggagaggctgctctccctccgcgatccccggcatcgcgcttgacagaaaaaatcgccttcagaggcagacgactctccccttcctcttcgaggcgacctcgttccgggtgtcctgaaggagcgcgacaaatgtacaggcgacgggggaggaagcagcaacgacagaacgtttttctgcatgcgatgggagtggaaagtcttggaaaacgagggggggattaacaaggaaggaatgaagttgccacgaagcaggcggcgctcgcgaggtcgatagcggagcagacaaaatcagcttaatgtgatggatgccaccggagagagaggcagactcaaacaccctgaatcctgtatgaacaagtgcatggaactgaagaaacgatcaacagcgaatgagaaagagaggcacaagtcggcgctaacgagaggaaggacaaagcgctaacgagagcaggcgaagtcggggctttaaaaggcagaaggctcctgcgctgggcactctcggaaaggagagaaacaggctctgttgaacagcgcgaagcggctagaattccgctgagagaaaagcggaaacgcattggagggtccgagaaatttggacccagaattttcgagtttccctctgggcacagcttggtcgaccgcgtcgtgtcagagggctgcgtggagacactcgaaccgagatggcagagggagctgagactcggggacagatgcagttgaggaggttttgggttgaaggactttgtcaaaggcgaatgagacgggaaaatgcaggaggacgaggctctgggctcctcttgcatttccgttaccctgtgaagagtgtgcatgcatctcgcgcgcatgcagaagtcacatcgacaggcacagcggaccccgtcttgcgagcgtgtacgcggttgtcttcacagtttgaccgtcgggatgtttgtccctacgtctctgtttcagagaaattcgttttgcagctttcctcgcgcttctgttcggcggcgtccccccttctctcacgcctttccaccgcgtacctcacagccgtgcttccgtgtgtatcgcaggtttctgcgccacgtgaaagaacgcgagagcggtttcctactccatctcgaggtgaaatgaagatgcgtttttgcccgttgtctgttcgtttcccatgaagacggctcgtgcgttttttccaaccgtcctcgcggcccggccagttggcttagacgaggctcttcgtcacgatcccaggcgttcgggggttttctcgcgcgtcgtctgcttcgtctccaagaccctcccctttttgtagtgcgaatgcactagcgttctcctcttcttcacctctaccgtttttttcgcctgtccgacccccctcttctcttttgtcttggttcctccgccgtatctgccctctttctgagcgaggcgcctgtccgcgtccagcacccgtccagcgcgacaa

SEQ ID NO: 2986 - DNA, 2066 bp, Toxoplasma gondii
  source 1..2066: mol_type = genomic DNA
cttggacacaaaaaccttctttttccgcgacgccttctccctctcccgtgctctctccgcttcccttcgcttgctctgtctctcccttgtccccttctctcactcaagcctcgccaccggtcgcctttctctctcctctgctggggaaatcggtggagtttctgtcctcgcctcgaccgccgtctgcatgcacgcgcatgcatgcggagccgcgggcacggacagagaggaacgtctccctgcgctctcccgagacgaggagccgcgagacgagcggagagtgcagaaagcactggcctagccaaagaggagctcgaagatgatgacgacgaggttcgccactacgagggggagtttgaggtaagttctgacggagaagagaaagagcgaaatctgcgaccggaagccagggtcccccacctgcggcttgtccagccccagaggacggaggagacgaggagcgctgaggacagccgcggcgttcaggagaagaagaaagctctcgaggagatggaggagagtaaacgccatggtgagaatgcgagacggcgactcgacgaggcgctgcgagagcaagcagaggagaagagaaagacggagaggaaaagaaaccgaggaagcacgggggagaagaggcgaagacgagggagaagacaagacgaaaggaccggagaagaagagaagaaagaaaggcggaagaagagagaccagaggcgaaagactcgagaggcagagactcgcgaaaggaagagaaagggaacaacgagagacggcaaagcgcagaggcgggaggaaagaaactgaggcacaagagagagcgcgagagaagtaaaaagcttctcgcgtcagttcgcgatggagtcgcttttattctgtctccgttccttctctcgttgtgacgcctctctttcctggaggcgcgcgagacaccaaggaactcctcgtctggcgaaggcagggagttccccagcggctgaatggcgcacctctcgcaagaactcggaaactgccgagtgtaaaagttcagaaaatgcgatagtaacggcgtcaaaccaaaggccttcacacattcgctctttctccgacgaaagaacgttcgagcgtcggagacgctcttgccggtgagtcgttggagaagagacctcctcctctgtcggggacatcgaccgccggagaacgtttgcgaagaggccagcagaaagacgcgctggaggccaaaggaaacgcaggaaaagaaggaaagttatccaaacgagaaaggatcaagaggcttcggagaaacaaccgggccttgtgtgccgcttgtgtaagccgccagaggaagtgcgaggaaagaaggtggagggagagcgacgttaacgttttcttctcggatggaatgcatggacacaaaacaagcagcacaagtatggccacatccggagacaaggaagccagaaaaattgcgagacagagaaagacatcagaacttccgtaaaaggcaagaaactcgctgttccggggggtgtccgtgaggtgtatgtacagcgtagcgacccccgtgaaaagagacccccgccctcgcatatatgctggagatatgatttttttctcgatttcaggtttttcttgaactttcaggcacatcttttcgcgtatctctggagatttaaccgacccggagcagacccttgcttctgttgctctttttcaacgtttacatcccctccgtttcccttcgtcgttgcacaccgtatacacgagagcctcgtcgtagaacgcattctcggaagtcgcatgcacacccgcgacagtcgacatcgacggctgtccaattgcaagacacgagtttcttctttctttcctttcgacctcacttctatctgtgcctgtcgcctttccctcgtgcttcttctgcaaggcacagcggtgaaaccccctcatcccgccttcgcgacgtcgtttctcgggcaattccctgtcctctttcggcggccttcgtctttcgctttctacgtattttttcgcgcgacgacttcttctggctcccccatatttctcttgttttcgcttccactctcccacga

SEQ ID NO: 2987 - DNA, 3179 bp, Toxoplasma gondii
  source 1..3179: mol_type = genomic DNA
gcaagcggttccgtattgccttatttccgatggcaacactctgaatcgcctgaatttcctcggaaaatcaagctgtgttaagtgagtaccattactgtgatagtacagcccctcactcttcgcgaataagcgtgtgtttagaggcagcccgcatcttttcggtgaagcctcgtatgtgcagatgcactagaaaaattgtttccagtttaagggatctctaaagaacatggttgccagggataggtcgaggtggccacaatacgatctgctgtttgcgtggctgtcgagacacgaaattttctccagccatagtctgtctacgctatcctgcctccatcacggcatcaagttcccgtgtttgaagcttatcgaaatattgcatcatacgtgtccctcatgaaactctcgctcaaaagttttgctgataacagcgcataaaactgcgggcgtaccatgttgcccttacagcgacgcggtttgtcagtttgcggttgtctgtggagctatccttggcgctactcgtcgatggcactacgcaaaagatttcatgtgtaatacacagtgcagtcgttcactacagcaaacgggactgtaaacagtcacacttccactgggaccgcaactgacgtttgctactgataactcttcttccacacgtcgaggcggaacagggcgaaacacacgaaagctttcgccgccaaagtcaaggtccggtcgcaccattcattcgttgtagctcgcccacttattccgggtgacactgaataaagaagttcagccagctgtcgcgagaagaaaggcctctgagacggtcatgaccgtgttgcgtttcctgacgttatactgcacagaagttttgatcccagaaaataaaggtaattataccacgaatttggaagcggtggcagagccccgcttataggaaatcgaggtcagcaatgttcatattatcatccagaagtgggtgcttcataacggtaactccaaaaaggagctgtgcatggctgcctgtgtgagtccgcacgaggcgaatcagaactgcagcaacagcgaagcatggcaactaaggcaaatacttagtgcgaattcgtagcagagagaaacattagtttcagcagttaacctcaccttcgttcgagttgctactgtttgacttgtcgaatggtcaacctcacccaagagttctaggacacgaggcttctatgcaggcaaacaacagaaagtatttcctttttacttggactggggcttatgtaagtccatagcatcaggcagccagcggcgcttactatctctatactgctgtctttctgttcagattcactgcttgcccaaccgaatcactacacaaaaacactggaacaccggctgccatcggtaaccgtcaagtgaaagctaagtataaagaagcggatcacgcacggggcggatcccaccccgatgtaaacgctgctaatgtttgatgagtaaaagggcttacactggcagagaggacggatactcgttgaaagggtatccccttgttagtcaaactgaggctctaccataccaacttcaacagctcgaacccacgaggctcaactcggtgtgcggactacgaaggggccccgccttggttcccgacacctcagacttcctgttgttggctatcttgtctgcaaatatcttggtacatacctatgtataggtgccctcccttttgcctcgcccgagagacactcagagaaggtttgtggacgacatttaccagccgactgcacataacacctctcactcactatttcatagtggacaactgggcatggaaaagtactaggccaacctagaacggcaggctcaaagatatatagataagggctgtcgtccctgagtggacgctgcgccgcagaaggctgcaaacgccacatctcagctgccaacgattcccttaagaagtcctgcttagtcatgcattcacgaggacaggctgtctggaaacgggttgtgtcctgtctgagtcagttgagagcacgtcctcttatcatctgtgttccacgttggttcgtggactgtgatcacccttcttgtacggctcagtggcggggcaggtccacgtgtcgtaacgtcatccgatactcagactggcatctacatcaccaggtaacgccttttaatactggcggccaatcagtcactacagatcacctccatttagctgtctacgtgtttacccagacgaacagtcacatgtggattttgtggcagggaaacgccgatgaacgacagcttgcagccgtgggcgtcacgacaaagccaagagttttttcagtgcatgcaagggcccgacataattgataaatgagtgattactctcacaggaacttgccacatctatttcatgtctccttgatttctccttttcttttctgatcggcgttcacagttgttgcttgaaggtgcagctcttttgttgcctcaagtcatctaacgagtgattgcatgcattgttctttgtcttcattcctgttgtccctattgctcttccaatgtgaaagaccagtttttgtttcttggatttctttgattgaacttctgagagaaagagcggatctgttcaatttcggctttttggtgtatatgcgtgagagaagatttcacttgtgaatgatgagttcgggtttatcccagaattctcgtttgccacggcccagccggtagcccagaagcctggacccagcaaacagtgtgtattcttcagtaactgtgacccttctctccaaaaaaacgcactccagctttttttcacctattatggtgacaacgtttaccgtttggcgacctctgtaatgtaccatggtgtcccctgcgttttgccccaacaagcgtcgagcagccgaaagtgccggaactcagcgacctgagaaattgcggtgttgtctgctgtttgttggctcaaggtgatcatacattcttacagatacgtagtcaaggatcaagtggttgctgtggttacatgatctgtctcttctcgtactgattgtctgcgctgcgctaagcatctcacgccaccgttgccacgcacagttgctgcgtcgtttctgtgattacagttttccttctccatctgagagcgtttctgttgtctgttgtccactagaataaaaccccctgttgtgtgaatcacgagactgttgacaaaa

SEQ ID NO: 2988 - DNA, 2311 bp, Toxoplasma gondii
  source 1..2311: mol_type = genomic DNA
tgttggctgttcctgcgcccacggccttaacagggaaaatctacctctgcagcccgtctccagtcgattctgtctgctcttttctagcaacatttaccaatgtactgttctcttgcaccgattccgtggcgaacgcgtccgttgtgaccctcgggggtaaccacaagatttcccgtcttaggctgtcagttaccacgcctcttcaatttgctaggctcgctgtctccagtcctttttcagccttcctgtcgcttgcgtcgccctgttccgctctgtcgctcctccccaattccctgaagaagcagtggttcttagcggcgctgccggacaaggccatgaggccgaccagcgaagatatggatcagcaaaatgtcttgaagaaaggaggcggggcaattcagagacactggagttctcattttcgctggagacaaaaacggcgaacctggcggttcgttttgtccatgtggattagagtttcacagcaaagcgggtcgagttcgtcgcgttccgctcgagtatgccggggtgtacgtacaccgcaggagccagtcgtccgacaaggcgtggtctgctgacaaagaaagtacgacacaatcattccttttgttggttttgacaaggcgagaaggaagaagcatttgagcaatgttttgaaggtggcgtagcgctgcccacctgtggacgaacgaagacgagttggtacggctgccgttttctgcgacatggaacatttccgcgctttgtttggttgggaagaggagggccaaaacgtgtctgtctggtctggggaaggacagatgcgcggagttggctcttcgtcgccgtcgtgccctcgttacaccttggctggacgccgcggaaatgaatgaaatgactttggaagagggatttacagccagaaaacatgatattgtcgcgcccgactgtcttgatgctaagccgacatagtacatttgccgacaggacgccacggaaatgagtaactttaggagaggaattcgcagacagaagacgagttatcatcacgcccgaccgtcttgcagctaacgccggacgtcgccatcttgcggcacaacaaagcccacgacgttcgttcggcagccctcccttaaaagactagaagagccgtgttaaccggcacacatgagtgtctgtttctttcgtcttggagtttgtgcgtgagttagctccatcttcgctagctgcggacaatggagtacacacaggcacggtgttttcggtaagaaagcttcccatcgacttttcgcgcagcgcacgcctggcgcgcgatttgtactagactagaggtactctgttgacgaggctttcatagtagacagaaatggagtaggcgtctgctgccttggttgcacaagcagaaagcagagcccatcgttcattctccaatttccttctctcactgccaaaattgccttcttttctcacgagaggaaccgttttcgaccgtcaagcttgagagtagaagccgcgctagcccccaaggggggagcggcattctccttacatgcgcttgcggctttggggtcagcgtgatttgcagagtggggccctcgcacgaggcgagttcttcgttcttttcatccgcttttgtcttgctataactttttgtacggctctttcttcaggcggaaggcagtggatgcccttgcagattcctaggtagaccacaggagtcgctcttccacttcgcttgcatgcgcgcatgtacgccgccgaaacaatcgagacaccgcggctctcattccttaaaaaaaccctgttatctccgatgaatgtttcctcggtgtttttctcgaaaggcgatttgaagaagtgaacgcgctgtcgccgacttccctgcctgaaaaacaaaggggacacgaaacgtgcagaccgcaggtcaggggccgttccgtggttgagtcagcccgctggggaagaggagaaaaagatgggagtggagacaccgtttttccaccaaagttctctgtgctttcagaaacgctgatttgaccaactgtgcgggtcccgttgctccgagatccccagagcaacgtggagctccaactgcgttttgtaaaaccgtatctgtcgtccttcttcctcattttctttgacgtcccggcatccggctgtcacttcctccagccgtctctcactgattttcttgatttttgtggcgcacggcctctgcctttcgtatcccaaagagcggggctgatctgcttctctcgctttgcgtccttcttcgcttctcagttcggtagaccccacatcgattctctccataaaactgggccccccagaa

SEQ ID NO: 2989 - DNA, 1180 bp, Toxoplasma gondii
  source 1..1180: mol_type = genomic DNA
gacgtctgcagcggtcccgtgcacagacgtctacaaacttatccttgaagccgtaggccaatgctagctagcagtaggggttttaggggttggcttcgcctttaaccttcgcggcggtgcctcagtcactctccctcttcttttacggctgcgacagcgtctgcttgccgaggaatcttcttgtcgctctccgccggcagcacgaccagtggtacaagggaaaccccgtgaaatggcagtaacggaaagtaaacgagggtttaaaaggtttgttgctgtactatgcgtccggcgaaaaggatgtcactgtttcttcgtggcctggtagaataactgagcgagatgcagaacagtaaccgaaacggggatgccttcagtacagtatacaaatatttctgataagctgtgcacaaaaaaagattctgcttgggcttgcggcacctcagacagtcactcaggtgttccggctgccaccgtcccagttgccagaaaaccatgagttggcagcaacgaagctgcttcaatatatacgaaacgcacaaggaatccatgacacagaggatcggtggtgtatcccaccgaaaagccgctttctgacgaagatcacagaacagggagtcgccttggcgttaacagcatgcgaaccattctggattagttagctaattcgcacctagtctgatacctcggtgaggcaccaataccgagaacccttaatcattctaatcgccaacataagaggcagctaggcacagcagtctccctggcatatgggagggagaactgatccttacgggccagaaaccctttgcaaatggaacagtttaactcgaaacaacggtaggggagcggggggggggcttccacacacgatcacaaaacgcctgacaaaccgccgttattagcctctttgcaaagcccggtgacatgtgcttcatgccttatcgtgagaaggtcgttgccctggattcaacattgaaatactgctaactgtttggtccacgtttttaaaaagaacagtcacgggataaaaaaacataccaagctaagcaatgtcacggatactgctgaagcaggagacggtgtacttacagtaagcgtaaggcagcctgcgtcttccatccatcaaaagatcaaatttgtgttccgtccagaagtaaacgcatcctactcttcgaaa

SEQ ID NO: 2990 - DNA, 1896 bp, Toxoplasma gondii
  source 1..1896: mol_type = genomic DNA
tgcgattatctctcttccgaccatttcccgtacacagctaaacacgtatatgcatgcacttgtatctctcggtatccactatacatatacatacatacatgtgcatatgcatgtatacagatatatatatatatatatatatatatgtatgtatgcatatcacatccacggtggcaacatgccttgaagcgtccatatgcagagaaagtgtattcactgtacgcctggccgtctctacacctgcttcactatattggatcaggatatgcatccgtggatctctccttcaattcacaactatgagtagatattttgacggagcagcgagcatttttttgcggaagaagtcttcaacgacatgattcttcgtttgtacctggtcatccatgattttccacgagaacttctgggtgagagaggcccagaaaggaaggtaagtccggtgactggtttcccagtaaatcgagctgtactgcatgccgtgatccatcgaagtcgccttcaagctgtgacccacgaggtcgaggtacccgggtgtacgcacacccgaagccgaggcggttcggcctgcttgctgcggagcagctgcggcggcgggagcgtctccagccatcttgtctttgaagagcgcgaggaggacagaaagaagaaagcgaggaggacagaaagagggaagcgaggaggacagaaagagggaagcgaggaggacagaaagaaggaaggcagagtttgcactgacgaggacttccacctgacgggcctcgaagcctcgactcgctggaatcagagcgaagctgtggcgtggagcttcagacacgtcaccaccgaggcccccgctcttccgctttttgaaccgagagaacacccagaagccgcgtccttcctctcagacgaaacgcctgcgttcgttcagcaaaaccgtccgccacgctctcgtcgatgcacactagagtcgccgtcgcactccagagacgtcggagaaaagcgcaaagcgactcttcgaggaagaagataaaaaaccagaaaaataaggtctgcaaacgcgccagtctcgcacgtgtctcgggaacgtttctgtctcctcggatatcccaactgttgaactgcttgcatgcacatgcctgccgcccgcgggtccccaggcctgctgccctttttcggcgctaataaaaactctcgcatgtctcgactcacatgctgcggtggacttggtttccgtggaggaactcttgaagccgacgtggttgcgttttttccagttgaaaagacttcgaggggaagcccaggaaaaaggctccttggtgttttgccctcggctcaccgtttctcgactgcaggagcaacggggggctcttgagtgtcgggagatccgctgaaaggttggagggcaacagagagcgctggcgaggaaagagagcagggggggcagaaggaacatcgggcggggggaaggaggaaaacagaggaggagaaaagagcagagaagaaggaagaggacgaaagccgtcacccagtcgtccacgtttctgcgtgcgagagttcttggcctcgacggggactcaaaggccggattctttgcgcgaggaaaggccacctcaaagtcgatgctcgcgactcacaaagacgcggggtaaaggagaccgaaaccgaagggatctacgtacatctctgggctgagaaaggaagagcgatttttgtctctggagcttcatctgtttcttcgtgacactctctttcttcgacgattcgcaaccagctgacaacgggagcggaaccgtcttcgtcctcttcttctcgtcctccttctcctcctccttctccttttccttccttttcttcttctccttcttcctcctgcttctcccccatgtgcgcgctccacagtcacaggaacaa

SEQ ID NO: 2991 - DNA, 4284 bp, Toxoplasma gondii
  source 1..4284: mol_type = genomic DNA
gagaaatgtagcaggagtatctgtctatgtctcgctcgtagctaagaaacatttcatacgtcttctcttgatgcgttgtcctaaccgcaagcgcggactgcctcgactcactcgaagtcagattgaaagacttagatcgtatccccttatccaacacagctgttggccgggatgtataacccgctgcaaatcgccctttccccgtgactggggacggtttcacgtgagttactgccatgtttgcgattttggctagtttgtccttagagccaaaataagcctctagattgaacgtttctccccaacaagcttattcttgcatcttgggcccttatctttcaatgcctctttgtaaaccccgggacgtgctaccagcagatcaacgcacaccaaacctgcatttgaaaaagtgtttgagcggtctttgttttccacagggcacaagggcatagtagaaaattgggcttgtttctgctgagtgtttcatattcaatttatgaattgccacaacaacagctacattttagctaagacgtggaacgagtaaaattcctgcccccgtacgcttgtccaggttttgaatgcatctgcattagcctcagctcgtggttgccataatggtatctaacggcaactatcacaaccattttaaaaactccacctgtttgcttaaaaatactgccatcagaagagcgttgaacaatgcaatgtaaccatgttgaatcgtgtctgaatcatgcaatgactacaaaatacaccaatggaagagaaggcctagatgcgatcggacaggggaagccggtgctaaggaggcaaacaatgtccacggacgaacaagcggagatgtctcacgatatcatggcacgtcaggcagctggcactttgaccaaataatcaatctgtatcaaatagatatcttgtcagtctacagcgaggtgaattttataaaactccttgccgactccgcgaaaatgcggatcacacgtgcggactttcatgggcggcttctgcccactgtggccgttgttgagcccttctagagacacagagagtaaccagcagactaacgggggtgattccatttcagttttgtgaatggcaagacaagatggtgtaactcgctgccgcatttatctgcatgcaccaggatggctcccacatgtgaccccatagcagcttgtcgttttgacagtttcctgttggcgccagtgctcaacatatgagcgacaaccacagtagaattaaattaaggtgaaaatagatagcagttggtgcgacctgcagaaggttcaggaaaccttgtaacacgatggggttcaatttcactctatacgacccctacggtcctacagaggcgtgcatgcagccacttacggtcggatttggcaaataggcaaagtgggactattgcgttggtgtagaaacgctccacatcatgctcaaaaagtaactggtgcgtctgtgtcgggattgcttacgagtgtcacaaacaacgcttttaaggataatttactgtaaccgcggttagcagcctcttttcgtccgcaaaacagtaacaaaggtagttccgggatcctacaaggatacaaaactgagctgtcagagacctaaatacagggaagccgcccgctgccgaactcctaaagaatcctaccaatgtcaggtccgcttcttttccaagcaatcagagacagtaatcgagagcaactcgtgcttctgctagaacaggcccacgcaaacgtgaaccataccaacgccaatgggacgacaccactgatcttagctgcgcaacttgacagggcgtctctcgttgaaattctgcttgccaatggtgccgattcaaatgctcaagagaggcttgaactgggagggaatacagcactacactacgcagctaaaaacggcaacaggtaaattccatgagacgatattgcaagtggacaatatctctgcagatgttgccactgtcactgttagcttaacatttctacaagaacgttcagtgcctcgcgttaggtccagctgtgggtcaagcaaagcgacagcaatcatttctatcgcttcacgaagacatccatgtttacatccattccacgaagcattagatgggaacaatcgatacgaccgaagttccaagtagctcacacttctttctacaatgtagttccgtgctcgaaactaccggagtaacagaagaatgagaacaaaggtggtgcgtgtgtttcttctgtgcacactacctttcctcaccaaataaaccctcggaaaacaaagagaggtggcagtgcttttgttgagtcatggagcacaagcaaatgtgcaagacaagctgggacggacaccgctccataccgcctgccggtatggtagcccgaccgtagtgcaagcgcttttatcaaagggcgctgacccctccagcagagattactcaggtgagccggtgttctgcaaaagcgcaggtgttacatattctacctatagcgcttgaatacctcaggcttggacataataaaagctggagaaaattctcttctgattttttgaattgtacgtgactagtcagtctccagagcgagcagtaagaagacgatgatgatgatgtttgattggtgtcttcactgcaggtttcacaccatcgtactgggccaaagtcaaaacacacgaggagtgtgcgagtttgcttccgccacctcaattttacggcagcaagcaaatatctgactttcagctagtaacgatggatgccttggagctgactttaaacattccttccaagaaaaccatggggggcaggggcaaaggaaagaaaacaaagtaggactcacctgtaaccatccctttaaaattgtctgtcagcaaagagcaaataacaaaacaaacaggacagaatcaacaatccttttcaactggagagccaccgaagagcaagggtctctgccgttgtattggaaacgttcaccaccagcggttgacttcctccacgtggagcggtcagcgtgtgtgtaatcatgctgccctcacacacaaacacccttccacatcaagatcagcacggttcgagcattgccgcttaggactacccttcactgctattcggtgtcaaaacggagttacggcaacacgacgtacactaaggttctttcatatctacgttgattcagcagtcctgtccgaaacaagctaggcttttgttgctacagagtgcgtgctggacagaaaccaggggataccaggaggcgtccattgcagttccttgactgttgtttgtgtatcattccggaaggatacttgtcctaatcacattcgttattgaaagtggcgttctgctttgtgtcggggaaaactgtttccacagttaaaaactgctgaaaatccaaatagcacaaaaggtcccaagttgcctcgtttactcagcgtgtagctatcggttcattgacaccggcaggcatcaattttgtggccattctgcaaacgcacaattggttctccacctacgcgataggttggcttgctcagtccacttcttggaacggcctgcaccttagatggcaaacagagaggtcgaatgactatgcttaaaccccagaacagacagtcgctggcctttgatgtttgcgtcatagttgctgacatggaaaaacttcccgctgttttataacctcttccatcctcccttgtctgtcggtatacactggcggcgagccaggaagattttcgcgggaaatgagacacacacacacattcaacgtatctgctctcttcccgaaaaggcatcatgcgtgcaaaagttggtagaagctggtccttgtcagacaggaatggagttctattgcattcttcccaccggcttcaacgtgaatcagaaaccatgggaaacatatcaacacaaatcgggaaatgccctctagaagtgtcccctctctgaggcaggagtcgacgacgtttctcactcgtgacaccgactcgtgtcccactcggacactccttcgaaggaagaatacagccccgatggatcgaagttagaccatttctcattctggttgcaaccacagcatgcagagggttccttgttccgtgaggaaccacgtgtaattttcccgttctttacctgctacacacgctgcggtattgggggtcttggtgtgttgcacccaatgtacctacactgctcaggtcattcgaaatcactatgagcagttattgttttcttgcgttggtagccgtttagcaagcatctcttcgaaagaaccgagacaaatctagtcaaagcacacttgcgaataa

SEQ ID NO: 2992 - DNA, 2034 bp, Toxoplasma gondii
  source 1..2034: mol_type = genomic DNA
gctgcgccaaaccggcaatgacatcctccatagaattgtgtagatcaccttcgttctctgacacgtcagagacgctcgcgtttacgccgtctctagtgactggacagcaaggctctccgccttctgtttcccagaaagaacctatcgccctccagagaagggaactccacgcgaggcaggcgtcgtccaaatctctttcggactgcgcggcaggcggagcggtgctgcaactgtcgaaatgactgctcatatgggcgagaaacgtcggagataagacggcacgtctcagtttcgctcggcatatgcgtgtttccttgtcaccgttgttgtctaacgaggcactgccagaaggtaccgaagtacgggagaagcgtgttgccccaacgggggctttaccctcagtgtcctcatcctttctgtcctgcgcagagaccgctgttgtttcttcattgctaggaaatccaagcgttttggacaagtgctgaatgtgagactttaaaaaacttcccgaacaaatgggtactgacttgccgagcagccgaacaaagacaccaggtgtggtcagcacacatgtgcgagctcctatattttcaccagccatttcttctcattatacgtgattcattcgggtgtctgcttattcccgcctttcaacgaaagcgttgatatacgacttggatattcggtcttggtatgaccccacagaaatgcagcacacatcttccaaggcattcaagaaccaatgcgtagtgtgctccacgacaaagcgaggtatagaggttgaaagtgccctcaacttccagaaggaaacctagaaacttctgcacatgcagcagctaccggccgacatcggtctgcaccgcggaaactcacacgtcaaaaaaacccgccatcgtggacagaagacacaggaaagcgcaagtgcaactgactggcctgtgaaaaaaagttctttcgtgtccttttgaggaaaggagcagcacggggattttcagcgccaaacgcaaggacgggttcggccgggtcctctgtacgtcgattctctgtgggtgcatgcaaacgcatgtgccagtcgtcgcagcagaaattgcaaacaggccactggttgagatattctgcctcattttttacgtgctgtgacagagaagaactccgtatatcattcctaaagagacaatatgacttgcataaatacctgtgggtcctcggttctgcataaacggcactacggaggagcgcatgcaggctcgcttcaactcgagatccaatatattcaatgatgttagggtgtgaatttttccagatcagctcatctggtctcgccttcgtttgagtcagtctgtagcacatttgagtcatcacttttgttcgcgtctaataatgccgttttcttacactacgctcctcttcctttgcgccatttcgtgagagaaacgacgcagcagaccgtgaccccggtttcctcatctggcgctgcttcgtcacatgttctgcaactcgacttcgactgagatattggtttgaatagaaagaaacgcaacagtgcttagcatactctcgagcggcgtttcctggagggagtctatcgtagaccccacttgctttgcttgtcaatcgactttgcgtctctagtcgccgttccagataccctctgtcaactgtgctcctccagttaggggtcttccgccaaaagacataacaaccccgcagtgactgcctttatttctgccgtcgtacttaccttgttcgtttgcttctttggtcgtctactctcccctgtccgttacaaggcctgtgacgcgaaattaattgacgtgacaccttggctgaactgtcaagaaagatgtcgccagtcacccgcttattctggcagctttagtatgtggagactagtcagatactatcttacgtgcatgaaagggcgccttgtagcggaggtgtctcatatcatgtagcgccgagacttttcagccgcctacttgcctagttcgagagtctcgtctcagctgtacgtacacctgattttgtcaaaga

SEQ ID NO: 2993 - DNA, 2675 bp, Toxoplasma gondii
  source 1..2675: mol_type = genomic DNA
cccactgttgggcggaagacgtattacaccgtcctctgtgcgtggcagcagctgattgactttgctcccttgacggttcttcctggggagaaattccctcattgcttacagtaaaacgagggaaacacgggcctccgaaatcaaagctttcgccggaaccgcctttgtccaagaactgtggctgtgcggaatgtgtctcgagcccctcggagggtgctgaaagatgaagactctcccggccaaggaccggcgtgttcactagcgttgagctaaacgcgacatgtgtgaagggagacacaaaaaaggaagaggagaacaggagaaaccccgggaacagaaaacgtgacagtgacggcgttgccttcatggtgaagggggggggacgacgaaccgactagagaggagacacaaaagcggtgagatttcagcgtcgcaggaatgacagttactgtgaacggcagagctacacaggagcaattacagccacatttccggtgacgtctgactgagggagacaaactgtgggtgaagcttggcggaggaaggaagcacgtggttaaagcagatatatgaaagccactcaacagaaccggttagagcgcgtacaaaggagctcacatcactagagacagagcttgccttacgtctgaagcatccatatgattatattgatgatgacatgcttccggaaaagtaactcgtgcaaaatagggagactgaatgaactggtcgatgggatatccaactgcaacggtgtgtacatacactcacacactcgcttacacagcctacaacctgctgcgcgcggggctcgaggacacacataagtatgtcgtcgctgctgatgaatgcagactttggcctctgcgaggcaggaacggtacttcttttgaacacgatcctagctgtttttgatttctcgactcagctactttttcggtcaggcgggcaccgcactcctgcggagcgctggacggggttccagcgtacactcgcctctgggccaaccaaatagtactggaaccaccgtcgcgacaaattggcgtgattgggattccaccactagcaatcgacgccggcgggctttcgcagtcgacggacgggcagcggtaatcgacggaccgatgccgtttaaaggcaccgcttcgcgaccagccaatggctggtttgagcacccctctggagtcgagtctgcagcggcgagtgaaacgtgtacgcgagatcggaggtgtcacttctcgatgaaaaaactcaggtgagtagaaaatgggaaaacacggggtcgccgaaaacacacctttgtgtgctcctgcatacagctgcacgttatgcctcgcgccacacgcgcacacgagttaggagggagcatccgccactgagaggaaattgactgaactcgacttgggtttccacgacaagggctatacggtagaaattttcgggagctgacgtttcaagtgaaaacatgtcacaccacaaaaactgaaagttctctgaacccggaggaaatgactatctcaatcgcagttgccattccgcagtacccttggacggtcctgccagtatgagacgaagatcctacgacggcggaccccgtgtgctggcgtgcaactgttcttgatcgagagcagtgtgtgaaacgctgtcgatggcgttgggcaagcgctcagctagcggcgtggcgcattcagcctcagtgcaagaagcagctatggttagccggctgaggaaacatcgtggggggagaagcactggcgagtctcgagaaaagagcggaagagaggcccgctgaaaagccttctgactgccggtgcacccttttgctcaaacgagcattctgcggcctacacaaggtgaggtggtatttgtcgctctctacggaataccgtgtggtctctgctttgttctggacccttacgtgacttccttgacggaccgtctgcccgtcctttccacttaacttttttttgcgcggttttgcattctgtcgatgcatggatacgaccggtcaccggggttacgttactctgttttgttgactccgtcaccacaggtcttcgtttctccgcttctatgcttcaccgtatttatgtcaggtgtacaatgtgatttcacgtgaccgtacagtgtccctgggcggccgtagaggtggagtatttcctgtttctgtgctactcttgcctcctgtggtggctgcctgtgcatgcattgttcacggacccccttgtcgttggcttagttcagaaataaagtctttccgtttacggcaacagttattgcttgtggtaaatcgtcgacacaggtagtttcacccacccttggacgcgggcgtcaccgcccggatcggtcgtctctgatctgtgacccgactgcgagacttgtgccgcggtcggaattcttcagtcccgttaccttatgtcttgcactgcgcagaacacccctgacagttcacgttccggccgatttcgcagctcacgacgaaagctcacctgtccctttgctgattcctgtgttttcgaatccgctcactcgcagaacaggccttccgcggaactggcaattttccaccgatgctatttttcttgctagatcctctcggcattttctctatcttcaattttgatatctactcaatctcaccagctcacctgcagattctccgttctccagcgcaa

SEQ ID NO: 2994 - DNA, 1872 bp, Toxoplasma gondii
  source 1..1872: mol_type = genomic DNA
aactgctgctggtgctcatctgtgctgtctgtctagtcaagtgaaagaccttctctccggagtcgtctctcctcgcgcctctcggaattccgattaatcgcaatcgaattccacgtctttcgcacgtcaaccgaagcaccatcgaaaatatctgaatactcatatgcacatatacatatatctatatatctatatatatgtatatgcatatatatatatatatatatggatatatatatatatatatatatatatatatatggatatctgttcgcgtgttcgcacggttgaccttcaaaagtattcaggtcgactgcgtctccggaaacgcatggcagatttgaaggagtcgcgctgtctttgaaaagggtgcagggcggagagcaagaacctctcttgaacgtcggactgttcgttcatgaaggcagagtctggagcgcgtactttttttctccctcgaagtgaatgcgggaggaccttggaaagtcacatgctgctttcttgcctacgcaaaaggaggcgtctgtgtgtgtgaagcaaagtcgctgggtttccgcctgagaaagcgcgaggatttttcggagtgaaacagagagctcactgaagaggagacccccgcggctgagagagactgctgtcgggccagcagtgcacccaaaaaggcacaagttgcagcgactttcctctccaagaagagcagaagagaggcgaagagagaaaagagagaggagagaagggcagaagaacaacagagagaaaagcggagagagagaaggggagagagagagtaggcgaaggagagagagagagaagagggaacaccgaggaggaggagaggaagggaaaaaggaaaaagagaagagagaagaaaacaacaaaatcagagagaggagaaggaagagatcgaggaacgtggaagagaggaagatttggaaagggagagacgagaaagcgagagcgggagagagacagcgagctgcgagagatgcgtcactggaagacagcagaatcgagacagcctcgttttttctctcccttgtgtctcctctttctctcgtttcctatgtttctccttccgctttctttccgagactaccaaaggaaagcaaaagaagaagaaaggaaagaaaagtcgaccctctcacatccgagaggccatggacgcactcggagaccgagagaagacacaccagcacaaatacgcagagaagcagcaacgttcgagcagccgacgctagcgaaacacaaagcattgccagaaagagacaactgtggctaaaaaatggagaagaatctcgaagagacatagacgggagagtgagcacaaacgttccccactgcctcagctcccgcgctctgtcttctctgtggagttctgtctctcctctttttcttcgctttctgcttttcttcctgtgctgcttcttcctgtgcggcttcttcctttccttcttcgtttttttcttggtttttttcttggtttttttcttgttttttttcccgtccggagcttacctttttcttcggtgtcctctctttgagctgcgctagcggcggcttcagagcgcactgccctcgcctggaggggggtgtgtggagctccgtcgttactttttttctcgaaattaattttgtccacacactgggctcgcgctctccatattttcatcaagacacagtagcagcagcggccgcaggtcctccttctccgtcctctcttcgttccttgtctttctgtctactccttactttcgctctactcttctctctccgttcccctctcctgctttcttctcttccctctctcagtccctgctctccgttcgtccttctcttctctctcggctgcgacgtctctctggggtatcaaaa

SEQ ID NO: 2995 - DNA, 1802 bp, Toxoplasma gondii
  source 1..1802: mol_type = genomic DNA
tgtagatatatttaggcacctatacatctctctgtctctgtgtatccatcgatctatctatatctctatatgttatagatgcacaccagcacctccctatgcctaccgtgtctgaagtatattacctctaggaacatctgtatacctttgcgtttatatatgtccatatgcgtgtatatgtatatacatatatatatacatatatatacatatatatatatatatatatatatgcatgtatagacctgttttcgcgcattgtgtgttgattcatgtctgtgttgatgtaaatttgttttatttttgtggcggttttctctttatttgaatgtgagatactctgcgaccacagtggtgggcgacagccaggcaccgacctggcgcgcagaagttgacgaaaaggacggacttgacgtccacggaaagtcgctttccttttttcgtttttcagctttgtagagcaaaaacgagaacactggctttctgtcacctgcgcaaaggaaggggaagccgagacttccgtgttgtagccggtggtgtaggcaaaggaactctgcgttttttttttcgctacctctttggggatctctccactgttcgcacgagtcttctttgcatgtttcttgctggcattttcgtttctcttcccctctcgtcaacaagtcgaggcgaacgaaaggcgaatgcatttgtcctctccagtgaagaaccagaaagctcaaaggccgacaccgacgctccttcaccgcaaaagaaagatcgaccgcgtctccccgcttgtccccggacgccatctttctccagaggcgtctcgcgttttgaattgcagagaaacagtctgaagagaacagcttcactcttttcttgtggcgtccttcgctgtcgcgcaaaccgcgcgtataccggcgagagtgtgatgcatgcaaccgcctgcgcgtgtgtccaggccgccgttttctctgggtttctcgggatttcctgtttcttttctccccttctcctcttttgtcttccatctttgctgctcttgcttccgaaaaaacgcgtggtggacagaattcatgcgcacacaatgtcgaagccggcactgcccaggccgtcactcgagagattccccgtgagtttgtgctcgctcctttctcctctttttcctctctcttctgtccttctctcgcctgtgactctctgtctgtctcctgtttgtcttttatgcttctgaaacgacgcttttcgcgttgctccggcctctctgggtcgtcggcaaacagagagacggacgactggcgccaagaggggccgccctctcgagactcgcgcgggatattgtattcctgatcgatttccgcctcgccttttcgagatttgcctctgtgggagaaggcgaagctctcagaggagacggctcttctcggaggcggcgaaaaccaacaggttctgcggtgactcgcttgtctctccgacaagcgaggaaacgtctttcttcggtgtcgacgactctgcttctcggacttgtgcttttctccactggcctccagaactttccggttctcaagagccgttcttctcgcgtcggaggaagattttttcaccggactttcagtctcctgggagcttgttctgggtctctcttcgcctcttcttgatctcttctttctctcctttcgcctatcctttgttctttcgtctgcgcagaagagcgccctcaagaacgaacttttctccggttttcgcgctcttctttgagaaggttggctacagaaaacttgctgatctgcgtagcgccactatctctctcttcaaca

SEQ ID NO: 2996 - DNA, 1809 bp, Toxoplasma gondii
  source 1..1809: mol_type = genomic DNA
tatatatcaattgttccaaaagaaacaagaggaaggagaggtgaatcagaggtgaggaggaagggagaaggatgataggggaacaggagacgagagaaaaggcgagggaggaaagaaggagcgaaaaaaagcagatggcttaacgcgccacagcgtcgtttcctgttgttcgaagttgccgtccatgttcccccgatttctgcatgaattgtggagacaattgaatctatagtttttgttgcccttgatacacttgagaaatgcatcagtcacaagagcgcgtgagaaggatcgcagatgaggacgaaagcatttgctgttgatcgatcagcagagaagcagcaactctctttttgaaacctgggcgcaccgtcaagacggaggaggtcgtcgaaaaattcatcttcgccttcgctctctgagccttcaaagaggaaacgcgctgcctgtgaggcgtcgaagtccatcttggagaccggccgcgaaaagcaaagaaacgggcatcgaagaaaggagaacgagaacagacggaaccataagagagagaagaaacagaagaggtttacaagtggacaaagggagagaagcaaacggagagacagaggaaaaggaacggagagacagaggaaaaggaacgtagagacagaggaaaagaaacgaagagaggagagaagagggagaaagagaggagaagacagagaagagaaggcagtgaggagaagaaagaagaggaaggccagagaatgacaaaaaaaaggacaagaagacagacaagagagaggaaaagggagacgcggtgcgagactccagagacaagacgaaacagggaagagacaagcgacaggacaggcagaaaggaaaagtccgatgaacgcatatgcccgaaagcgcagacgctgttctctccgcgatgagtgagcaggtttgcgaatggagataaatgaaagagaaaaagggagaaggacagacagagaccctcggctagattttatcgcgcggtgtcgtcggtaaaagagctgtggtggagggtcgatgaagaagacgacagagagagtaaggaaaggcaaccttggtcggcgaatccgcattcggaaacttcttgtgcctccaacgttcactgaagatcgaaaaagaagagtggtggactttgttctcttgtgtggagaagaagaagcaactgcatgcgcgtcgagtttcatcgccgacacagcttgctgagctggcggcggaaagcggctcccttgtgcgttactttcattgcgtttccccctttttcgtcgcccttcgtcctggccttcattctccttgcatgtcgctctcaggaaaaagctcctttttgtggaaaggaactttctcatcccagtctagagtcgctgtcttcatgctgccggcagccctgtgcatgtgagagttcctgcttgcgagaagaagacacacactttttcgtcggattctttcattttttctgtcctttcaagatgtgatgcaaagtcctactttcgcgacttctctctcttgctcttttccatcgtcaacaatggaggcggctaactttcttttttttcgcttccgcgccttcgagcgacaaggcgaaaaactcagcttccccagcctcaaggcaaagtgacctcaggtctctctcgtctatactttgttctctcttcgcttctcttccttgctcctttctcttccctctcctattccttctcccctttttccatcccctcgttctgttcttctctcttcctccgtcttttgtgccttccttccctgctcctgccttcctctggcgcccaaactcctccccca

SEQ ID NO: 2997 - DNA, 3350 bp, Toxoplasma gondii
  source 1..3350: mol_type = genomic DNA
tgtgagcacaggctgtctactctttctgagaacttggcttacctggcatgaggcgcatcgcttcattttcccggtcgcctcgcttgatcggggtgaggcaagcgaggcagttctttccgtcgacgttcatcgcgcaagagccgcaaatgccttctcgacagctgcggcggaagacgaggctcgggtccttgaaagcagacatagacacagagagactgcttttgaggaacgtacatttcagaggtcttctggggcgtgggaaactctccagcgcaggtgcaacggccccgtcgtcccaaccttcctctggacgccacaaaaaagaagagcaacagcgaacgcctgcaatatgtttacgtcaagttggaatcgctatttatcgccgatcagcaccacggcggcgaataagtcttcgagtcttgcacacaccgcccgatcggagcatctgcttttccagaaaggctgcacgagacatgcgaatcctcacttgtctgtctttgatggcgatgagggcatccaaaatcatggggccgcaggtggagacatcgagctcgaacttttgcatgtacgggcgtttgtctgtctcagggttgtaccggtagatcgcaaaggtgcgaaagtccggcaccttggtggcagcctcagcctcggaggcagctgtctgtgcatgcgcgacggaggcgaaacggcgagaggcagccgaggcggcgggcctcacggagcgaagcgcagacgacaacattgcggcgaaagagaacgacgacaggagcggcaaagcgcggaagctcgctcgagggaacgtacaccacagggcgaaggcgggggaggggaagggtggagagaaggctggggagagcacagagatgactttcggctacagggggaaaggagaaggggagaaggaaaacaatggcgagaccggcgttgactgacgctggaaggcgtgaaggaaaaggtcaggcggggcggcagaaaccgagagagacgcggtcacgcgggaaaactgggggacagaaggtcgcgatgatgcgacagaggccttcgacattcgagaattcaacacgttctgctaagcaacagaaggcgcaaaagggctgcatgcagctgaagctcctgtctgcaaaagctcgatacgtgacttgaccggcaccggatgcgacgggagggaggaaatccccgaattcgcagaaaccccagtttcgccgcgtcgtcctgaggaggcagtggcggttcgccaggcagttcgctgttcgggaaagcgttggacgtccagcgaagcacaggcgaagacggacgagaaaacccggtgaaattcgtcaaggagccgagaaatcgcgatcaacgcgacaggccccgaaagcgcctcttgttggcgaactggaaaagaaacagggtctgtctgcccgcgcggcggagctgttctttttgccgtggacactcatgcgtggacgcgaaaactcgagaaaaatcgagaactcgtcgagaaaactctttttgcgtagaattccggcctgctctgtcgcgataaactctgtcgaatccgctcgttcaaaagatagtcgcttgcgctaaaaatgcagttgcccagctgccgtgagaacagcgtggagaaaagaagactcggcttagatccggaaaccgccgtctctcccttcccgcccgggcggactgccgttgaggggtgtcggcttcctcacacgcccgagcgcggtaggcggcgactcgaggcgcgcttcgcacaaagacttcgtcacctccgcgagggtccaaaaatgtgctttcggacagactgtggaaagctgggctctccggcactgttgtaaaaaatcccccgattccgagctgcacactgtgcgcccaaccgcggcacatacgacgcgtcaagcgtggcgtttctccctcgtcggatgtctctcctgctgaggaaatagcgagggaaaccgatcttgtggaaggtagaagatctgcaggaaacttttgctgagtatgcacgctatcgtcacctcgtgaggaggtggtgataatttctctgggaaactggtgacccgcctctctagccggctggatggccagctggcaagcctgagagctgtatctgcctcgttgcggtgtctctttacacgaccgtcaaactcgcaggtgtgggtgtggcgtcgaaacacaatttatttccaaatgaaagaacgctatcgccacatttgacgcttttcgaaaaggctccggcgcgaagcgcttcgctttccggggggtgggagacgagagtctgccctctcttgctcgggtgtctatacacctcgattgtctacgggaggccggagcggttccagcacgtccttgtttttagttgttcgctattcgcttttaacgcaggtagtaggcgctccttactctatttggagtgaatctcccgtttttcctgagaattgaggtccttaaattggtggcccgccgttcctcccagagacccccctctcgcgcttgccgcgtttcgcgctgcggtgtgtctgcccgtttcgcgaatcgctgtctcgcttcgcggcgagagtctcgccgcccctgtgtgactgagcctccacgcacgcgacatctgccgtgtgaaatgaatttttctgcttttttcctgttttcgtctccagagctgtttcaaatcaaagacgtccgcaggtcccgtcggttgtccctcggaagtacccctccccgtgcatgcgttttgcgcgcatcgacgagcccgcagcacagagtcatgcggtctgcggcgaagacctttggggaaaccgtcgctcagcgctaatcggtttgtccgttgatctgtcagagaaaactcccacctttttctccttttttgtttctgcttcacggcaccccccacactcgtcgatggttgcgtctgtgtctccgtctttgagcaagccgtgatttgctggccctcccccgcgccggttctcgcttcgcatttcttctctgcagcgcttcggccctgaaaccttcgtcgttccccacttcgagtgtcgtttacagttcctctttccgcctctcattcggcgaaccacgccccaactgctttcccccatatcggcggcgcctgtgcgacctccggtctccacgcccgcgcgacttctccgcctgctgtccgctcccgtgctgtccttctgcaccggatcttcctctggctgaaccttctgcccgtcttgtctctcgaattctcctctaccctcttcttgtcttcctgtctgcatcgtcgtgtctctcttgcgtggggcagcgggtgctgttgagtccggcgctacgtggctaagttcgcggacgccgcagagaaataccttggagcgttttttgacggcgaaggataa

SEQ ID NO: 2998 - DNA, 3287 bp, Toxoplasma gondii
  source 1..3287: mol_type = genomic DNA
tctttctcctcgctcgaggtaggcgcagatgtgcttgtcgaagaggaaggggcagtttgcggccgttcggtcaccacgtacacctcttcgccgcccttctctcgacggctcgggttcgcatgttcgactctgcgggtatccaccctctctgacccccacggcagaagcacatcagcagcctccagtggagcttttccggagacagcggccgcctgccagtacggagaatgaaacagtgggttgtctgcgtctccctctccatcgtctgagcgggaatcgaccgccctttccccgcttcctcccttcgcagaaccgcggaaaggattggcctgcgccacagatacctgcgctcctcttgcatgtcctggtccggcgtcgcctgcatgtttgcgtctgtgctctcgctccgtcccttcgtttcgtgtctctgtcaataaagcgcctgtctccaggccgtggccaaacaggctgtttgtagcgggtgttgcagtggcggcgagtgcatgaggctccggagaggggcgccccgaagagccccctgtgagggtcactcgctcgttacctaagaacgagggcaagaccccgagacggaagaaaggggaagaaagagagacaacgaaaaacagagtgaacaaaacagacggcgcagaacgcagaggactgcgcaagtaacgcgctgccctacgcagagccccacaagagagctgcggcgccttacgggaaagcggttcgctttcgatgccgcagggaggagcggaaagaaagcacgagaaagcaaaagacggagaaggtaaagaagctgtactggaaagggcaacaccagccgagttcctagcatatggacggacaggggaatctactttccctagaaaggattgtcctgtgcaggacctatgaaatttcgcggatgggaaactgctgagacaaagacacttcctgggtctttgcctctgacgtcggcccctcatcacgctcaacttatgacgctactttgcgagaaatgcaacgcgagaaactggtgaggttgccagaaagtgtgtttgtatcgtgggtgatcaggaaaaccgtggggataccggccccttaactgtgcaaaggtgtcattcacaagaaccttgtaacaatcttgtaaaaaagggaaaccgttgagtttctcaagaggaaaaaacgctgcgtttcgtccgcgcgcgaacgatatgccctgaactgcgttgcattggggaacggggcccgacagacggcgcgaaatactttcggctccgagtctcaaaccatattgtagggaccaccaggaaaatgtcaagcaggggccaacattgccactacctagcgacgaacacacgatagcggagagtcacgctcaacggaggcagatttactgcgatgtccccctcgctcttgctgaatgaactgttgctcggtccacaagaaaattggcagctttacaaaatcgtcttaagcacacatgagaacaatcaatcgaatataagaataatctgccctcgggccttgtaccagcagtgcgtaaaatacagctgttccgtgtcgagtcatgcgacgttgcgctgtgaacccccttccccctccccccccctgagtttccctcgcgcaccgtttcccgaaagagagactgtcgaaccctcatctgctcatgctcaccttctaatctccatgttacttggcggctagtctatccttcatctcctccaatatctgcctcctcgttcgaggcgctctcaaggatagtagtcagtggaacgagctcaagtgaaattgcagcattgaaatgtgaatgcagcaaccagcgagagtagacactggatttgacgaatggaaacctgaggaacagccgagcgcagctgttgggcagagaggaattctggagacatcaggagcgtttctgtgttcctgagtctttatgacggatttagttgttttgcttcgctcccctgtccagcgcacggacttacctggtacctggagtgtacgcagacaaactaatgctttgctaacatgtggtacgtaagctgcgctaactcgcgtcagccgcgaggccacatagtgcagtctaccgtggcgggcttttgttttgggtctccggaagaacctaagggatttcctcatttttgatccacatggtaaagagttcagcagagcaacgctaggtaggaccgggaaggaaaacatcgactgaaataccagttacatcaaggattcttcgtacgttttgtgcctctgagcatcacagattatgggccgcagcaggcaacgtaccgctgtcttccggctcgcgttctctctggacggccagggggggaggaaccgaggtgagcatcaacacatccggcgacgcgcgcgccagggacgagacagcatttgccgatggagcaaccggaggagacagacgggtcatgactatcgccagtgctacatggatatccagttcactgcttgaaaatttgacatcttcttcctgcttcggtaccttccgaggagtccttctctcttggcgtttcattcttcacgggccacgacacgtggccggggagaggcgcggtcgcacaaatccttttctgacagagagcaattctgaagaaccaccgcgtttctgcattcgtagctctccgtatcggattttgtagggttgatttctccgtgttccatgtcccgttcatgtgttcaggacgcggtagacgcatcatttctcccgcagcacccgtccccggagacgtccaaaacctgcacgacccgccgcatcttcagcgcgacggggtggtctctataccgcctgcctttgttcgtgcgcgtgatgagtccctcgccgcctacggtggagtcgaaatgcggtcatttcatcatctcgcgttccttcgaaaacgtatcatttatataggaaggaatctctccatcttcacgtaccggcgttccctggtcgggtgcatcttccctccctcgttcgcgactcgtcagtccagcgtctctcggaccaccacggttgacacagttcttgctcattagatcccgtggaacatagatacaaaactaataggctttttaaaaattcattcgtctgtggtcccgccgtccattcgtttccctaaagtctctacaaaaccagatcctggcaccgccgtcccatcgcgggggtcgagcttcggaaaacggaacgaccctcgcacactagaagaacgcggagctcacgccacctagcgagggtgcttcttttccgttcacccgttggaaaccccggccggttttctcacgggtccactttcgcacacccgaga

SEQ ID NO: 2999 - DNA, 1913 bp, Toxoplasma gondii
  source 1..1913: mol_type = genomic DNA
agttgtgaagcgacttcgccgccacaagtgtagccgcttattctggccggacattcagatgcatttgcagaccggaatcgcgaaggcaagtcgttcagcatgcaaagaaattgcatactacagtgagcgcatgcaaaccggtcttcgatcaccaccctgcgatgtataaatagtccttagatgattgtatgtcagccggtaagtaattgtcgaccgtgcaagtttcaagtttaccatgaaatttattggcagcagagctaattgagaaacaaacagttccgaattgggaacgcgaagaggcagccgctatcttccacaagcacatccggtaataacacattccacttctcgtcaccatttcatgattgcttcgaagacaacctccaccgcagcgaccaaactcagaaacttcacttgaaaagtgatgcgaagatacgacttaagactcgcaggaaaactctatgttgcatcgtgacacctttgaagttgcgctgtaggtgtccggatagagcttttgcattcgctgggaagtcagcttttttcctgcagggaggaacacaggggtatgcaaacgcttgctgcgagagcgaagagaccgtgtcttgagtttagtctgtttcaatacggggagcacagccacgtccttttctcgtagcctacctcttcaagaagttgtgtattcgcgtatcacggtccttgcggacacgcggagtctgcacttctggctccccttcaaaattttgcatagtctgccgtcccaaaggagtatactggttttccagcctcgtgaagaaagcattagagttgtcaccgacatcagtcaggatggagtaccctttagattacagtattgctaaacactggtacgctccgacgacacacgcgagcgtacaatgaacacacagagagttgttttcgtaagcaaaccgtaggtcgcgcgtgacgatgcagtgtgaaccagatcactggtaaagtttagaaccgctgttcctttgaggggcttgcgttctgcgacattccaaagcctgcgtttataagccttccgttgacaaagagtcctgccactcacatggaccgagcgcgacaagctacttcagctctcttcttagtggcaagaacaggtatcttctagcatattaggcgggattgaaagcaactgcatccaaaactggtggatgtcagcatctatgccatcccttattaatctaggaatgccatcggagactcgacctttaaatacccaaatgttaattccccatcatttcatgactggcgttgtattcactggatgagttgttagttgggtgttcagcgtgatcttcttggctgaccccctcaacccgtagggaatcctcgggcaaaagtttgtggcctcccaatctatattgcatacggaagctcccaccatgcaaactcttcgaaaggggcgtttctgttttaaatgtcttattcctcagttcatgacctatgtcctgcgggcctacattgtctctgtttcgaatgatcacagcgagagcgttagccgttacacaaaccgggcttctctttcggaccatgtgcagccgttgcatgcgttcccgcacaaactcttttccagcttcgcttgtgttttcacctgtcttttgttcgctcctgagagaagaaaactgcccccataattcctccataagggcaatttcgcttgtgtccacctcacaactctttgcacgcgtccgtcgccttcccttgttggtggtctgtccacctttttgactggaaacctgcgagttgaccggacccgtcgctctattcaggcgcaagttgcggcgtttcgtctcttgcctttcgtttttcgtgctttcttcgtcttctgtatagggtctttccttcttttcttcgcgtttccggcctttcgcttcctccgcaccacacca

SEQ ID NO: 3000 - DNA, 2836 bp, Toxoplasma gondii
  source 1..2836: mol_type = genomic DNA
cctgtctccgtgctgcggatttggcacactgcgttcctctttcgcagactctggtgaacattcttcgccgttctcgacgcctccggtcgtccacgcttcgccggggctgattgtgagactggtggcgtcggttctcgagaaaacgttctctttgtcggatcgaagagctcctctagctccgtagctgccggcctctccgctgcacgttccggtgtctccaggttctgcctttgcgggcgtctggctgccgcgcggtctccacagatccgagaaacgcgaggcggcgactcgcgtcaggtcgaaggcatttttctccggagacaggagctcgatcgcctgagacgcgccggtgtctccatccgagagaacctgcgttggcaggaaacccagttgggcgtcagaggtttctccctgctcgccgtctctttctctgcgttcctggatacactgttccgcggcttcttcagagacagacagacagctgcgggctcgagcgccgaggctgaagacgccctgctcgcgacgtctcttcttcagcgaagcgagcgacgggcgttgcgactgcatgttggcgacgagaaagtctggagacacacagcccacaggtcctgactgcgtcctggggtgtacgtagactccgggggatccagggagcgcagagacgggagcgatcgagaagatacgacgcgcgctgtaagctccgccaggagttgcggcaaggcgcatatctctgtgctctgcactttccctgtttctcgtcaggatccacctccgactgtgttcgtttcttgctgccccgctggtgtacgctcgccgtttccccactcagaactcctctgtcgtcacgcccctttctgcgtctggacatgtctacatctgcggtcagaaagagatctgtcttctctgctcagaggcggagaatcccgcgaccctgtttctcaccccacaaccgatgtccacaaccctctacgacttttcctctcctttctttcactctcttggttcttcactttctttctttctttgtcttgttcctttccccctcttggttcttcactttctccacgggcgtgagtcgcggccgttcttgagaaggaagttgctgcacaccttccggcctcgagaagagttcaatgcagacatgtccagttgtcaacttgctgtttgaagcagttcgtgacggggcagcgacctgttcgcgcccgagcttgcgcggagacgagcgaaaaaaacgaaggggagaagatggaagaagctgaaggcaagacgatgagacaaaacgcatcaacagcaaaaggcgggatgcagagcttttcccacgaacaagggaagagagctggaaatgacgagcgcggcgccaggggggcggcaagacagcgacgcgctgctctcagccgccggtttatgtacactgcacacactgtcgccagatgagagagggcgcgtgcttgcgttcgtggacatgcaagcggaagaattttcggcagttttctggatccaaaaaaggggaacaggcagtgtttgcaaccgggcaccgaaccagctccggactctactgggagcgcaaaatcggtagtcgctcgagaaagacagaactccttggaaaaactcacgccttcttggaggatacaacccggttcgcagtgactcatgagttctgcgtttgaaacgaagagaatatacgcgaaaaaagtccggcgaacaagcgagaaaagaagccacacacacggttcgaccaccgacggatttctggggtgtccgtacacaccttgtcttgtcccagatgagcgcggctttccagccgcggggttctgttggacctagcggtattgtttatctggaaaaaagctttggttcgttttctttcactgtgtctcattcttgttgcgtctgtcaccccgttctccagccttcgaatcgctcaggtctcggcgacacagccgcggagcccgcacggagacgagagacgtctcatgcgccctttcgcgtttttttcgcgcatgcgcgctgtttcagtctcccgcaaaggacgaccgctgccgtttccgagtcgttgcggccgcagcctttttgaggacattcctcgacccttctgtggaggtgtctctgcttttcctctttgcttcggccttctctcgctttgtcttgcctccggatcctccccacaacgtctctcccgctaaacagtcccgacctgcgccgtatgtacaccccgccgtgtctccgagcgcggccggctcttcgtgtggagccctttgagcgtcaagaagcgaattcggagtttctcgctttttccttttgccaaggtagaagttcttcttggaggaaacggggaatcttgtgaggcgagcaaggacgcgaccgcaaacgacgcacctctcttgcgcgtgtgtggccaatgtagtcgagagatttgtcgtcttcctgacgttctgcttcccgaaaggaatttttttctggagacacgaacaccatctaggccgcgggaaactcctttttcgccgcatcgtcttcttttcggtgtctctgttcgtctgtctcgtccctcagttcttgccgcaattcgttcctagtcgccactgtccctcgttgtcttgtcgttcgtctcccccattctttccgactttcggactttgcgttcttcgtctgtcgccttcgatcacggctgtctccttcattccgttactcttcccggttcttctgcgaggcaccccagagtctccctcctgcgaccctttctctccttccctctccctctgaagtcttcctcgacgatttttttttcattcttcgcgtcccgctgctgagtcgcttctccgttctcggcccgccgcca

SEQ ID NO: 3001 - DNA, 2773 bp, Toxoplasma gondii
  source 1..2773: mol_type = genomic DNA
ttctagcgaattttgtcgagaaaacagactccgctgttttcgactagtgtctttcattgtcgagacactgcaggaaatacagcgaaaaggaacgaatggtttttggcggcgatgtgtaggaaccttcctggtcattgtctgcgaaattgctcgttgcacgccgcccaaaactttctgtgatttttttgttcactcaaaagttgcgacctctgtaagcggcctctttctaggaaccggcaggttgaaaaacttgaatggatttgttcacatcaataagaagataccttccttgtttttggcgtcgaaacaaaaagaacatctgatgccctttcttttagtcgctgtcggtggtgcggagtcaacgcacgacccgttaccaccgtacaactgcagcaaatgcgccccgaggttgttggcgtcaatgcgtctccccggttctttctagaggcaattttatccattccctctatcaatccttctagctgtacatcgctctcctccgtatctatcgctatatatacctcgctgcgtcccgacttgtctcttgggctaggaatgtgtcgtaccggcctccgagctgacacctctcaccaacaatgtcatcacacacgccctcctgatagatctccttgcgcattgtcctggggaggtcgccaagtacgtatgtggtaaaagcgtcactcagccagcatgaagcttccgagtacctcagaccactctgttggcagctcgatcgtgcttctacttctttaatactcgctcccagtggggagttccacgggggagcgactgtgagccaacctagcggtacgccttgcgcttgcgactcagtcaacacacaagcagcatcatggacgaccgccgcgcgctacactgtgttctcgtcattcagtttcgggtccaaacgtcaatgcagagaccatgagccgtcgatccagcgacgaaccgttagatatcaaaaaccaccgacggcgactcaggttgaattctcacccaatccagaatctcgggacaactcacattcccgccgaacctggcatgtgatgtgacaatcacaagaaaatcccgtgcactctcagacctcgcatagaccccttctgatcttgactcgccgctacagtcccttaacccttggaactcgaacctggaaatgttcgtttgcctcaactggaaaaatgtgtcagtgactgtgtgccgaagctggctgccgccgcgtactggaaagccaccgaacagcgggcgtgtcgccgtgcaccactctctgtggtcgagatggtggaagttttggtgccagtttacggttgttagcctggccggtgatttggagactacgacgacagctgtggcctcgcagcgcctcctgagcagacaatcggatcgactgtgtgtgtcgtgtacccacttcagaagggacgacgctgggagtgtgatgcgactggtcgttgcctctattccgatgtgacttcggggagtgatgcggactgcgttccgatttgtttccggttctatcaacggcggcacataggaccccgccacgtgcttcaaccagattctggaggtcaccactctcccatacaaaccaaagctggaacgttttactgcgacagactatcccacaggcactgttccctggcagaaaacacacatgtgttgaagaaaatacaacgcacaactgtctggctctcagtcgtaggaagaaacgaaaaatcagaggagtacgccctcgaccacagcgaacgggtaagcgtacacctgattaatgaaagacgacttctttgttcattcgaacgcgctttaaagttacataaactacctttttctgggcagtataaactaggagttaaactattggtgtacgtctacggtggggacaaataagtttctggtgtgctatagtccttacaaacttcctttgtgtcatattggtaccttggctacttggaacatacttcgtatccgatgcaacattaaaacatttctctgttttaactctcgagcatctcgtaccgtcgtttgtccgagacattcggacacaagcacctgagatttcctcagattcgcgttgacatctgtaccaagcaaaaaaaagtatattgttcgacagggattcacaaaatgcagcgggaagctgaaactagggaagcactagtgaggaacatgcaacagacttttctccaatgaagaccagggctgtctccagtcagccgttgcatgcacaggcttgcgatccgtctgtctctcactgtgaagaaagggagagaacaaatgcaaaaaagagacagaacgtggaagccgctaccataaaagcaatgacacgtttcaaaacaacagttcctttacaaaaatccatttttcttcctgggtagtcctctttcgcttgctcactctttagtcctattttcgcgttgaccgacaacagcgctgtctgcgggctttgaaaacagatggataaaagagagcgaaactcgatccctcttgtgaagatttccgccactgttccccgccgtgtacagacagtttttttgaaagccgtttcgaggcctgtgaagctaatccgggggacaccgaacataaggagacccctcaaatttcaacatgcctcgtttcctctcactatcaaagattgggctgaaactcgaggaatctggttaaacaaacttcatcgccctctcgaactcctggaaactgggtaaacgaatttccccccatttcctcaacactctggaaactggtgaaacctatttactcgcttttctgaaaaggttgtgttcga

SEQ ID NO: 3002 - DNA, 4552 bp, Toxoplasma gondii
  source 1..4552: mol_type = genomic DNA
attgtcttccctctgtgaaacgaactccgaaggaagaattctctagcttcccagcttgccaagacacagaagaggacgacaagaaagcgcgactcgtgtcccttgtccgacgagcgcgttgcagggatgtgtgtgtgtcatcgtgtttcttcaaggtcgtacaaagcaggacacagtccctaggtctatctgtccgtgtttgtctttcccctccacaaaagtccttcggtacggtgcatccctcttgaagagcagaaatgggggcatcaaggctctgcgggcgattcgaggccacggcatccggggaactccggcacctcaaggaaggtcgtgcgtcggagagaacgaagggaggagagtctcgggaaggaacagacacagaaagagacagtggtactgctttcgtagacgtaaaagaaaggtcgtgacctgcagccgagaaagacgcgagaattccccaaatgatcaagggcagcagcagtcgccctggcctaggtcgctgggagcgtcgcagcggaacgttggaagaaaaatgacgagaatcggaagccgacaaaaaagggaatcccatggcggggtaagggacagacgttcgagggggggtattacccagaccgacaatttctcttgttctcccttccagaagctggtcatttcatcccgtcttcttggcttcgcacgaaccacagaaggccaccaggagaagggagaaaaaacacgttcgtttccttcaccagagtagagcaggggaaaggaagaagccagtgcagaagcaagatctatctcgtgcaacgctatggccgtgttggacagcacaggccctgggatgaaagaaagaacgaaacgactgcacggtgacattcggaaaccttcaagaagtgaaaggtgattagaaagcggcacggcgacggaagacaagaaaagcacggagttcgtgttgcagatctgtcttcaaacccctgagaaggagacgggtaatcgctgtccctcactcattgtcttcttggggagggacggatcacctagattgtaccgttgacagtcgagctgtctcccatcgcaccccccaaaacagactccatatgtctggcacagaaacttccagttgcgggggtgtatgacatgtctgtgccgttttcctggcaaggctatctaggcgagtctttgacgcgataagagtccagaatcgacaggaaagtcaatagaaattgacactccaaggggaagacaggagggcaggagggagtaagtgctctctttccgtgctgcgagtatcgttgctagatctgaaaaggaaaagggattcttcgtggaacagaatgtcgcggaaatggatagagttgcgaacgaaaagcgcataacccaaatcccgtttacacttcatgcggctgtgtcgaaaagtcggcagagctgttgttttgtctccacagtctcgacatagcatggcttttcgcagtgacaattcgtcgtcatgtctcttcggtttccttcttgctgctccctgaacattctgtcttcagttgttttatgctagtgctggctgtgcgacaccgtcatcctctgtgtgctcatcggagtcggacacatctcgcacatgcctcctattcgctgaagctgatgtagcacgaaattggcgtgtctcgtcgttcccattcccgaattgctgcctctattttttgctcccaaatcctgaaatgcctgttctctgttaaatagagaaccaacccctccgcatgtttgccttctccaccaacaagcgcagcaagggctgttggtgtcttcggtgataatattcgcacaggtgtctcatcgtttttttagaagcaaatgcgtgaagagcgtgaaaatgtcttgcctgtagatatgtaggcagatgatgcctccagatatcaaaatatctgatctgttgggtccggtaactcaaaagaaagcgtgcctctggaatctggggatatcaaagaggttggccggttgtggcatccgtgtgttctgtcattctgtccgacgtctcacttctgaccacagattcaacgtttccctgttcgctaacgccacgcaaaccagagacgtctcggtggaagtagcagtctatgagttcggagcgcacacgctgcttagctctatcctacacttaattcacatttctttatgttgattcggcagctttatttttcggatagtgctcagtggtatgcacctggtggtggtcattgtctttagaaacaatacgacgaacgaagtgaatggtaaacacaagcgctgcttttctgttttacctgaagagacggaccgcgaaagctgtgccagaaagttgagtggactcttcctcacctggaatcagccatttgcgtctacgtttctgggtcgcagttaatcctgcaaagaaggcgactttattttaaagaatgtagacaatatggctgtggtcggcagggaacggggctgctgtgatacagcgtcttcggaggagaaaccaaaagtctcgggatggcgtgtaggcttgttttcggtgacaccgaataaacgtgcatgccacctggctgaagaccatgacagacattagggattataatagttgtctgatcgcgccacgcggtaggcggacagccaacagactggaaaaagtagagaggaacagtctagtcgctaacgtcacctgaagaagatcgtgtctttccttgaacacccggagggtttttcgaagccagtggcgtttgcggctgctgccgcgtcgcagttgaccacctcataaagaaagaagtttaaggctcctttcaaaaaatggactgcatgcttgaggaaatgttcactagctaagctgtggctgcttgtgtgtagatcaatacctccatatgggcgcgtgacagttcgaccgaggaacgtggactataaaacatgttgcgtcagaactcaagacatttgattgtcagtgtaccggcgcgcagcgcatttgattgtcagtgtaccggcacgcagcgcaattagtctaataatcgtggtgatcctgtctcattcggaagaaagcaccgcgaaacaaatgattaagttgtggtgcagtcagcgcttgcgattccttaccccatcctgcaccgtgcaagttatccacagataagcaacagagcgtactagagaagaaagtctttgttatggcacacaggaacaaaaatattatctgggcgatggtgctggctttggctgactcatggcgggtgctggaacgagcgtttgtggaggaggaagtacattacgtacaatttgcacactaaaacaaatgatgaaggaacgacgatattccgtcggtcactaccggtgtgtttgtccacttcaccggcatggtgagagaaacatccaggggtctcccccggtacttcccacgtttaaaacgcgactaagcggaggccgtgcgagttcgacgctatggaccagttgattatcaagcttacctcaagcctgatacgacaccagaattcgctggcctgcagcacagcgaaatgtcacacaaatattgttttaccattacgactgtatcgtgaccaaaacaacggcaatttggaaagcgagaacaaattcagtgcgccttgaccacctcgtcctaccgtgttgcgttccaccacaatacatcacgcagatgccgtgcacactgtaagtgctgccactgtcgttgtcaatcacactgtacgtgctgccgctgtctttgcaaattggaacaagtcaaagcacgaggagggcatgacagtatgactgagaaacgtcacttttcgttcgtcatatcaagcagcatgaggaaggatgctgtctgtgttacgtgatctcatagaaccccttgcggcgaccgttatctcatgaggcagtcgccctcagagtacgaggatggaaggtcagaatagtagacatgaaggggtgtatagtttttgttgtactgagtccagtgatgacgccgcacccgccatggcccggtctcaggaccattcaggtagtgctacgatcgtgtagcatttccggaaaaaagcccaaagctcggagtaggaagccacgcttcacgccctcaccagcgacaaagaagtgcccatagcaaccgctgctgttagctttttctgactaattcattacgaggaagcctagcagcgtatgctgcgatgactatttgaaaactttctgcccagtggtcttgactgaagaaacacaggcgagacatgcaaccgagacgcatgcgcgtgacccgtctcagtcttcaatgcatgtcactcgttccattgtactagcgtcagcgtgagttttggcttgctgaactgccatccactcactggcggctgcttttcctggcctgccttggcgtttgtctcctacagctttccatttacgttgccgtgtcgtccagttccaattgtttttccgcgttgttctccttacactggtcatgttgcggagcaagtaaaagaacaagtcaatcatccggattttcctggcgggtgcaactgttctcttgtttttcgtcttttttcagttgagtgtagaggacggtctgaggtggttctttgaaccagagcaaaca

SEQ ID NO: 3003 - DNA, 2675 bp, Toxoplasma gondii
  source 1..2675: mol_type = genomic DNA
acaacttcaaagtctacttgcgcacccggttcaagaaagtctcctctgcaaagcccaggtgagaaaggaagttgctcctgcacctgcaccccgcaaagccggagaaggccagcggactagacctgaaagagtgtgttcgagtctgttggatctggccaagttttagcctcgacaacaatcgagagtgaaaaacgtcgaggaagcgtcatttagttctctcgaggtctgttccgcttgtatcgacgccggacgccacgtcgcccaacgtcgactgcggggacagccttcgtgctgctaagcctcgtgggcggagtgacctcctctgccgagcgcgcggaaagaaaaggccgacagagcaaaacacagagtgctaccaccacggtcggggttcacgaagaaaaaactaccggacgcgattgtctccttggaagacgttcaaaggtgtggagttccctgtgcgggaacgctaagcagaaaggaattcgactcttttgagacagtctgtaggagctacggacaacgcagttttctgtcgcggctcccggggtcttctccgacgtggggaatgccaagaacagcgatgcaagaggcaaacagagtctgcggtggatgcacccgtggtaactgaaggagctcagtattccgtttgtgcctgtcgaccctgttgtgattcattcgcagagcctgtcgacaggaatcgcgggaaatgtatttcgtctgccaacacttcgtagggcgcgaccgtctcgccgaagaagtccaactcaagggctgcttcaccggaaaagaaggctttctgtgacctctcgcgagacagagagcagtgccaagtggaacggacagagggggggatgtatatgtggtagtggcagttcattgtctaggtacgacatttcgttcctaatgccggctttccacggagggtatgggaacttcgtcgtagcagtctatactgggtcgtttctgtgaaagcgtacacacaagaaaacagcccggtgcggcctttcttgtctccttcgcgaaacgttattcacgtgttcactgtcttgtcgcgtgtgccgaagacgcagaccgtgaacgatgtgggggcagccttgctgaagatggtggaactacgcaggtggactgctggtttttttccgctgtgaagcgtcctggttcgcttttgtccataatcctcgttttttgcgggaaaaagctgaagagggaagaaaggcgacacgcgcttgtccgggtacaagacacaggctgagagcgctgcccacgttagagttcgacgtctttccagtcgcagacatggctatccgaggcgcctgtgtgcctctgcatgcagcctcttactttccctcgagcgaaaacaggtcctctgggagttcagtagcaaagaagcgagggaccacgacggctgcgttttggcatggccagatgtatacagtgtactcttctggtggcactgtggtcaaacaccccctatgtcgtgtagagcttccgtgtacccgacgaaagtaaaaaacagaatgctgtttggcgttatcgcatttctgaactccccttttgctagccagtaaactcactgcagccgttggcggggcgctgagatgacaggcacttttgattcatcagaaaaaaaaattgagccgagtccctgcgacgtgatcgtggcaaaacggtgccagggtagcccgcgtttcaacaagatagaaacgacaccttaggtccgctattggctagcgtctttttcccagtctctctttgagtggagtctgggtcggagaacattctgctggtttaggctgtaagcagaggccgcagacactgtcacacagccacacgaatctgagcgtgttccgggttaaacatataagcaagcgctctaccgtgttgctttctaccccgtggacaaatggagtgctcccagatgaagggatacgaacaactcgcttattaagtcatttatcccaagggaaatcatgtggaaaaggcctctcataatccgctcccacattcaccagtggagccacatcccaccagacaggaatttccaagagcatggcgcgagactgcttttgttcagtacgggaatcgcgtccgtcagccagccgatacgtgcgagaaggactgtggcttctgcaccgaaggaactctgttcgatgcttttttctgcggtcgctgttttggggttcagaacagtataccggaactcatgtcgccgcatgggctgtcgcgaggtctcgaccactcacaaactgactccacactgacagaaaagaggaagcattccagaatgtgttgtatatattccgtagtgtacataaacctagatgacgggaattgcgaagcctgtgcgtcttgattcgagcggcgctagcgtccttgtgggaccagacgatttcagtgctttgacttgagaacattttacccaaactacgacaagcaacgagctggccagctttgctgcctcagaaggcacccagtatggtccaataacggcggctgttaatagaggatcgtcctccttgaatgcgaaccaacgcaaagctgtgatctgacgtgtgcgtcgcgaactgtgtctgctactgggttgccgccagaggcgtggacatgggggcgccgaaggccccccgacgttgtttgtccatgtttgtttcactactagttttgtcttgcgagtttca

SEQ ID NO: 3004 - DNA, 4728 bp, Toxoplasma gondii
  misc_difference 4256..4275: note = n is a, c, g, or t
  source 1..4728: mol_type = genomic DNA
cgccgatggatactctgacggacactgaaatgaggttcaaacacaagtctcccccttcacaactcgctgttccattttctcgttttttccgttcaacgtgtactgtgccgactggacggcatcgacaccatttgtcctcgattgtgtattgtccttcttccaaaacgccctttccctactcacgtcgcaacgcgagtctaaatttgatgcctcgcttttctgtcgcgttctagccagtgtgtgcgttgatttctggtggttcctcggccacccctaaattctctgcttcctcttcatactgcactcgtgtctagtgttccagtttcctctttcattggccccgttctcgtcagcgtctggctgctggagtgccgatacgtttgtaattcttctatgcttgttcacacaatgtcgccattcccgatttgcatgtataccttcaagaatccagtgcggatttcgggtcccttggtgtccaggagaatcgccaagcgcgcttcaggtctttgcttcatggcttcctggatgttctggacagtgcgtgcgtgtgtttcgtggtcgccgtgcgagaagttcaagcggcagacgttcatgccagcgtcgatcattttgacgagggtgtctacgttccagcatgcggggcccatggtgcagacaatgcgagtgcggtgggcagtccagtcttcttcggagcgcggctccagaatctgggacatgcggatgttcgtgctttttcccagctgctgagtcatcacagaactggcggacacgaggcgggcaacgcggccgctctcgacggcgccggcgctcagtgtctgcggttgtttagatgccattgtgataagagaggagagcaggtaaaaagtcaaaaagcccaagcaaacagttgtggcaggaacagaaaaaacgcagaaagcgtcacacacacgaaccgacacggagaggtgaacaaacctcagtgacgacagacgctcgcattcgaaagtgttcgttacgggtaaaagcaccagattccgcacacaggcgagaaacggaaaaaagggtagcacacgggcaaagtgttgtgtggaactgcaatgcactggagtcacgtattcgacgcaaaccggttgctgggagacagcgtgtcgacgcgcgggaaacgcacacagcgggcgggcggatgccgcggaaccgaaaaaaaacccacgcgacgcaagatctccccgcgattctctcccaccgtaccccgttctcgcgtatcgtggcttatgcgtccaccccacgctgtctcggctgggcacagttggactgctttctagaaggagccgtcgaccgggttatcgcaagtttgcaccaagctgtcaattagtatggcatttttccacgtccattcgggtagagtgaaaagcagggcgaagaggcagcactcgttggagccctttctaaccgggtggttctgtgtatcgtgggcgtgtcagctgtagaagtcagttgaaaactagctacacgaacaaccgtccagtttctggtgaacaaaaaatgatgtgctcgacagctacccgcaatgaagtaggcaatgagcaccgcactacggcggaaaaggtccgcgtctgatcggcaggagctcaacaagagagaacatatttcttcacgtgtcggttggcagtataattctgtcctgaaaacggataactggcggcatttctgtttatttgtgaacggccggtccgcggggtcacgcgtgtctgttctgtctcttaataggaaactgcactaccggaactggactgtaactcaatcggttacagtgtcggggcaaaaattcctaccacaataggagcctaccagggagtgtggctaaattgacagccaagagagctcagcaaaacacgtatcttctgatgagacgcaattgtgcggcataaggaggcaccgtgttggttgaagttcttatgtgggtaccgtgcccattcgtctctctaggttgcagttaccactatcacacaacggttggcgattcttccgacagctgctgctaccacgtgagggagtcaaaattgcctagtgcggctgagatcacacccctcaaggacacgttgtgagaggcaagtgtgcagtggcatagtctcaatatggcggtgtcagacggacattctggtggcgaagtaggtcgttggttgaagcgaccgctacgccattccctactctttgtttttactgtgtcgttcacatggttgcactataaggctcaagctgtcagcatttaggaacagaaatctacctgaaagaggcgcagaggactccgccgccacgttggtcagcacgcgcagtttcgggtcatccgcttgtttccgagtcaccagtattcattcagatggcaccgaaggttctatgcgcaactcacagtggtccatgtcacaacttcacacacgagcggcgacacgttccactctcgtgcctctggatacatgcaagagatgatatcgacaagcttgccgacggactgcctaccttattgaatccacaagctctttctcctgagtgagccgccgtggaggcacgagtcgttttacctgactctacagggtatcagtcggagactcagaagaggcgatggctttgcagaagagatttaacaggttgtgagtacgacacctgacagaaggctggccttgcttggtggtgtcgtgcacggaggttcttgtcattcgctctccattctatgttggcattcttttatgacacccgctacggcacaaacgactgtacatcaacggttaaaacactgtgatcgggcgtatgtgtttctttccgccagtgatgccacacacgtaatatttctgaagtcgtgagggagactcggcatgcaagtgaggcctctccgactagtcagatactcttccatatgaggggtcgcccaaggctacattcacgtccacgaagatgcccataacgaacatttggtatcgatgtgacgatttacgctctgacacaacagcttctctctagtgtccgagcttacaggggtggctttttttggccggtccgatggacgcagtcaacttggtggatggatgacggactcgacactcacgcggtcgcatagtataagtgcgcttggcaggacctagttgcgatgtgtcagagaaaatagcgagtttctgaggatttaaagagttctcttaatcttctgcttgatcactagtggtggtcgaacagttgactgaagtcaggataccatctctgggtatcgagccatcacctcactccgagcgttcgagaaccgacatcatcgcccaatttgcacgaccatagacaccatgtcgacttgtatgtttcgtgttcttcctgaggtaatgtagcgttggctgttgttggccagctagaaacgagcgcacggggaaaagccctggtgagtaattccggttctaaggcccggcgaatagccggaccttgcaggcatacgtggcatttatccacgtgactgtggcttgttgccagtcgtttcaagttgagacggcgatattcgcaagaacgcgcgtgtagccccgggtgttgcccctgaggggttagaccgagcctgtgggttgacttccaaaacgtggacggggtttgtaggtcactctagactgtcactctttgagagtggttgcatttacggggaatcgtcgtcggactgtatttacacgttttcgcaacacggcagctatttagtatacagtctcgtacggatgcatccgattaaattccgtgcgtgtctcttacccagcaaaccctttttcgtgcgggaaggatcagaggtccccacgttgtcggcaggcactgatactagaaggagagtgccgtttgtaagtgtatcgtccactgtgcatgcaaacaaagatcaaattcacaagttgcctaactatgagaaaaaaatatccgcgatcctgacaatgtctcgttccctggagctccggcaatctcctggctcagaggacggcgaagtccccgctaacatcgaagaggacgtcctacgtgagatgaagtggttttattcccggtgatgctcatctgcctttctagacaatgaatacaacaaaagctgccgcatttgatcggttaaaaaacgggctctgccgcgtccctgaagtgatgagttctccatccagacttttccaaaccgcaagctctgcaacgattcatgttgacggttcttcttgtcaatcaaggaagccaacacgctatatgaattcacgcggacttctgctgcaatgccgggtccccccaaaaannnnnnnnnnnnnnnnnnnnttgttgtgcgctcggctgtttctagtgttgttgcagtctgtgattgcccggaggacgtggttcgaacaaaccttttcaacgctcaaaaaacccgggggcgctcgccatgcattatactctgatgtgcgttacccccattgattaaaaaccctcgggccattgattcatagagaagcttgagatgccgttaagtcggtgacgttgcgcttcagtcacagccacagtccccttctcactggaatcgatcaccagggttggcgcatttacatgcagatgaaattaggtgcgcgacataatcatctgggcaaatatatgcacctctgtgcgacagcaatacggcgtcgagcaggcgccggccagtctgtccacctggccgacagaacagtgagccagacagtgagttccggcatgtgagttgcctcagcggcagggggtggcttcaatttagcctga

SEQ ID NO: 3005 - DNA, 2401 bp, Toxoplasma gondii
  source 1..2401: mol_type = genomic DNA
gagcaacgaaaggtgcctgagcgtgcacaacgtacatgcaaagaaaagcattccgtgttgcggctcgaagggaggtggctgttttcctgagttttgcatgcactcgatcagccatcctgatactaggcaagagacacactgctacggacgccgggatgaccccccttttctgtatggtacagacaatcctgaacaaccctcggtccaggtttccacatacaatgaaaaatcgaatgcccttttcgttacacatcaaagcaaagaacgactccctcttctagaagtctggttgttcactaccttttttatcgcgtttcgtataaatgtgtgacttgatcagcatggcgacaagaatagtccattctgcactgcatccgatcccactctacactaaaaaaagccaacatatttcttcttgaatcggttctctgtctcccacattgtttcttatggctgtttcgtaccctcttcttcacatgtaagtttcggaaacgatcgccttgtcggctccctaaatacgaacaacagctatacgaaattacaacatacaaactgtcaaccaatccttcagcgcctgctccgtgaaacgaaattcagaacaatctgcccgggtttgcgctcgagggaatgatttccgcaatacggtgaaaggctcaatatgcagacatccattttccaccgaaggcccaactactgcagatctaaattcagcgggggtttgcttgggagttatgacgcaccgaaaaaacagcgatgaaaactggatcgcgccactgattgtactgtcctgatgagaacttatcccctgcaattttcgacgcagcatccaatgaatgctggcttgcaatgctaaacaacgtccaggtccaaagaccagcaaggacgagagcgatcgccacgaacttcttcccgcgcgacatttcctaggtcttcgcaacagccactcaacatggaaaagtcagaggagcggtctcgcttctcttacagcggaatgtcaactgtccttgctcgtgagtttggccttttgtgggtttctctcccgaagcaatcaatccacgacacggcgagaattgcgagcgatcaaaaggcaacttgacaatagaaaagccttcagtggcacgcgatacaacaaaggagttttagtgtcaccgaatatgtcgagtaacgcatcggaaaaagacaaaaatcaccacaggaagggaagcacacgcactgggtagtgattagtcgtccgtggtgtgtttcctgcatgcgcgacagatacgtaagggagattcttgcgttctgttaaacggaaatgacgaagacgcgtctccaaaaaactcaagctccgtaatggggaattcttcgaacaaaaaaaacggcaagtgccgttggatctctgtgtgcattcggcggcagaagtcccacgagaagcggcagagagaccagcgactggtaggacactcccgaagaccacagccccagaggcctctgaaaaaatgtagataaggactatattaaatacttcgctactttgcttcccaagaaggaagaccgcaattccctcgttattgccggaaagatggcgggggtaatgactgtgaagacgacgcggatgcctaacatccccccgtgtattttcccaaagacttcatgctacacgaagctcaatgttcgcgaaacgccagtagatgagaaaaggtttcaaacgaggtgggaacggtacgctagaaagcgtggcggtgtgttcgccagcacccaagcagacaaagtgcatgtgtgagtagatgtctcaattggtagcctgccatgcggggcagtcgtttccggcaccgctttatagaacaacatggcaccgagaaagccccttttttctaggatctgagatgtgctggagttttcgttccttcccacatgaccgagaagattgctaccacttgatatccgagaagtttagccgcggaagaggccaatgttcaccgtaaacgaagatcagtagggtggctagccggttaagagcgattcactgtctatactggctgggtgaacacgaggttactttttcgcggccatttgagacaagaggctacatcacaggtagaaactatttctctgtggaagtgaccacagtctgttgccgctctcgctgcaaagggacacccaaggcatctagccttctcttcttgtctcactatctgcttcgcttccagtgtcttctaccccgttaggttcgcggcactggcagcagccgaatagtgctgcctggtctttgcagtcctccagtttcccatgggagagtgtcattatcattttccttctgtattttgcggaggctgcgagacacagcttcacaaagccctgtagtgcgcggcatctgcactgttcctggggcttctgttgcgtccgtcacctatcccga

SEQ ID NO: 3006 - DNA, 1717 bp, Toxoplasma gondii
  source 1..1717: mol_type = genomic DNA
ggcagcagaggaagtccgcgaactcgtgagagtagaaggatggagcaagcttgagaactcgattgaagacggcgacgtagaggccgcggggcctcacgcccgcggcttcatagacggtcaagagttgaacgagatgtcgcggctccaaggccgacagcgagcgaaggaagcaaggtacgaaggagaggaagagctcgcggtcggtgagacccagcgaagagacagcgcccaagaagccgagagcctcgaagaagcgaaacggcgcgacactcacgtcggccgcaccagactccggcgaccggttgacctcgattgcgcgctgaatcatcgaactccagagaacgacgtcggtgcagcctcgagccgcgaggttcgacgccaactggtgcagctgacgcggagactgacgcttgaagtgcctacgcgaatagtgcggaaaagaagaaggagacggagacggagaagaagaagcaggagaagaagaggagggagaagaagaagaagcaggagacggagactgagaggagggagaaggagaaggagacggagaggagggagaaggagaagaagaagagaggagagaagagtagcgaagggaggaagaggagaaggcggtcaggagaccccagcgagggagcaaaggcggctgagagacgcgtgagaagggtgtctgagagagagcaacagcagatgacagagcagagaaggaagaaactgcactggacggtggcaagagatgagaagcgtcgcccaggtgcgtatctgtcgaggagagaagaggactggacgtctctgaagaagtcgcggccgaacgtgagagagagaggctggggagaagatctgtgccggttttctgttgagagaagccacagacagcgaccagaccccgagagaagcagcggccagcatgtcgtgttccgcttttcctcactcgctgagcgaagctggagagagaagacggcttcattgtgtgcaaaaagaagagcagatttccaaagaaagctcgccgtccaacggatcagagacccgagcgcgagagcgaaaaaaggcgcgagcgcggcttcgactcagaagaaaacggcagcgcggtctcgagagaggcgggaaaagtcgaattccctggaaagagcagatcgggagaaaggatgtttgtgtgtggatggcggcgaaaacacaaggcggggatgcagcgcgactcccgaggcttcggcggctgtttttcgcgctttcacggggcgggtctgtcgatttttgcgagacaggaaaagcggcaggcacagatcgacacagatcgactgagacgcaaagtcgtcgctcttctctgctcttcatctgcccgctcagcgcagcaaagggacaaagcgcgcaagagcgagtgcgacagtgtctttctttcgcggaggcaacactgtcagaaacgtttttaacttttctgaaaaccatgctaaagtgccgtctctgtccggtgcagcgactttcttttcttactcgaaagcgcaaaccagccgctgtctctcccacagcgtcaatttgagtggagaagcgcgaggcgagtgcgtgggcgggaatcgtcgcggcgccgcggatatttcgaggaggaagatgaagtccaagaactatttttaaattcgacagaccgacagcttggctactctcgtggtgcctttttcgtccgaaaaactcgcctttctctcgacgctctgcgctctgcgctgca

SEQ ID NO: 3007 - DNA, 2492 bp, Toxoplasma gondii
  source 1..2492: mol_type = genomic DNA
gggtaagccacaggtaaacagcgcgtgagtgcagacagggacccacggcccacaagatttttttcggtggtgagaggcaagtttaccgtttttttcttaaccagtttctcaactgggtatcctggctgtgaccaccacaaagaacagtgctgctaacgcgattagactgagaagagttctcctccttggcttcgttctatgcatgcagccacgaaaaaacagttgcaaaacaaagtgggcaaaaggtatccacgaagacgttaagactgttttgggagaggtcggtgagggacagaaactcctccttgcacggcagagagagaagcgaccgtgcggcgatggatcttgcgcacctctcgaggattctttggagaaaaaacagcgaaggttcccgtcagtaaagttcagaagagacagagaaacagctctccttgctcttgagaagtttaaacggttcttgctcttgatgagagagcgacagccggacgttctcaaaactgcatattctggggaaagtgaggaaacgtgagaagaaaggcgccgcagaaaagagtccggtgacacgcgcgcccttccgactcttttacgaccctcagaaggtgaaaaacagaaaccgtggacgtcttcagccgcgccaaagcgccaggcacacactcccacgaagaaacgcggcacaattcaaaaatctctcgagagacagatgcgcctagatgcggaagccgagggaaaacgagtgactgaagtctgtggtcgtcgtccgagcggcccgcgctctctctgtcgagcgtgcagtgtgagaccaggtgacccgcctcttttcgagagagtgcgtacacaacgacgaggggagtcctgacagaaacggtggagaactgtcaggaagaaggcacgagggaattcgtccgcaagaacgtcaacaggaaaggcggtctttcgcggccgttccccgtatcggtgtggaacgaaaactgaggggacggacgcgcctaaagccgactgtgctgagagttcgcgaaacccaggggaatagtggaagaaaaatcgttgtctgagtggttactttccgctagacaaagagggcaagtgccgagacgaactggacaccggaaaaggcaactctacacctggcggacggatacgctggtagcaatcccagctccctgtacattccggaacaaaaagcaacgacgacggggaaggaaaaatgtgcacatgtcgactagtgaaggaccccgcaagcgggcgaaaaggaaaggtttcattttcgcgcctcttggctctgctcagcttgtcgaaaatcgaaacaaaaagctcctgcctcctttgcatgtggcgtacttccccgtataaggcgcctgattttctggacgatgagtcgttggtcggcgaaatcctcacggaaacaagtgacacatgcggcaagagaagtcaaaaacgacaagagcaggtcgtccttcagctcgtttatccacgattgccaccttttcgcgctctctcactgcaagggtcacccgtcctgatgcaggacccttctcgtcgctggcgtgtgttgccgcccgcgactttcacgtttttcgctgcacgacacgcgcgcgaactacgatgcctccgagaacgaccgtgtccgacgcctctttaaaacacactttagtcccccagcgaaacacagacgccgcaaatgtcctggctctgtcgagcggtctccacggacgaagttctccaacttgcttcgcggcaactcacgaagtgcatgccgtttcagctcgacgagaaagccattgcgtggccggtagaagcgcggcagcgcgcgaattggaaccgctgaaacgggcagtgcacacgttcacgtacactcggcaaatacatctccacgcacgcatatacagatttcttctcgtcagaacatgtacgtgttccacgcatgtacacaacgcttctctagcagagcacgcgtccgacagagagcgacagcgaaagaaagatacttatctgatacatggtcgtctgggaagacgcgacaaagtctgttggaccggcatgtgacgagcagatgtcttttcgctgtgatgccaagagggaaaaactcccaagcgagtcccggcaagcgtcacgtggcgggttcgccgacccagaccttgagggcaatacagtgtgtgctgctgagccttcactttggtttccgcaccagaaacagctttctgttcaaggaagtgcgtaaaagaccccacggatgaagcgaccggagggaaaccgtactcaggaggataacccaccctgcagatttctctgtctgaggccacacacgcgtcaccccgggaacagccttcacccgtccaaggcgtaaacacagaacgtggagggaagagtttcgacgtttcgaatctgttgaggccggaggaaaagcgcccattaggtgcgcctcttcgtctctctccctgaatcactcgagagacggccgccacgcgaagaaaagccacgggcaacaaaaaaaa

SEQ ID NO: 3008 - DNA, 2429 bp, Toxoplasma gondii
  source 1..2429: mol_type = genomic DNA
cggtggactggtccgcccggctgatttgagatggttttgcgtcctggcgagtcacatggtgatacacgccgtccacaacgacgggggaagcctcagcttcttgctcatgctttgcgatacgcactgacgaggccacatgatttcgggaaatagatctccgcttggaaacttgaaccccatccaccaccttgagcactgcaccatggacagggacctctccccgacctcgcttcaacccccacaagtgaggagggcagatctcgattggcatttcgacttgtctgttttccagggcctcgccttgggcagtcgatctgctgtcgcagccgcggtggctgtcttcgtttggcggtggaaggcgggttagactgctaagtttgctaccatcttcgaccgagcatgcgctcacagccagtgcctagaaaaagcaccacacacaccgacattctcattccataggtggctctacaataccgcgctgcaggatgcgaacaagcggaagaagcctctcccgcgacacagcggtttccccccgtgtgcacggcccatggcaaatagtgtagaaacagtcacataaccctccttcgtatacagcttcgtttgtgagagggaaaaggcgttgcggcagcgtaccgaccagagaaacgtactgccgagaaaaactgaaacgaacaaaaacttacggccgcagtttttggtcgccgaggcatcgatgatgttaagccttggacttcctggacagcgacgactacaggcttcttcagagcgacaaagtgattttcgagtttgcagttatcaagggaaaaacatcagcggtctagttaactgcaactcgttgtctcaaaacaagcatcagcgttggcttgcgatccagaggggttgtcctgctaacggaaaaccagacaagagccgaaaacaggcatgtatcgaacagcaagagccagccgcgaaactgcataccaggaaaggctcttggtcacttgaaggtgcggtctgcctttcttcctgatcagaggggcaaaacggcatccgctagttgattcgtccatcggaagcacgctggacacgaacacgggagtgtgcggacaaccggtgatgcagccatgtgggtgcctttgcatctgtcggagcatggaaagagaaactaccttcaacaggtgcaagagaccttaccttcgtgtccttcggcgacacatttgcgaaatcggggtgaagatatgccagcgaccaccacgatcgccacatgaagacaccaacacactgcaagcgagggcggtttctgccacctgtgtagccgtacgtcgcagaaagtccaatccttttccgaatctcaaaccgtgagtgcttgtccgagatgctgcatttaaaaggaggcaacttcaaatgaaacggcaccatggcgtgcccgaaggattgcacagcgctcgctgtatagacgggtcgtggtcttagaaacaccggagctatcacttcaccattaggcaaattcgatcgcaagtttcatattttgggtggaatttgcagtacaaatagaattctactgaaagtatgaactgcttggtcctggatggtcatgcacccgtccggacgcaatcctggcagcatccgggcaaatgcctcttcctggggaaaatgcggcgccccgtgctgtgcgttaccacagctaatacatgcagaaaggagctagttaaacaaaggggtagaacagaagcggcactcgaatggtggtttccttttgctgccattttcttacaggaagcgagcatcgacggcggacacccgtcaaccttgcgacacacgggattggtcaacgctctttgcctcaggcggatgtcttgtccgcgcgtgtggcggtcaccttggctggttccagccggcccaacgtagagaagcatgcgacgcgaacctctttcagtaccgctctagcttacgctgccagctaataaggtagtgttcgcggggacgattgcctctctcgccagggttcagggtcgtttcgtgaagagaagcgtaattgtaccgtgtctgttgctgctcccaggaaattcgtgaactgagccggattcatgtcggcacgcttgtctcgcctctcagattcggcatattctagtttgccacattgagttgagggttggtgtcttgtccagacacatactggggctgaaggcactattttgaggaggcttagaaaataattaagcggcttcgcgtttgggggaagtggtgacttgaactgcggcgaaactcggccagtggaagttaaagatggttagagtcgctcctgtggcaaccaagggccgagccctgacagctgtgcgtgtttgctgaagaagctgggcgtcatgtagtgaagaaaacttacggtgcctttgatgtattagcgtcaagtgcggagtttctcattttcaactgtgctagcacaggccaca

SEQ ID NO: 3009 - DNA, 2436 bp, Toxoplasma gondii
  source 1..2436: mol_type = genomic DNA
tttttcggtagcatgcgccctcacgcggtccacgacgaaaatacggtcagcacgacgctccttagcggccgaatgggggggggggttgggtaattgagcaatggcggcggctaccagctctagtactgaactgctctgattgtgatgcccaagtgttgcatgatgggagtcatctgatccgtttgtttgacgagcatccggtgaagcaaccacacagcaaatctcagtgtatatttgtggagcggaagaagctgtgtcccatgcatgttactttaagtcgtaagactctagcaacataaagtgaccacattcgcgtttacgattctgatgttgtacgagcacagtcgtgcattccctgcagaaagacacagcataaaactgggcgcaacagtcagcgtttactgaggcaaacggttgcattctgagccaactactttccattgccgagtcatagtgtctgtgtgtttcctcacgtggactagtagcagcagaaatgcgaacagtagtggaaatgacctttacggcaacattagtcaattctcttttacccaaatgactcgggacgtgtgatgtgggaccgtaacggggccatggtgccccggttcatccatgcacctgctgtaggtgaacgctggcgtagcacgcttgttgcacccaaaaatctccgggacaggcaatcgcaaacgtacaccgttagtaggttgagttgcatagaaacacccgtaggtgggggtgctagaacccggtaaatgtaagtagaaaatgtcaaactagtataatacaacctagcaatccttttaaatggagactagtaggattaacattctgtcctgtgtacacgacagagttcgacctgtttactatcgcggagaacttcgtggttttgttggcttatcccgccagcgtcgagtgtcgatcagtgacaagatcggtgggtactaacagcgtcgcctttcccaacatacaaatccgtagcatgtgcggaaaacttatgacggttttatacgttgatacatgcttctgaaacgccgttcgtcaaaagctgcaaccttggtcaaagttgtgcacctacgaagtcctttttgcttttatgcgagccggttcgaacgcaccgatcgattctgatcagcgtcacctaggcatcggacgatctacgaagagccgctatctgttcattccttactcacgtgcacttccatggaggatattaaatttgccttggcggcacctggctgattttaggatttcaccaccgacacgtgacgtttatgtgtcgggggtcaaggtgggttcacgagtcgcggtgtcagtagcgcgatagccacccgcttccttactgagggttagagcttcggcaaggcacacgcgttgtaggttggacacaaactgatttgctttagtgagaatcgagccaaatggcaaacggcagtcccctccgcgttttgcgctgagaccgctcgcatgcaagactggtttttggacctcctctgtggagaaggttttgagctccaccggcgtgctggcgacagagacagaactggcacgcgaagagagcgcgaagcttcggtgtaatctctgttttctcgcgcaaacatctctttttctccggtcacctacagagataatcttttcctagagcatgtagcgacgccaggacaaccgtctacgccgtccgtgtggtgtgggggttcatgccccaatgtcgtgtgcgggttatcttccacgtctcttagtgcccgtcgcttcgcttcgcgagcttctctttccgctttcactaaatcggttgctgcactcaagcaattcaatgtagaggcgtctttggacgaatggtggcggtgtctgaatttgtctgctcttcacgaaaggtgtggctctttccatgatgcctgtcgaagccatctgtggccgacagtttgggctgatatccttttccggcaggttcgcttgacttgcagtttccgcttttttgtgaagcgtgaatcgaaccaaatccttctcgtttctgccttcttgctctgtaagtgcatacaccgaacgggacgcgcctgtgacacgtgctgcggtggattgcgatacttcctgaatcacggcattgcgttgtccccgtgtgtttgctgtcgtgtctacgcgagcaaggggaaggaaagagattcgttgtgacctcccaagagaagccgctgtctttcctgctccaggcgaccgaaactctgccgttaagtgtctgtgtcgtctttttgggcaaccgttccgtcgcgtttctatgggatttcgcaaatgaatccgcactaggtggagtacgggtctcaaagcgccaagccagatggtgatgcatgcacttaccatacggcaaaggaaatcgttgcctttctgactgttctgtgataccctgaggcagcggcagtggaccgggtgaaaaaaaccggcgacctcaggaaa

SEQ ID NO: 3010 - DNA, 3951 bp, Toxoplasma gondii
  source 1..3951: mol_type = genomic DNA
actccgttagtaaggagcatcctgtatacgccaccagacaggcaacagcgtaggagggcgcactggaacgtcgagtttaccgtcgagtttaccgtcgagtttacggactccaccctccggcgttcttttgactcactccgttgatgttcggacctgtcgcgaaagacgccagcctgtcggggactgagtcctccagaggctcttcctgcttttgctccacagcttgtcgcaggtgcgccgtcgcgattgccttcatcgacacctgcggatgaggcacagagtcgaggaagtatttggactcctggcgtctggggaaactcttgtatctggagtctaggcgctcgggggctcctcgagcattgtcgggactcagtgggtcctctgtcgacgacgacgcactgttctgcacttcgggagctccttcgacgcagcgacccgaaggggcagagaacagggaggacggagactcggaggcagcagagacagagagagacggcgaagacgacagaagtccttgctccggcgaagcctccagcgcggagacagggccgacgagtggggactcggcttccgccatctggtcctcgcaagcccgtgagaccagcaaccgcgaagctgggtgagaaggaggcggctggagggcgcgcctcggccgtgtctacctacggaggcagacgcggcaggggaggcagcgagagcgcaggcgaggaacgaagctggggcaacttccgcggcaacgcgaggctcaggaacggcgaagaggcgcgcgtgcttagcgagcaaaggtgcaaagtaaccttaatgtggtaaacaaactgtgggagatctaaaccgggaggtgaactcgtgactctctgagagaggaggcgacaccgtgggcgacgggttgcttaagactcgtagagtcttgaatacgggcagcagagtctcctgtaagtaccaccgatttgaaggtgtttctacgagaccacgaagaactactgcgaaacgacagagaaacatgccgcagaaacgagaaacacggcagggaaaaagcccaccgagaatggggaaccgaacgcacaattcgaagcaggggagacgacgatacagcagggtcaccaaagtatccagtgaagcattgcaagaattcggatacctggagagaggcttaccgaagaaacacgcagccaaaaagagtggtgcccgcgagcgctgttggcgtgaagataccgcggtaagcgaggcgccaaatgggctcagcaccgggcaaggaatggatcacgcaataaagacgctgaagaggactgaagataccggagaaaagaggagcaacggcggttacagggaggctgcagagtagacgcaggcagagcccaggaaatttttgcacagagtctgctgcgagcaatgcggaaacaagacgctgagactacagtcgctggcgccgaagagcgacagctgcagacttcgcggcagaggattcgctcgccgcatctgaatgccggcgcctacgttagcgaggttacaagaagcgtcgacagcaattccagtgtacagaagtctcttgtttctgtccggaatttgtgtcgggcaacagtcggggcctgtgagcagtcgccaacactgtgtgagcgttatgctttgaggcagctcaagattccacactagttcccgctgtagctaagagaaggccactgttgattatcattgcgtgcgcgagctgggagtgtttccctgtcgcgttcgtgagctccgtctgtcgcatctaagtgggcaacgaccgcggcgagtagatcgcagcaacagacccggctacgaggagccgccggcacacttgaagaagtgtctatccgtgaaaagcccagagacgcccttctttcgaccgaggcacgagaaaaaaagaccttgcgtgagatgttgcccgcgggaaaattccacgcaactcccgcgtatttcgacatgtgaacggattctgatccccgagagtcgagtattatccatacataccaggcgtaaaaagcgttcatccagttactcaacaggtgccaggccaacaagaatccggttagtgcagaaactttcgagacggtaactgcgttcgacacgaccgtgcggaaacgctgacaatgcctggagaggcgaaaacacgaagcgactcggaaagccgaaaaacttgtgcagtccaattttgcaatgacctgtcgcccagctcaccgagctgctcattgtccggcgattgttgaccaattctcgcggcgttcgatggtactgcccgtgcctgcatgcgcctgcaagtgcgaaggaaaagggaagagtccgcaactttcagcgagtgattttgcttcgtgtatagctccagaaccaattcgggcagcgctctcgaaaacctgccttctctttgaggttcaggaggattccctcacagttgcatacgaggtcgtcctgagttgtggctagcctttccgcggagccccctcagacaatagtgtgctgctaagccgccaacaagagtgaggcccaaaacttgccgcgtacaagacatccaattgctatcgagacggagcagccttgttcctctgcacaaagtggagacaaaactttggaaagggacatgatcttgacggcaggcgctaaaggggcaccgatacggctgccacccacagctgccgattgttgtggtgccctcagtttcactttcatatgttctttcgaagttgctgtggtccacgagatccgaactgtagttgtttcagagattatgagacagactccgcgtgctcggcctctcttttccccggacgtctgctggaaccaagtaggtggcctgcgaaagactggctctgcgtatcatttcagtagaccatgttgatgcactctgcagctacatggttacaacaaatcgacaaatggccacgtactgcagatttagcggcttcagtacacacagtcaaccctgcctcagggattttgagatggggatcggtgaggacatccaggcttcacaacagattcagtggacaaagctacagatgatatgtgtttctttcccctccctgcgacagcactacgcctgtggagctcttcctgcagagctcttgacgcgaaaagcactctccaaggatctcaagagactagcgtgcttaaaagcagtacggaatgcagaggactgaggacggaaaataaatcagtgccacactgcaggatgctgcaggtagggcagatccgacattctcctatcaaacgccatcttcggtaactgttcccgaaaaaacgtggtccaaagttgttagctttcttggaaggccggatgttagtaaggacacagcgcctgccgacggtctggctggcgttccatccacacacttgccgaagcgccgacggactgggcagcaggctgacacgatgccagtgaagtttctttcagaaggcacacatcctgcagccagcagagcagcccccattcgctcttttcgtcgatacatagcaaaagtgaaggggcgtttcttgatctccggtggcttgcggatcaagtgtgaaaatgatgacaacgcacaagccaacgaggcagacgggtgcggaaggcatctctcctttgcctcggtaattattgccttcggcgtcgtgtgatcactatgaattactgagtgccaaatcatcttcgtgagcttctagttgactcttcactgcagaggtcaaagggctccgctttctttcgctcaatagtggtatcccatcgtttcaatcccgttccaccaatgaaagtttacttgatgggtttctcgtgaagtaccaaacactgtgtcccattgccgaaatcgttacaggcttgagactctgtcacaagatgcgtgtgtctcacattcagatgaacacaactatttggtcgagaatccgccgtgatctgggaggttctaacagttcaccatcccatggactccttaacgttccttgcctcgtaaactttacata

SEQ ID NO: 3011 - DNA, 2187 bp, Toxoplasma gondii
  source 1..2187: mol_type = genomic DNA
tgaagatccacgcgatgtcgaggaagaaaaacagagcgtgagaagagaaggcaggaagacacggctctccccaggagggagagtttaagaaaaaagattctgagcgcgttcccccctcagtcactttccaaagagacttacggcgtttgcagatggccttaaatgacatcctggaaagaattcgacgaagaaacgcgccagcaagggaaaacgaaaacgaggaacaagaaagcaagaggagaaagaaacaagaaagaaacaagaaagcgagaggagaaagaaacaagaaagcgagaggagaaagaaacaagatagcgagaggagaaagaaacaagaaagcgagaggagaaagaaacaagaaagcgagaggagaaagaaacaagaaagcgagaggaagaagaaagagaagcaaatgaattgaggtgaggggcgttctttttctcgcggtcacgacagtgtcgggagatcgagagcgcgacggacgtccgcggtcctgtccatggttttagaacagggagcgcaagaggagagtctagtgaaaggggagcgcaagcgttctggaaaaacactgcgagaaaagcagtgaaggcgactacacacgaagaagaagatgaaaacacaagagcgaaggaagcagaaggcgtcggcaagaaaccggtatgccgagaaggcgttggggagaaaaggagacatgatgcgctttcctttgaaacggtgtttaaatgaatgctcctctttcgaggttttctcgctcacgaacgcctccaggatttcctccttttcctctttgtctttctctctttgtttcgtggtgttcatgtcgagcggcccggacatgagcagagaggaccgaccgacgccttatcttttccacgaggcgctccggccgtcactctcagcaactgacaaacgaaaacgagggaagagagaaagagaaacgcgagagtgaagagcttcgctggctctccgggcgcaagcgaatgctcaccttcgcctctccttctttgacctcagtccctgtgcacaacaggcgcctccagacagttatctgcgtatgtgtcaatctgtctgcatgcgcagaactgcggtcttttatccctcgaaggaagagagcaaacgcgcctgaaaaccacgaggcggctcggtcttgcttcgtccgtgtcttcggctctccacagtctcggcgagaaagagagagaggagggtcgagacaggcaggcatgcgcctttacgcgccttgtctcgattgtcggcttatattcggagtcaaccgcccagctcgccgcagggaggattcccggcaggcgcgagaggaacgcgagagtcagaaagagagagagagggccgcactgccatgcttttttctttttcctcgcaaagagaggctggggacgtcgccaccggctcttccggtttctcgaaaggagaagaagcacagccgcagaggcgtggaccctcttgacggtctgctcgcgcagcagtcgctttcgagctgcgagaggagaaaaaggagacacatttggagctgaggagttccttcacttctgggagaaattcccttttcaaaagagtttcctttaagtcgtctttctcgcctcctcttcttctgtgatgtctttcccccgtcctctctgaacagtcacacaggacgcgagagctctcgctgtgcaagacaccgctccagcagacagttgagcgaagacggcgagagtcctttagaaaaggtctttgctcttttcggattttctttccccttggcgaacctcacgcagaagcagcagcagactcgcctgaagacttctctccgtctctcgcgagaggccgtcaaacctccgcgccgtagctcgcttgtcttcgcggcttgccttctttctctccgcgtctgaattgttttatagttttcgttgtcgcagttgacttctgcccttccctgccctcgtcagtgcaccactagagtcgtcttcttttccctggctgcttcctcatttcttgtcttgaaccttttcttctccctctcgttatctcttcttatccctctctgcatcaccctgccgtatctcgtcaagagtctctcacatgcggtctctctcttttctcccgccgcctctggcacttcacctgcatctcctgccttctctccttcgtcttttgcgtctctcttcgcgttcgaatgagccggaaaaaaga

SEQ ID NO: 3012 - DNA, 1553 bp, Toxoplasma gondii
  source 1..1553: mol_type = genomic DNA
cggacgagacgctgcttttcatatttgttgcgtgatgtcctgttggagagagagacgaagaagagagagaagcagcagaagcagaagagagagaagcaggagaagcagaagagagagaggaaggcttggagggagagcgggagatatgggggcgcagcgcagaagcgaaggcggtcaaggggaggagactagcgagacaaggttttctcggggaggagcgcctcgaaatcctttgcacactgcgcgctgagaagaactccgcgagaaggcagttccgtttgctcgcctgcatttgccagagaggccggaagccgcgaggcaaaggcaagccatctcgcgcagcagagaggtacgacgaagagagagacaggtttgtgaagcgggcagacgaagaggcagggaaggagaggacatgaaaggcaggaagcaagcgagaagatgggtggaagagaggttgcgagatacgagccattttggagagactgcgttcgagcagaaagtgacagaaggctttttcgcatctccgctgctttgcccgttagcgccttccgcctcctctcttctctcttgtttcgcgtctgtacgctcaaagggttgatgcttgttcgaaacctattggatttgtcttttttgggagaaaacagcatgtgatggagtgacgactccttcctcttcttttcctctctttttgttctcgaacgtcgctgtcgcagcagcatctgagcagtcgtttcgtttcgctctcagcaggagcgtcggcggtggtcatttgaaagacttgcagagcagaatcgacgcgaaaactcttcctgtcgtagaacgaggccgcgtgagtccgtttttcgcggggctgttgtcagggcaggcgagagaggaagcttgcctttcgcggaagacagaagaagagaaacgcctgctccgccttgtgagtgcatgcgtctgtgaagcgcctctccttcgacgtttgtcgagaacttccgtgtgaggcgagaagaaagagaggcggtctctggaagaagcacagcagagcgaagaggcaaccgagagaggcgcctggcgccttcctttttcctctgttgtgtctccggtcttgcgtcgaaaaacgcgagggagaagactctctcgcatgttcccttcagagagggaggaagcgaaaaagagaaaatggtgacctccggcctcgcctcgatgcaagcctctcgaacgctttttttctttggagaaagttacacgctgcgaggcagagacgcgcgcgcgcaacaagaatcgggagaacggagacaactcctaccagaattgatgcgtgtgtctcgcgctctggtgtgtatgacggtcggacttgttccttttctgaatcccttttcttggaagcctcccctcgtctgcgtttttcttggacgcaaagcgaaaaaactccacggttcgagctctctttttcctcttgtctgtgtctctgcgacctttctccaagaacgcatttccgcagaaaagcaccagaacatgcaaaactatcgaaaaatctcgcggaaaatcaccgcagctcgccctcaaaa

SEQ ID NO: 3013 - DNA, 2033 bp, Toxoplasma gondii
  source 1..2033: mol_type = genomic DNA
cttgcagggcaaatgttcctgcgcgatgttgtgcgagagagtagacgcgccgatgcggtgccgtccgcaagtctctgttcagtttgcgcaaacgtggatatgtgtgtgtatgtggctttggaggcggatccccgcccctggcatctccgtagactctctgaagacactgtcctgtgaatttttcgtctctccccaggactgtcgtccgtggtctcagacagaggcctcacttgagttgcaaacaaaagaaaccctctgtgtgatcaggcagtcagcggtgtttcgcccgtcgccctatattccggtctcccacaccgaagccggcaggttcaagagtgtcctgggtgcagccaggagcgtattcgaaacaataaaggcacaccgcaaagacggcgccggtgcgcaacagcgaagccgagagacatgcactcctactaataggaatcttaggacaagctgttgtgcaagcaacgcccatcagatgacagcaactgaagctagtctccctcgtacacattactcaaggggatttgtacgtcttgctcccgttaggagctgcacgatcagtcagagaccaactgaagctcgacttcgtgtaacacagtacgggtgcgcgttgaaggcttctctgggttccttacgctttttcacagtcatcgcctgtttttctttagtccacaagtcttgccagacagatacgtatactttctacggatgtgcttcgcccgcacaaatcttttccctttgttaaccgtctgatggagacctctgcacagatgctaagtctccggcctgcgagtctgtcgtggctttttgccgtgaaaccaagagggtaaggtagcaagtgcactggtcgcccctggagcaattctccagttctcagctttgcgctacttcgcgctctcacaggcgccaggacggagcctcagggtcgctttttttacactggaacgcatttcaggctctccacaggtgatgaatttctggaggtgtctccacccttcgaccgaaatctccccattgtgcgacaaggtcgcagacaaaagtacagagttttgccatctgtcaccctcgtttttgtctgtatatgggcgaagtcgactcctgggccagggggtgcggcacttggcttcaggtgaacaaactcgtacctcatcggttaagccccgtcgcaccagcgcgccccctctcgagttaaagtgaacaaagaccgaacactgggaagtgcagacacgcacacattttttccggtggaccgcccacgaagttctcctccgagagaagtcccgcgttttcttttttgcgcctgcctttgccagttcttccgagtgtttcgcctcagacccctccgcagcagcatgtgccattcatttcgcggcggacccttattcttgtcctgaaaacgcggtcggaaggtggggggggcagtcgagcggtggcggcctgaagacgcgcaagaattcgagaaggtacgagactgccgtcgtgctgttttggggaagtcgccgtcgttttttccgttctcctcccctgtcggtcgtttgatttctggggcaaacggcgcccgtcgcttcgtcccttgtcgacttgtgttgttcgtcttgcgtctttcgctctgcttttctgcctctcgcggtctacggcccagagacgcccccgcgcccgctgttcgcgctcgcggcgtgcaaacccacgcgggcagacaatggtcagaggctcgtcaagtgactccgcgtttcggcgaacacgagaaagaccatgttttcttcgggaatacctgtttttgacgcgctgaacagggaggggacgaagtgtacagacagccgcggatcgagtgctgcgcagctgcgcgacaaagacgcgtagccgcggacaaaaaagaggaagaaccggtgaccccggggaaacggcgtcttggtctccttttcgtctcggtcctatcggtgtttctgtttctctccttccctttcacagagtagcctcggcgattcctgttcctcgacgccgtcctgccccgtcgaacgccttccaca

SEQ ID NO: 3014 - DNA, 2668 bp, Toxoplasma gondii
  source 1..2668: mol_type = genomic DNA
acacttgactgcatgcgcagactgtccttcaagtccctcgcaaaaaatctcttcttcctctcctcgttttcgatctgtcttctgtgtcgaccctctcttgttgcctcccctctcccagctgcggtcctgcaccatctctcgaaggtggttgacgaaactcaactcttgacctttctcgcgttctcctcctgtctctcctctctctctgtctgctttgtctcctttgtctcctttgccctcttcggctgtttcccctccgtctcctcccgcttcgcaggctccgtctctgcttgccggtcgaggcgacgaggacgctcgggcgtctggccgctctgccgggaccctgttgctcggggagacaaacgcggagtcgacgacgacgttgcatgcggagaccgcgcgatactggaagaggaacttctcgtgtctgaaagacgacgcagggaaagcggattcactcatggcagcctccaaaaaaagacgcaaagggcagcgccggagcactccgctccgcgcgacacagagcgtctcccccgcgttggttgtggaccgtacgaagagaagaaaacgcaagttgctcggaaacaaaagaatcctctgccgtcaaaagacagccagtctcttacctttgacactggtagcagacaggtgtgaagcaaccgggacagcagagaatggcgtctgtcgttctgtctccgacgcgcaggtgtttcgcgacccatttctcgtcttcttcgtctgcagatgagtcgtagaaatctcctccttcctcgagttccttctccagacgctgtcgcagctcgcggtcgagagcgtcctcctcgtcctctgcttcctcctcgtctgcgcgcatctcctctgcgtctccgccggcctgcgcggctgcacactctggctgcaacgttgggcggagcttgaccttcgtctccgaagcggagcaggaaggcctcaactgctggttttttttctcctcccgctcccccagctcgcgcttctcggccgctgtgtcgcccagcaccactcggactccgtcgtcatcgtccccgaattgacggtggcacacacgcgactgcgctgcgtcctcggtggaatcttctcgcttcggattctctccagaaaagccgccgcacagcgtcggttcccagtaggcgtcgatgtcgcgcttctctccatgcttccctcgcaaagcagaagaagaagaagaagaagaagaagaaaagggagaagaagagggcggagaggaagaagaggagagaggagaggaagaagagggattgccgtctgaagagcggcgttgttgctcgagaatatacgcagcaagctgccggaagaccgtgtttgagcgaagcttccctgcactagaagaaagggaagaagagagagaagaatgagaagacgagggaggagaagaggaagaaccagatgaagaacacagtggagaagaagaggcagcaggatcgccttctcttccaagaagcgagttgctcgctgccttttgtgggagagaagtggagaggagattcgcgagagggttgagctccatggtcaagctggggggcgttcaggaggaccgacaagaaaagaaaggcaaggagagacacaagaaggaggagagagaaaaaaacgcgaggccagaagcgcagaggaggaaattagagacggcctgtgatatttttcaaagaaaaacggacgactctttcttttccggcgcgtgcgtctctccggccgaaaacagacctgcagtcctcgcagagagacacggcatcgtcgttctcgttctcactttctcctgtctttcgagttgcatgcatccgcgatcgctacaggaagttttctttccacgatttgccttctctctcgcgcccaattgttttttccctctcacgagaaacactcgaaacagctgctgcgcttctcgtcgctgcgcaccgttttcgcgggtgctgagcttgcgccttcctggaggtgactccagtcgcagtgtgagtttcgaagagaaaaatttcgtttaacttcctttctgctccaacgtaagaaaccaagcgagcgagaaaaaacgacgacgagccttcacgccgcatctgagaaaagtcggacttccaggcctcccgtctcgctgccagacaaaagagctccgcatatttgtttcgtcttttccatctttcttctctgaaaaacacagatttctctgccgcgcctctacacggccgcgacgatggtggagaaaagcgatccaagagcgccttccagctctcggccacccgcttctcctcccgagtagcttccacgagtcgccgtgctctcctcattcccttgtgtcttttcctttctctcctgtccgtcttcctcctattcttctgcttggtctttccggttttctacctttctctgctgtctgctcattccacctcttcttcgtctcacagtaatctgtcctcgactcatctgccctcgactcatctgccctcgactcatctggcggctctattctccttctctgtcttgcccttcctcgcgtttcgagtctccttcgtcgccttcttctctgtcttatcctctgtcttctcgtttctcttctctctcctctctgtcttcctctctgtcttcctctctgtcttcctctctgtcttgttctccctttttcgcgtgtctgtcagtcttctcgcca

SEQ ID NO: 3015 - DNA, 2726 bp, Toxoplasma gondii
  source 1..2726: mol_type = genomic DNA
taggaggtttcggtcagcaggactgtgcagaatgacggttgttttttcgactggaagcgctgtctacttaagcattttgtgttgcagacggaccctaacttggttgcatgggcaatggaggggtactgagaaaacagtgttttcaagattccttccgggattcttgtttctagagaggaagttcagttgctctcctgagcatggagggtgccgactgagaagtcgaaggtgtacaggagcgaaagccgcttttctgtggcttcaaaaaaacactcgcttcttctgtagcgaggcgactgatcctccatgagtcgtcggaaacctctgctcggcgcacagaaggaatgtttctgtgcagagcgcccgactggagaggcggttcgccgatacgcgaaaccctccagctttctctgcttcagatcttgtctctctcactggatgtgtgtacaatagcggctatctgtcggtcaatgtgcgaagctcggcagcactgcgaataggacgaaacaactccacagcacaaaaatgcctgcggacccgcactgcgcagagtcctccagagagtctctttcgacagcgcaagacaacgactcctcatgtctgctccgtttcgttgcacagcgtcgtggacacatccttcgctctggtgtccctacggagtcgtgacatttttccggaagtcgcgtgcgttcttccgaatcgacttcgcagctaccactgtttcctggtgcaacggttttgcaggagacccccccccgaagtgaagactgcattcctgctgcttgtaggttgacggcagctttccaagtcttcgccggccgcctacaccactccagacgccgagggcgatgcacacaacaatacatcgcaatggacgccctcgcacgccgagaagggtcgccgggatgaatccccgttgtgcatgtaaactacggacttttgtttcgatagaaacaccaactgtcgctgtctgcatgcttgtgagccatgtaacagagcacctgtttctccgcgactgaatcgggacggttgcggccccaacatgcgttgtggagaaacagcaggcgcgaccgccacacagccgagacgcttttttcccttcggctgtgcgtttgaaaactcgatgctgcagagctgtaggaactatgcaggaacttcgctacatctccttgtgtcacaggttttcgttttcttcgatttccccgtcgtgcgcacatgcgaatgctttgctccgtcacggaagggaaaccttccgcattcgacccagcgactctcgcggcttctacctcacgccccgccttctgtttcgtcaactgagccgttttccatcttcagcgatgctttcaccaccggttcacaagattcaaaagacacacgaacctgcggacctaactgagaactggtgactggggtgcgagttctaccgtttcgctactggcccgcgcccctgcatagcggtgaacgctcttcccagaaccagactgctcgccgcctttgcttgtctgagcaaagccgtgggtttcgagcccagcactggcgtaactagagtcgaggatcatccacgcacacacacccacccgaaaaagcaaattcgtaacaagttcgtcgacagtggaaggccccgaagaagatgccgtgtgtcggcctgtggacgtcgcgcaggtgccaaaatgaagcgcgacccagagcgcgagaaaccccgggagttcaactcacaaagtaatgagtaggaaacgcttttaggtctcgtctttctgttggctccagtgcgcgcattcgaagaggcctctgcacacggctgccgacaatgcgagatgccgggacccgacgaacgcgagaaagcagcggccgcatgcgtttcagcttcaaggtttggcagagaagcgggcgaagaccgcgccagacacccaccggaggagagtcaaaactgaccgttttcagtgcctcctcagagacgggcaactcgtgcctctcagctgcgcgaccgcgaagtgtctgtacacctcagccgtcgccacacgcgtccgtaggcgttgcgcaaagtcgcgcctgtcaggtgtgcctcggaaaatgcgtttttgcggctctgctcgatttttttttgtgaagagcatcgctacgtcgtcccgcccgttcgctttctacttcttttcgtctttcacgaacttcctgtcagtgtcagtgcgctcaactgcgtcttcgagctgtgtggagcgactgcggtccacggggcgacatcgaaagatccagaatctccgtcgtttccgcttctctttcttgctggggctacgcgccactcttttctctccaccacattcgctccttggcgtttccgtaggtcatcaggggcgcagtgaactcgaggattctgtcggaaacgctgcgttgggttccccgtgcgaggcagagaccccgcgttcttctctgccgctttgcctcttcacactctccacttcatacccggcgtctgcacgctggtgttctctggaaactgccgggtagttccgacactgctcaaccttcgtgacgcgaactttcgccgccgtttgccgcaggacgccttctctctgcgtctcggcccctgctgtgtctcccgtctcgccgttccttttcttctggctctcttctttttccgctctttctcactctgccctcactcgttcttctcgctttccagctcttccgcgcgtcacctctctccgccgtgcacacccagcctgcgaaga

SEQ ID NO: 3016 - DNA, 2525 bp, Toxoplasma gondii
  source 1..2525: mol_type = genomic DNA
ttctctgttcgcaatctccctgtcgtccgttttgcgtacgattgtttctgcttccaacaacccatcctcctgaaggaccaattccccccaagaaggtttgaggtcgtcgcatccctgtttccgattttcgtggcggatgacaatgccgccaattcaaggaaacccccccagaacaatccgagagtgactcccggctaaccgtgtcgaacagcagaaaaaccaatttccgatcccttgaccacaccgggcactgaccccctgtcgcacacatccaaaaccacctctgactacaatcgtgtgtgacccaaattttgcgttttcgtctccgctgtctctcgaatttcgttcccttccgcgactgctgtacccactttctcctcttttcctgaagacagcttaaccaaataagtacgatagacatttcgcgttctccatttacacagatttccatgcaaacaatctcaaatactaatgtaagcaaaggcaccttgaagtgcggagctgattcttaaaaagagcaggttcatgtcgggtcttcacgctggataattcggggctgattcatagtttcttgcgtatcacagcgatagtttagtttgtccttgcggtcaggagttttgaatcaagccggtcgtggatgtaatataaggagtggtctcagggaagttggtatcgtacatttatagcctagtagttgagtatcaacttagatggacagatgccttgaaccacctaaagaaaaggaaacgttaaccgctctttagaaacaacaacagttaccgtcactgtatatgaatgctaaatctaaatatggatgcttgttgcaacgcatacaaccagcgagagaaaacagaggcacacacaggttattactggcagcttttctttcgccgagaagacgctccggagcaccgcctacaaatgaaactcgttgtctatcaatgaaatataattatctcatatcatcgactagacctgatactgaaggtggaagaaagactccattcttcagcaacataggtttgtcgtttgatgataaggacctaaacgttcccgttttttccagtcattttggaaaccaagacataaccgtccaagtgaacgggtgggagtctcgctatttgcttcttttaatttttctgcgtggaacccgtccgtcggttccaccagttctgcctctttcgcattttccggataaaaaagtgagtttttaaaaatatctttcaggctctcctcttgctcggtttgtcatttgcaattggcttcgttctcaacgaagcggttgcctggtatatcgcatcacaatctgggttcccactatggaaatcgaacgacctaccacacatgaaatttggatccatgagttaccagtaaaggtgtgtttaaacaaaacattttctacactgatgcgcatcgcagctggttgttttatgacgtggttgcaaagatgtggaaagcatgcatgtatatagcctaggtgctcgctgttaataaattccacttcggtgagttgtcccttcgatagaatagttcccggtgcgggcggtgtttttcagggttccatgcacgcagaaaccttttcgatttctctccgttccggtgctacggagcgaagccgcgtcttccgtactttctcggagtccagtgacgttcttgtgaagggcccctccaccgcatccgcaagactgtcgtgtctcctccacccccctttgtctcacgagcagtgcgtgctgctgcttgcagttaccttcgactggagtggcaggaatagtacagactgaaaggaaagaacgacgttctcgatcgtctgttttcatttgaggcggcgcacaggctttctggaaaagaagcgacgcaaaacggcgaagacagagggcctgctgcctttttttgcagggacaacgaaattcacacggttgagagcgcgaaaaagctacgacaggggtttaatagacccttttccactttgttcgagtcgcatgctcgtgaacaagctacgcgttttgagtttctctctccttgtttgccaccaaagtcccgtggtgtctccctcttgtctcgcttgccccaaaactggctgctgtcttgagctgtcgaatctcacacctttgtgaatgtttgccggaagaacgtttcctcaatcgcgcttccgagtgtttttcccttcgcacatccttatttttctctcatgttagtttgtgtgcctctagaaagttcacagcatctctcgcttgacagcatagtgtacatacacctcaatttttaactgtcgctgtttgtagtggttctttgcccagctcatccgttccgccatttcacttgtatttctcgccgcgcgttcagttcgtctaacttcatttcccccctctttcaccgctctcgatcttccctctttcggttcggtcgtcttcttcctgctggcttttcggagttcaagccgcctccaccgcaggtccgccgccctccactgccagggtccggcctgtttcccctctctctacgcgagtttctttcagtgttgaaaa

SEQ ID NO: 3017 - DNA, 2198 bp, Toxoplasma gondii
  source 1..2198: mol_type = genomic DNA
ctggcgcgcattttgcatctgtgtatgccgccttatttatgtacttaatgacgcctatctagcgggttcgagtaaagccgagaacggcttcttggagatgttgatccccgacatttccgtggacaatgaagacgtcgttcgcctccgattctcgactggcgtccaggatccgtttgcctgctttgctgcgattgcttacgaccgcgtagagaaggacgaagaggccagcacgagcgacctgcgcgcttccggggtctgcatgcgcgagcgctgcgcggccgccttctccctcgccgcggggacgactggggtccgtgaggaagtctttgaacagctggagaaaagaaacatgtcgtgccagacagaaggcgccgccgagtgcgagaaccagaaccagcagcctcgccagcgcggccgcctcgccgcgctgcagcaaaccctgcgaggcgcgagaatacgagggagaacaaaggggagaagaggagggagagcaacggggagaagaggagggagaaccaaggagggaacaagggcaaggagacgcaggcgaggaggaagacggcggagagggggaaaatggagaagaagagggaggcgagggagaggaggacgagtcgagtttcctcttggagaggcgagaagcgcgagacctctcgccgtcctcccgaggggcgcaagaagccgagcggccagagccgccgtcggcgcaagaagaacctgccatgggagaaggaggaggagtctcccagtgtctccttcctcagtgtgaaggcctgagaggctgggagcagccgaggagagagagagagaaaaaaaagggggacaggcgaggaactcagggacggaaagtcactcgaggaggagctcttcggaggtagaagaagaagtcgaaaaaagaggaacgcttggccgtccggcaaaactctccgcgtcgttcttgagcggcctctttgccctcccaaaagcgacgccttttctctcgtccgacgttgtcagattgacatgaccgtatgacgaggctcccgcgttttttcccatccacaccttcttggccggcgcttcgttctctccaagatctttcgccagattctttcgcagcctttcctgcgtggagaggcgaagctcgccaccctccggaagacaaaacgcaagacagcgcggcgtcgcacggacgggccagagctggagtttgcggagactcgcgccgaagaacgaatttctcgcgtctcgagaagagcgaagaggacgtgtgaacgaatgccgaggaagagaaggaaagcctcacagaggagagcggggagagcgaccgaacggggaaacgaggaaaaacgccatgcgaaaaagcgctcgcggcgtcgggagaacgcgagagacgcgcgcgcgcaaccccctctcgtctgcgtatatgtacatgtattatataaacttgtatacacattcgcagcgagagaagccgggagaggcgcgttcttctttcgcgttttggatggcctttcttcaaactcaagtgaacgccgacgaaactgcgtctgcgctgaggacgcggaggagcatctgcggctgtcgcagcgactgaaagatgcagcgcgcgggtggcggacgagacagagagattgaaggattgagagagaaaagcctctttcacagaaacgatatttatttcttcctggataggctttatgatcaattgtacagctaacagggttcctccttcctgagaatccgcggagggtctcggatttgctcgctcatctcgttgatgcatcttgaaactctcgcggtgtctcgacacctcaaaaaactcatttttcctctccattctcgtgctgcatcaaaaattcgctttctctctttcgcccgcctctcagtctctcctccacgcctccaaagatagtgtccattctccctcctcttcttcctctgtgcttcttcctcttcgtcttctccctcctcttcttcctctgtgcttcttcctcttcgtcttctccccttcttcttcctcgctcttccccctctttgtcctcttcccttcttcttgctcatggttttccctctttgcgtcgcctcgccgtccaggctctcctttcgacgcgagggtctccgtttcagcttcgagtccgtcgcgcgttcctccctgggaagtacagagagaacagagcaacaggagaaaacgtagtcagtgtcggagaggtctttga

SEQ ID NO: 3018 - DNA, 2832 bp, Toxoplasma gondii
  source 1..2832: mol_type = genomic DNA
accaaaagaagccggagggactagggatacaaagagtcggtttctgctgaggcttgatggccaggcggggctggtaaaccagcgtctgtcgccacataggacggaaactaactccacgggcgaggcagattgcgaggagaaactacggggcaagcagagacagacgaaaagcgtacgtgagcagacggttcttccttcggttcactcaaaatcaagaagtcgagaagaaatgggggacatgtttctgtggcgtgagacaggtgaacggcgaaagtgaactaactaagaatgagagagagggagaggaaagaaacacagaaactcgtgaatcatccagagcgagaaacagggaaagaaaacgacagacgggtgttgccctgctgacagtgcctggctggcagcgtcaccgctggcatccctttaggagacgaaacccaaaaacgagtagcacctgtcaagatgaatcacgaaaaacacagaaccaagttctctagtagatatggtattgtcgtaccaagcatgcaatacagggctccaattgtgaggtagcgacaacccagttctctacgatggctggcgctatgatttctaagatagtgcaaacgacttcagctacgagatacagacactccagttctgtatgacagctgcacgccaccatccctgtggactgcttaaggctgctaaaaggggtcaagttcagcctcctatgttgttaatcgtattcatcagaacagcagaaggatctagcagctccgaaacaaatgcaatgtatccccgcggtcgcgtgtttttcaatcaggttcttcacatgaacggcattttactaacttgctcgacaggctctttagctcaccccgccagagccgtgattcattcttaaagaaggcagaggggcaagacgagacagacgcacggagactgccgtaatctatgcctggcgcatctccacaagcagaatgtcaaaaaaagtgtaggaaacgagcagaggttctcccatgtttgcgacgcctcttcagatcgccgccgactggtgaaagaaaaggaagaagagagtagggcacccccgagaagtagtccaaatgtcgtattgaatgccgagtaaccacaaaggaaaagagtttttcgcacagaagtttcaagacttgtcccattggcagactcatcgctctccaaccttgatcccggctgaggtcgctcccagaaaaaaaaagcaggcgagttgacaacctaagcaacggctttcttccccggttgctgttaaacagacagaaaaactgccccgccacaccctgtttgaacgctggtcctttctccaaacaggcaagccacaacacaccagctgtcgattctcaggatccgaaaacgaccggagtttttccggatctggaaactcggcgccacgggtgaaagacccgatgatacgcgacggcgtctcctgcctggatctgcgctgcaccatgacagccgacggcgaacgggaggactttgccaacgtccaagttgctgaaatcgaccgaacagcaatgtgaacgacaaaacagtgaggtctacgagcagaagcaccgtgtcagacgtctacgaagcaaataaagccaaaagagatgtctctgctttctcgaaacgaaccgatagtcactggcacacccggttcctcgaatataagcctactcgttcctgtctgctgtaaggcctgtggaaggcccccccgctgcaagctcggactcgtggcttggccagcagacagaaatggccggtatctgtagacagcaaggaagagtagtccatgataaagctgattccggtgctcctatccacttcccgtcaaacggctaacaggagaagcttttaaaaacatggtcgcacgtgaagaagcgcttctcacgaactcgagtctttcggttcgctgttgcgggattgcaggggcagagggaggagacacatacctacttgaagagaacgacagaatagaacgaagaacttgagagtctcgactgcggtattagcgaagcgaactgaaagaaacagagaggcctgagacagagtcgtcggaaactagcgtagttgccgttagttctggaggaaaaaataactcgcttttgtgtatctgtagcggggaaagtagttccacgttagccttcaaggcctactacgcaacgcatgtcttccgacctgtcgcgcctctactcgagttcgacacttctaggggtctttgcacgaaaaataaaacgcacagtccatttctgaaaagagaaacccgtttgacagtatgaattctgaaacgctgaattctctccctcacattcacaccatactgtctgagttttcctcctcccttcgacaactttaactcgccctgccattctacgcgactccgacgccagcgcttctgcagggctgctttcttctgtctgttacgtttacttcgtttccacgttttctggccacaagagtaggaggcgctcgacgcagttctgtgttcccaagcactgtttccttttttcctggcgctccttttagccacgtttcttttgtccgttgctttgctgtcctcgtctcccagtgagtggggggctttcccccagttgtctgcgtcgcctctcccccaaaatcttctttgttcctggtctgtctccctcgccctcctgccgcatggttcttctctagtttgccgtgtccttcacctacaactgtttgcaacgtagccaacatctaggctgttggtactatgttcgaattcccgtagctcaggttgcagctaagcaggtctgcgccccctctgtctgttctttggattttctttctcggagacttcactccattttttcccaa

SEQ ID NO: 3019 - DNA, 1359 bp, Toxoplasma gondii
  source 1..1359: mol_type = genomic DNA
aagaaacttgggaagccgccgtccgcgagtctgtcttccttccttccatcttcgcctcttcgttttcgcttcgccttctccctgtcctctctgctcgcagggccgccgtcttcgccggagggtgcatggcaggcaggcaggtaggagacaactggggagacgtcgaggtgatcgcgtttctctaggggattcagaggcgcgagagcgcagcggtccgagcccgtttttctcgagggggacgcagagtcgtcgagccagaagccgaacgcagcggaggaagacagcgcctcgtgcggcagtcccacaacgctgggcgcgacccagcgaggcagggcgtcgccggagactcccgcgcggagtgtgtgcgttccccagtcaaacacaagaggcgcagccgggagcggagaagaagaaaacatcgtggacagcgcgcagaaggcgaacgaaacggagagagagagacagagaggtcgacggagaaccgatgaagggagagacgaagcgaggaacccagagagagaacaggaatgcgcggctcccccttcgccttctgcagctcagcgggaccgaagacgaggcatctgaagctgcgcaacttccacggctgacgcgcgcgagcagagcagaagcgacggcgaggagatttaaagaaagaccggcgaacgcgctccccacagaaaacaaaagaagagagaagaagattttatggccaagaagacaatggaggaagagaagagaggtacagacggagaagagaagaagaaagacgagaggcaaagaaggagaagacgagtcgcgggggaggtcgtagagggggagacggatcttgcagacaaaaggagcgacgaaggcaggagagagcggcgagacagttcctacttccacacgacaggcacaacggagagacagcgaaacgcacttgagaaaaccagggtgcctcgaaaaaatgaagaaagctctaaaggcgaaaggtgaattgtgcaataaccgccgaggcgctttctttccaagactgattcggctctgtcgaggcgacagatggagacgggggaaggaagggagaagagaggctcctgtgacataaaggacagagacaaagacagtccgcgttcgctctcccttcagagcatatacaagggaggagagggaggagaacagcgagaacaaaagagcgagaacacaagagcgagaacaaaagagcgagaaaagaagaggcgaggggaaggaagtggagagaggaaagaagcagagagaataagcgaggagacggttagaggcgagaagaggatgcgagaccagacgccgcctcgcgcgttttttcgcgaagaccgctttgctctcgcagagattctcggcaaa

SEQ ID NO: 3020 - DNA, 1858 bp, Toxoplasma gondii
  source 1..1858: mol_type = genomic DNA
ctgcacgctcgtccgaaatcaaaggagcaggacaggacgaagaaggggagacagctccattgctgagagaagcaggtggagctgacggggcatacgcatgcgacgatgggccagaaacggcctcactcgtggcgacagaagaagactgctggtggctctggcgctcgcgaacaaagccggagtacaacgaacttccttgacggtggccacggcctcgatcgtcccctccatttacctcctgagattccaaggaggacgatgggcgtgcggggacggtcggtgccatggtggacttgaaaaggtaaggagacgagaggaggaagaaaagcggacagacgcaggtcaaggaggattacatgcaccaggatagtcctcgcaaagagtagacatcatccctgaatggcttcatccctcaccaggttcagtggtgtcctgatctcaaaacagattcgtttgaagacacacatctccttgtcgaaaaacagttccagaccatgccgacgctggttccatcgaagagtatggacaccaaaaaaactccttctgacgagtgctcgcgcggcgttgcagcctgaggaaaaacagccgccataacgtggggctgttagtgtcgaatcttcacattatactccttgcagttcctggagggcatcatgtccagcccgccagccgaagtagtgactgtttcgtaccctgtttgctaaggacccctgtttggaaggtgcaagacgaccgaacgagtgcaaatagcgaaaatcatacaaaaattgccgaaatgtagaaccgttggcacgcgatagaggacaggaagcgagccaatgacagtgctgagacaactgaatggccttaggaaacgagcggcgaaaggaacatccccgtgaaaccacgaaggaggcgcacttgaatcgggaagcgctgggagcacagaagcaaaaaaaacgaactaactgttttgcaatacagcggagagacggaaaggccgtccctgagaaaagaaacaaaaggaaacgcggaaaagtgatcgcaagttaccccttgaaggctacaacaaacggcaacaaagcaagcacacgctttttcatcgatatcttcctcatctgaagagagtcctctgcagttttccaaaaaacagttaaacgaaatgtcccacatgtcttatttgtgtgcgctgttctcagaaagaagatctctgtgatgactagggaaccgacaactgcaactgcttcgacagcatgcgtgaaaaatcgcaaggtaacaagtggacagccaagatacttcgcgttcatctatgttttctttcgggtgaaagaaagccacgagaagtttgtgacgttcatctgcacaactgtctttttccaagaaatcagcgaaaagttttgagtgttgcatcgtgtttgcctggggcaccaaaagacaaggagttccgccagttgacggctgcgcatatcgcggtgtgctccaacctgaatgcatcacgtagttttggttttctaattccaatcacatttgcattccaaacgaaacaagcatcactctagcggaccgatggaccctgagataataacgcgcattcctttgatttgcagtccggaatgaagacgcattttctaatagcaattcgtgttaggttttttcatcgtccgccgcatcctgtgacgcacaacgggtcaccggtgtttgtttggcaaagaagtggataaaccaatcgacgctgaacaaaacagcgtacgatttattcatgcagaggctcactaagatttacaaaagtgattccttcaccagatgcggcgtctctgactgaagggagttccggactctagcatgctgtggcgtaacatagtctgaatcaaacgaacaa

SEQ ID NO: 3021 - DNA, 3105 bp, Toxoplasma gondii
  source 1..3105: mol_type = genomic DNA
cagttttcttgtcatgcatgctgtgtacaacgtggtagatactcgctggtacgtcgatctttggggggtctggagggacaaacatgggaggggaaagtgcctctctctcttctgtcgttcacagatcagagaacgtctcaggggtcaggtgcgtgttttttcccatgctcttacccaagcatgttggcgttggatgtaaaaagtcgggaacctggcaactcttggtattgtcgggggcggggacctacgaaagccaccggtgtgtcgaacagtaaagagggtttacatcgtcttctcgagcttctgtggtcttgcattgccttttcagtagtgctaaagccatgtcggagggaaatatctatgcgctgcaactctgttggcctcacacaatttagcccgcttgtgggcgtttgtctactgtggtctcacacagacacactgttcgcgttggcgtgactgcagtaagaacgagattcttacgttgcacacggctgggtataacagctgttctttcaaacctagtctggtccctaccagccacgctggacattccttgcttcctctgttctgggctgtcctcggtactgcctgtcaccgcgtatcagcttaggtgggcacaatcagctgtttttcggtttgtgtctatggctggcagcagtaaccaataagtttagctgatgcactgaaaggtagtcatttgagagaaaccaaggggaaacggacagacggaccttgcaaatctaccaagagaatggaaattgtagcgcggtccattccagtagcggccgtgttcgactgagagacttttgtcataacaacgcattttgttcccggtattgacagggaaaagtgaccatcgccagaatgagctctctggtccacaaggtcctacacataaaacagtactgctggaaccccgaaacagctgccaagtgaatgtctctttccgttgagccacacacgttctgggctttgaggcacaaaacgtctagtgtgccgttgctagtccttttaaggtggacaccccataaacgacttcaagaacaatcacgcatcatgttgtttcggacatgtagtggaccgcgtgtgtgatctgtggtccccagtcttttgacttttgcggtgactttgttttcgctgatttccaaacctgctcaccagagttccgcttgaaaccggtctgtggcctcgccaagtggacaagtcgtgagagacaggtgcagcagtcttgacgtcctccattttgagcagaaacgcgttttccccatggtggaagtcacccctattgtgtgtcatgacagggacgtcgggacagctccgctgcatgactggcgacccctttaggaacgccactgaacttcctgccagcatcgtagtggggcaggtttcttcattcgacagtcgacacgcaccctgctcaatctagaatcagacttgtgttgacatggaggttttgggcaaggaaactgttctgtgtagtgccttgcaggaggcttgggagccaggcttcagacacaaagtgttcctgtccggctgtgccttcgagtccacgttcttttgaagactcaaaggggcttggaggtgttgagaggggctgcagtctggctttttcgcgaaatggccagccatgttggtgcgccaccctaggcaagcggttgcatcgaatgttcaattcatttgcgaatttcgtagagctggtgacggttattaccaagccgtgcccaacatccttgcatattgtgcatactgcctggtacttctccattcctgtccataaaaatacaaaatctacaacgtcgcctcaggcacccgtagtcgatctgtgttgcgtgcttccagcaacgatctggtgtcctttggcttgctccaagccagcaagcagcacctttttcacatggagacggattgctgatgacaggaactcgtatgagggagtccacaaagcaaagtagtgaaaagagacgaactggcagtgacactaatggctttctacgtagccccacatgccaatggtaggggttcaagatggtacatggagtatttgcctacccatgtcacagggccaccaactcgtcgcaacgccgtcatcctctgcagtacaccggcactcgtgtctgagacccgccagagacacgagcaaattttttagtggaatagggtgtcaaaaacatgttgcagcaatacgccaccatgcaccagcgtattccacggtttttcttgtcgtccctattaagcaaacaacgtgatttcacagaaataaaacgtggatggttgtgtctaaatcatcctgaaatcttgaaaaggccggttcgcctttgaacgcggagtaggttgccataatatgacgttctgtgtacgatgattttcccaagagagacctagtatgtgtcgaattcgtggaagtgatacagcgacgtactccagcaaaggccacattgtacagtactaaatagaagccctaatacccagttctgatgcatgctcgtggtcgtttcgcgccctgcagggcgcatgtgcgatgcgcctgtcttccgcgagcgctttgcgagagcatcacggtgaagtccattggtggcctgacgaggccagtggtgctcggaccgtcggagagcactgtgaagcttgactcactagcgttctcattgacagaagaaatgagaatgtgttattttcctttccaaggataaacgcggcgaagactgcgtcatcaacctatgctttcatgaaggaaagtggcgcgcttacggcgagttctccaaaagtctcaagaccgcctgcgtcactcaccatgctttgtatctccatgttgaactccggggcgataggacgttgtcttcattggtattatggattgcattgtgtctctacttgtttctttcttttaaggtttagtccgtgaagtggtggggacagttttaacggcgggtgagagacgcctgagtgactgatgtctagctggggtgtcgctttgtcgctcctcagctcggaaaacaagtagccataactcgttggcaaaccagcgaaaaggactcgcgaagagttgcttttgtctggtgccgaaggccgggccaccaaagtcactcggacgacggtgtgcattcctca

SEQ ID NO: 3022 - DNA, 3144 bp, Toxoplasma gondii
  source 1..3144: mol_type = genomic DNA
ccccacattcttgttttaggacattcccaaacgtagaaggacatctttcacgtcaaacgcttcgctcggaatgcgtcatgcgttgttttttcttgcttttctgacctctatgttgccgtactccgcgaaacaaaaagggcggcctggtggaacgtttcctcaaaagcaacagtgttcaatggttcattccgcaagtccgttttcacttcgttgctacagaaacaaacctgctgaagggaacgccatcatgggcatgcctttcccctgagttctttttgtttcttgcgcggtcactctgtacacacgggacgagctcggcagacaccatcccagcagacagtctgctgccgttcctgctttttggatttttgtgtttgtcagttcccgcgaccaaacccaaaggcaaacgctctgttgtgcagatattctgccagtcaccaagtcatcgcttgtacaatgcaacgatctttccgctttcgccgggtcttccacctagcgtttttaaagtagaacagaaagtgttttgccgagcgaacatcgatggaaactctagtggccgtgcccagtttgaacacagtttcccttgccttctttcgcggggacaactccacaatcaggagcgacaaattagcacgggcggagaaatcactcacgttacttcgactcttctcacgtgggatggcggcagcgcacgcagacggcatcagacattctgcagaaaagtaaacggcactgttatgctgagaatcatggatcacgaacgatggacgggcgaagggaaatgcctgtgagtgtgttctttcgagaccaactcgacagcaagatttgcaacgttttacgtttcagtttgtgtccgaagatgatgtcttttgggcgccacaatattcagtgaaacgcaagcgaaacagcagaaacccggagagcactgcttttcaagtgggatacagggcaagtgcctcatggccaaacgcagcagagactgccttttagtggagagaaagctgaggcaagatcactcctgcatctgagaaggggtcagaggttcgagacagcacgcgatattcacggcagaaggggaacggaaacaacggcagtctgtgatcacttcttgaggcagaaacgatagtactatatttcacacgcattcattcctactcagatatcggtggcatctacttcactcttttagctttttcgcctgtccagcagttagctgtgaaacggtggcggagaagtgacctgagagggtactcggaagagacgcttaattactggggagttggtcctctgcagacactttcagagctcgtgtccagagagacttttgaatttgctgtagttagttacgatggtagatacgcagctgcaccaccgttgaaactggtttccttactgttttctggcgtacaacggaagcgtcacaaggacaaagagctacagcaatttctagtttgtgtcctggagtaattgctccgactcttgtagacgtacagcgtaggacctctgcctagtgcagcagcatgcaaacagcggctgtagcgactctcccgaggttgtgaaatcccagtctagtattaatcatcgtgcatgaaagttggtccaattcctcgcatgtcctttatcaaagttgagagctacttaagaaaggctacacgacatacggggaacattcctgtctggaacgacggcaggagaaaacagaaaatatattatcaaagaggccgatgttttatctccatgcgcctttaaactcatgtgccattgttcacacacacacacttcacaggctgtaaacagttaaggtgcaggctcgccagccctcgcttcatcaagcattgcgtgcggttgaactgcattgatgttttcatcacctttcaagattaccgggttaccgttttgggctcctgactccctcaacaaggagctgactgctcgtacagtagttctaccagtggatcaccgataaaggtgcgtagcacttcctgtgcttcttaacacctgagctctctatttgcaacacaccggagtgttattttccagcacattgagtggtgttaagagtgactgttgggcaggcatcgtccagtcctcttacgcgtccgctctgataatactcccatatttttcgtccccatgaagcacctagagagacaaaacgtagaaatccacgttggcaagttcctcctacaatccgcgcgaacacatttgacgtctgcttcgtctctgcttcgatctgctcgcgtgtttgtaactcggccaaggtgctttcggaattttctgcagcaaggccggcggcagtgcggagttccacatcggttctgcaagaaatggactgctgttgcctgtatccatagtttttattcgcgtgactgagcgttttcatagcaagtcctgtggtaggaaataatgccttctcagctagctgtcgtctccttcccctctcgttgctgaagggatagcgatcgtgtattgcggtaactgtgtcgatgtctgctcttgctagctttctgccaggcggcaagtgtcagaccacggaaggtgggtttcagcgtccagtccaggacgatttctgaggcagactcaacgtttttctcatcatttacctgggaaagactctcgcgaaccccgcagtccaacactttttcttttcgacacacatttacccggacaaatcgtgctcactcaagtcgcgcgagccagctgctactggcaacgcgatcggagaaccctcggtgttgccttgcgcttggcgccgctgcgattagcaaggcacactttcaggcttctttccacatgtgcggattcttgtcactaatgctttgctccttctttctcaagcaaaccgatcgcaacgcgtattaacgtagaaacgcctctcctggcccgctgtcttgccggtctgtcgacctttgtcttgccgtgcttccacacctagcggcaggccctgaccattctgccagcttccggatagttggaacgccggtctttttcgaaaccgtcggttctttggcgcttcaaggcgcgttctttgcggctttttcccaactcactttgcccaacttgctcgaacgaaacgcgcgctgtcgacccaccttggcgcatcctgagggcattgtagcttttcgagtttcaccttcctcaaaa

SEQ ID NO: 3023 - DNA, 1959 bp, Toxoplasma gondii
  source 1..1959: mol_type = genomic DNA
tatccatacacagacaactacaagtagatctctgcttttctggccgcaggcaccaagaacaggcgagttgaatctgatttcctcatacgaagattcttggtcttaccggccatgtactcgagagtgccgtcatcgactttcccgcaagtcaccgtgcggagcgcgtcgatgatgctttcgctgtcttgccccatgttcgcagcttgagccttcgaagaaatctaggagacagctggcatccagcgcgtccatgcaggagtggccggagtcaaagccagagaatcgagacgatcccaggctacgcggcctcaattccccagcgaagtcgaccgaggacctctcactcgcggaggagagggtggggaggagagcgaaggaaaaaggagactgagggggaagggaggaagaaggagaataaagaagagaagagagagaaagagaaggagaggcaaaggggaagaagcaagtggagctgcgcgataaggacagggacaggtgaggggcgaggcgaagaggcgtgacgtcgacgggagtttcgcgagcagagagggcgggagaggagggaaggagaggaaagagaaagaaaggcagctgcggagctaaggaaggggaagaagagcagaaaggagaagcagagacgagagagaacaagacagacagcgcgctcgcttgaggcgcgctccgccctccacttgcacgacgagaggctccgggcaggtgtgcgagaccttggacgacaggggggagagaagggagagaaaaaatgagtgaacgagagggagaaaatacgaaggaggcagctgtggaaaactggaaagagttccgagaaatgacagagacctgcgaagaaatggcggagatgaaagggcaaaaacctgagtcgagaacgtgtccacaagaagggcctcgccgagcagagacaaggagccgcgacggcacctgaaatcgttctgggaagcaaatgaggacaagactcgtttctcgtcctgcgtcattcaccatacacgaaccgccttctcatcgaatctcggagttttgttcttcaaacaccggcgcctctgcatgctgtgtgggtggcgacagacgcacagaagtgccaagagtttgcgcgacttttctcagaatcagcaagaaaaccgagacagcgacagcagcctcttgtctctcgcggctacactgtaaggcacatactgcctggctaaaagaagaggcggaaaacgaaaatgaagactttccggggagccacaaagaatctttaaagtgtaaaaaatggccagaagcgaacggggcttgcgtccaaaacagtggccaactcgttgtatatacaccccggaggaaggtaatttcacgaaacgtagcagcccccttatatataatgtgtatgaaagtgaatgtcgtcctcatgaggtcaactattttggtggaaatggggcctttgtagacagataacagttttcctcgtctttccagtggtgaggttcccttcttttccggttgtctatccagaaacctcaagacagaccaccgcggggctactgggaaactatgctttgatgaaagcgactgtcatcaactaaacatggctgaatgcgggaaccaacagtacagaacggagcatgctgtcgggcggttcgagagaatttcgaggtgccgcgagaatccaagaaacagataatggagtcaagaagcaaacggctctattcgatgatgggaggtcctgctcgcagctccgtctagtccgctttctccagagtctctacaccggaaacgccttgccggagcgactcttttctggtctccaaagttcgtgaatcgcacacttgtggaagtgtttaatttgtgtctgtcgctcgcaagtctcgctctcggttgttgttctccgtcgcattcttgttctgtacgtgtgtagcgttccgctctcgtagtcagccgatggaaaaggcaaagcatgctcgaaaa

SEQ ID NO: 3024 - DNA, 4795 bp, Toxoplasma gondii
  source 1..4795: mol_type = genomic DNA
agagcagtccgcagtgttacgtttagacagcgagaagacgaaaaaaaagcgtttgacacattgaccagctcgatgcctttgtttctttctctttgctttcgatgaggctccatcttcgctcacagtcgtctccaggagaaggaggcgaaggaaggacgtcgcagcgccaagaaagagcagcgctccgcagatcagcgcgccgttgtcgacagcagagatcgatccgaggaggagagcctgttgaggcgaagccggtctgggagccacagaagaaggcgttgttttcttcgcctcttccgcgtcccctcctgctcgcgtttctgtaccgcattgtcctctttcctctgcatcttcgcccacattcggatgcgcagcggcctctctctgggcaggcggatgaggagaggaggcacccgaagaagaggaggaagaggaggagggggacggagcaggagacaagtcgccacaagacgaagcagcgagcatcgacgaaggagacggagcggagacaggagactgtttcgagaagcgatcgactacgcgtccgaggtagagggggaacagcatctgcgctgcactgctcaacagaatcgcaagcagaaccaagaagagacgaagctgctcgtgctccatcagcctccacaaaacacgcagagagccttcagacgaatccgagttggaggaagaagacgcagaagaggaggacggagatggggacgaagaggacggagagggggatgaagacggatgaagagaagcagcgggatgaggagaagaagagggaggcgcgctggcatggactggagacgcgggaggagaaaaggaagaacgtacagacggggcagccttagaggaaggagacaagagaaaggcagtcgaatgacacaaagtggagagcgggaaacgagagagacggacgatcgaaggagatggtgcaagcaggcgaacagcctcaggccccgtcgccagtggcgaagaagagaaactgaagccgagactctgaagagccagcggagactgacacaactgcgtcagtgggaaagttcgaggtaaacagaaggacggaagaacacctgatggagctgagaggaaaccaggagaaacaggcgaaaagcggtctcgctgaccaagcgcaggggaagcctcaaactgacaagagaggagcgttgacaacgtcctccgcctgtctctcgcgagacagaaaccgtctgccgtatgtcttcttggcacagaccacatggcaagcgcctcaggtgaagcgaaactggctttctgcgctctgtttgggttctcaaaactgacacgagacatgacgcgccttcctggccaggggtacatacacctcacgcaggttggcgcgtctacgcgtgggccgcgccgccgaagcggcactggcgacaagcgcattgtttctcagggcaaagaacttgggagaggatggaaatgaacggagagaacgaagggagggacgcgggagaaaggggaggaaagaaaagagtcgagaaaaatggaaagacggcaggtcgaaaagtcgacgggaacagcacgaacagggggtgacattgagtggtgtgacagctgagagacgacgagcgggggcggcaggagagattgttgtgaactacgggacttgtttatggcacaattctttggatgtgtcacacggaaaagagtgagaagcaatttgtccgtctgaaaacgagaaacacctcacgtaactgtgcgggggggaggggggcttcctatctcgaaaactcagttagaagcgacagctggttctgaggtgaacacaaaagtacggctttttccgcagccagggaaacggacagaacgcagcaatgacgattgccaccaccgtggcgcatccccattcctggagaagtccgagagaaagcaagacctgcgtgtgctttgagttcttttgtctccgtcgcgggagacacgggcgaccgcacgacctgcttgctcctcgatgctcgttctgcgctgcatcgacgtccctaactcgattcgtcactcctttagtatccactgtttttcttcttgtgcgaaggcctagcagctgccttgccagagctatatcccgtctcctccttcaagagacaggagacgctacacaaacgtagaagagcagggaagacagcgtcttcgtgcaccacgcgcagagccggcgttcttcgttttcaagtggttcgtctgcaccaagtccagaagtggattttcagaaaagaacctggttgctctgtactgctcacagattcaggtgaattgcctcgatgctggcacatcggggcttatcttttcacaggaaccttctgagtttttgcggtactcgattcttctcaggatttacggtaccgagaccgacattctcgcttctactttactcacaagctttaagcgctttgctttattctaatgtagaacgctcggtagagtgcttctgctgaaacaaaggacaggactgttgttacacagggcgtacaagcgatgatcgaaaaaagtgcgagaaaaaacagagaagggctttacctgtgaatgacaagcatagaagctgctttctctgacagtgaggaatcctgcaaccaagtatcaacttcgacacgttcagagtttccaacacagcggggaagtgagcttctaattatgtaacagagtgtgagcacagatgcacgctttggcataatcacaccgaggacggttggtaattacttgcaatccttcttaagctgtaggtatcagtggataattcgcgggtctcgggggggaaccgtgtcttttcttagatctgaaagagtcaagatcttttctgtctgtgagaattcgtcacggttatgctcctagcagtgccatcactcgataaccgccatctgcttgcgcgtgtacacgtttcaacgtcacagttgcgggacgatcttcatgttccacaatggaaacaacctttctggagctgcctgcgctgcctcgttccaattcgcccacacggacagttgcgccttcgactctacagaagacatctgctacgttggttcactcggtcgcagatcgatcctttcctgtgcagcgtaagaggcacaagcgtgcgtgttgtactaaattgtttagtgttaggttcgatcttctacactaacggatctccgaaccttcgcagcacgactactcttgccaaaaaagtcgttccttctttcctggctcctcatccgtaaagattcgttggtggagttcgtcgaaaccttttttgtctcgcactgccatttccacagtgtcgacttggaaaaatcagatccagaagatcaagcgcgatccccgcaacgacactgttgtgacgtgtcaaagacaaagtaccttaagtggagttcgacagccgtcattcgggtgcgggtatcacaggcgaaaccggttgtcactgttttctgtttcgacggagtcctcattcagcgaaagacccagttttgtcacttttctgtacccgcaccgcaagaatgggggtgctgttgctacaaacagctgatgcccaccacaaaaagagactcggaagtcagcgcttgcccgatccaagtttcagtgtgctagcctgtatttgtgaacacaccctatatgtgtcagtctactcggggcacacctggtgttttatggtgtactcggaatcgaaattcactcttagcttttgattcagttgcagtgacccgtgaacgattaatcgtaacagatgtcaccagcgttttgcgacatttcgttgcaaacaaacgtcgtgaaaggaattatcaggtcgtcactgtgttttttgaacacagtctgcaaaacgtcaatcgtcactgtgtaccgttggaccaccggacaggaccgctgctcgaagtggttcgctgatcgagtgccactaagaaaagcgggtaagctgcaccatatttctttcaaattagtcttcgttttctcacttattctagataaagctgctgaacagattgttgcgtcttactatctgtgtgctcgagcgactcgtcgctttccagcgaacccagctaacttcctcgttgatttgctggtaggaggtcgctgaagtttttgaggtggtgatgattgcatgtctaccgtgcatcctttcccatctgttggtttttctgagattgtgtgcgttttgaacatttgccttcgacctatggatctcgtcgccgctcccgtgtgtcgacattttgcgttattcacttttggaaatcgactgtctgtgtcagacagccagtgcagtgtgcgttttcgagagagatgcggacgctccggagttcgacaggattgttataaggtaaagaaagactgtcttactgtgaaggcgggcgtcagcgtcgtctgttagcgtctgcagcgttccaatgtgcagtggaactttcgctacagtggcttccgtaaacgatgacggcgcattgctcagcttctgtcgtgcgttctcaagcggctgcctcgcgtttccactttggtttagctccttgggctcttcgaagggacagaaacaactgaatcttccacggcgtgtcgttactgctgtggcttcgttctccggcacaagttctgcttttaggctttgtgtctgactctcgtagccgcaatgcctcccgcactcagttccccgttgtgtgccttccggagccaccgtggactgtttacagacttctctgacgtccctgcgtctgacggcattagtctgacgggtgcgcttgtgcagcgccgaatgaacagttcgttctcgtttgtgtggcgccttcgagacagtatgaaagcaagtcacgggagcgcgaaaaagaaa

SEQ ID NO: 3025 - DNA, 2884 bp, Toxoplasma gondii
  source 1..2884: mol_type = genomic DNA
cagcagagaaacagcaacgtcgaagaggatgcagtggaaggaaggaggaatccgagttgagagcatacccccaggggcttcaggggatccaggggatgaagaaactgagggaaggtagctgtgcagcgaaaggaaatagtaaaagacagtgtcaaagtgtagacatgttcgagggtttgcctacatgcctgttgacgcccgaaagcctctgcttcagcgcacaggaaattatttttgcgatgttgaccgaagttacggagcgcgctatggctctccactacgctgaccaagttttggtaaggaaagacgacgaaaatcgaaactaagtgaaggatgcatgcaaggggatgtagcaggcctcgaagcaggagttcgctgcagtgagactcattgtttttgcttcataaaggatgatgtgatagtgtctggagcagtttcaagattcctaacacactctttcactgacggggcacaaccgtatggatggtacaaaccgcagctgcccacaaatctcagttgctaacttttcttttatcgatctttttgccgtatcacctagggtgaggggtatttcttctcttcccaagagtggctgcctgtctccctgttgggctttccgccaaagcgtcattgcaagccactccagttctcgcagttttaaagacgcaccaaacgcttccatcttgattgccttgtatcacttcaggttgtcggcggcgtcggctgcaatttgcgcctgcaagaaatgctaaaagagatggcgatgagacgcggtgcttcgatgggcggcatggatgaccgttactgcatcgacaacggagcaatggtcgcgtatcttggctgcctgatggcctctaagggtcagtttgtcgatgtcagcaaagcgcactaccgccagcgcttccgtactgacgaagtgcccgttttgtggcgggagaacgataactcgcacgagcttgccgagatgcaaggttaacgcgcaagagcgtaacagacccgatcactttttctgaccggtgatgacatgatggtgctgaaatgccaaactggatcaagctccgtctgaggaggctctctacttctctccgttagcttcgcgtctataaatgtgcgcagttacacgggtattcatgacactacatcgcaatgttttattggttgcgagtaactagtatgacgagtacgactttgcttgctagggtcccaactcggttttcgtggagcatgaacacgatttttaaaaatgaaggttattgtcgcttcaaggacgaccggacaccgctggtgccggaacctgaagcaacaataaggcgcctggcctgcgatgggcaagaagcgaacgattgaatgattctgggttttcagtaatgaacgcgacagctaacaagggcgtgtggccttccgtgtttgacccccaaaatgtaactatagagaaaacagatgactccaaaactgcacttcagacatacatttcatgccctgaggcagtacatccgacaaactggatgatttagttgggacattgagttctttcgcggctcttataggggttatagaagttcgtctgaagttttttccatttctaggctgtgcttttgttgccgcaagcatcgaatgcattgaggtggctgatgcaacattaaacaaagggctctctttgctctgtactcgggtcccattcaagggaagacgaggaacttgaaggattggtccgactagccggatctctttgggtgggatagcaaagatggtatcttcgaaaaacaacagcgaaatggcttcttgtatagtgtgtatactcgcaaattcttcaaaaaagcatcttctgactcaccgaaagtctttttccgtgatgcggtacaatgcctcctcctgcggcgacccccttccgctgttgtctcatttgtttcttagttggaaatacatgagcattcactttgtatgaactagaatgcaaaagtccgagaaaaacaatatccggccaccggtagttatacccgtttttcggcggtcctttggtatatctacaagcgacttgaagcataacacagaactgaagtcacaccaccactgtaaagtggcttacagcctgtagtcagtggcgcgatatgtaatgactgtgcaagtgttgtgccataaacagtgctgtattttttaagctttgaagaaacgtaagtttccattgtcctgacgaggcgagcgcacaacggaccgccagtcccggtgccaccctgcaacgcatgcataaaaggaattgagtgcatcgacgatgattacagcgatacggggacttcctgtggtgtgacacggtcgtccccgttttagtagcgtaacaaataagcttaatgcagtgacgggtaccaaagcagcagtgaaaagagctcgaaatatgccggcaacgtctcacacaaggcggacattgacagcctgattcgccagcgcgtgatgtctgtcgactgctacagtcgcagaagtcaatgagcaagctttcattgctccaccattgtgcaactgctgaataaaaatagttgtctacgcgttttgagtttttgtacaaatgataacttttggagtgtgtgctgttcagcggactgcgcagatactgaaacatttgcgtgagtgtgcttctcccaaagagaccacgaagcagggtcgttgtcaatagaaaaacggcagctcaccggtttgctgtttctttcgttcgctggctaagcgtttacgagaacaagctttcatgtctgcacttctggaccgcaccaagtttctttccctgtgttgcttgtgaatacatgtccagctggtttggccgcggcccctttccctctggccagcatttgtgtggaccaacaagcgtgtttttcctcatcccgctctgtctacgtga

SEQ ID NO: 3026 - DNA, 2065 bp, Toxoplasma gondii
  source 1..2065: mol_type = genomic DNA
tgaacacagcgatctacgatgcgactcacaacctcacactggagagagaaagagcaacctgtgaagagacagctaacgaatttctcacctgaagagacacacagagcaccgctgctggctatgagagagcctgcctctttcttgagggcttgctcgtacaaaacggaaggggccgtgttgtggaagagctgggcgcatgtaattccgacctgagacggcatgaggaaagtaaaaggtctttcgcataacgttgacatacgtgcgtttccacagggacagcccggggacaatgatagtgtgacgctgccattgatggccagacgactatagggagacaggttggccacgaacatgaactgtctctggtgttgttctcgagggagctgaaaagaggaacttcagccgatgcaggaaaaaggtcgaattcctcgggaatctacttcattcaacttttctgtgctcaacacgtaaacaagaaaccacggaagcttgagcatgcgtgcgcctctcctaccgcttggacattctcttggaagtcgatttctttctgcagctggccaagatcgagaatatccttctttgtcagaggacaatcgcctggtttgtggtgttgcaggttcgcgtcgatttgcttcttgagcatctctaagaagctgatggagtccttgagactccccgacgactgtgttctattcatttttctgaccgagcgagagaattggacgacgaattgcctctgagcatcggaagattttcggttcactcccgaacttccacggagctgacgaaagaatgtatgcctcacttcagcgatatgtaagccacaggtttcagagcgggaacagcaagggaactccttgtctgcaagagagtgacggacacgtgaggcagttgaaccttgtgcgggcaagaaaccccttcctgggaggaatctgtacacctctcttaagacgttgcgagacaagtgcattgtataattcattttatgtagacaaccaccccgtgcgaactgcgcagcgcaggtcgcgtgcgtctccgatttaggcccgaccccccactccccaaacgaccggtctaacacatgcgcgggttttttggtgagacaatcacagactgatttattcttggcggtgcggaattggaaacactggtttcaacgccactcagcaaggtacgcgacacgagacgtgcttttttctttaaatgaggtcgaaatgcgcactgccactccgtaaaacagaaacacgatgtgtacccgtggagacttcgctttccacatgcatgcgcttcgctcgagatgtcctatattcgaaagatcgtgaagcgtttccttcactttttaaaataaagtgtgctgaaatcgagcgttgccactcatctgtagaaaagcatgtctaggcgaatacatccatctggaggagctattcggttgagagaagcggttgaaaaaaattgttttcacttccggtgacccaacacctgcctgcattattttgaaaattctgtttcttctgtcaccctgacagcgcaatctcgtaaatgtcgccgtcaacaccgagaactccttggagaactccttggagttctcgttgatgcgaaggtagcttgcagaagcgtgatcagcgagttaccttcattggccgcgagtgacggaagtgcgagcgaaagatgtttttcttcaccaacacggataatacgaggtccttcttttcccagtcaaacagcataggcatcatcccgtgcgggaacagaagctccttccagacagctgcagctatggcagtacatccaggctgatctgcacaattgaaggcccctctcgcacttttcggaagtttaccatcttctcgtcacaacagctcagaggtattctgggcagagaaactgcctctgaggaaaggtcgaagaacccctcgtttgccgtctctgccaccacgtctgatccgagtcatgattctgtcacttttgtatcattccttgccacatgcgctttcgcgtgtattcgcctgtcagcggcacagaatatgcgaatgaactgtcttcgatttccgtctttgcttcagca

SEQ ID NO: 3027 - DNA, 1392 bp, Toxoplasma gondii
  source 1..1392: mol_type = genomic DNA
gtagtgttggtcaaccgggtatttcgagttcgaagtggcactctctcggtgcgttgcgccctgaggcctaaaacactggatgctgcagtgtgtagtttctggcatgatggaggagaaaacgctggcagatttatagggtatctgggcgaaagtcagctccagaaaggcaacccgatggcggccttggcctacaagtctgtcggatggcctctgttcacaggggtgaagccccggtacacggacacgtcttcatatacgattgcaatcggagcggcggtatggctatgaaatcgcagatgagacactgcttgttatcctcgcctccctgcaacactgagagcccgctatttgtaacaatccggcatggtgtgcgggataaaagagttttacgtcttggctcaagaaattctgacgtatcttctgtgaagatccatgcatacaacgaaaacactcagtattgaagatgcagtagcctttcaggcctcgtaacaataaaatatacaagcaaatgagaacactgcatgttttgatctcgtggtgagttcagttcagtgcaggtttcgcgatttaaacgaggtcaaaatgaactagcccgcagaagatgtgtatgcagcccaggtgagtctaaatgaccatggttagacgattgggaggaaatcaatgaagggagaaacatgtatagtttcgctgattctgaaaataagcaagaacgaagcattgttcttctttagttaaatcagcaatcctcaccagactcaatacggatagcttcgtggaggagttcgttcctgtttactgcaggtccaggtgacgtgtgtgctcagactcaggcaatttctaacggtggagtttattcgaatgcacacacgaaaaacactggacagaagcccttcaactgggacagatataaggagaaaaatgaagggagtattttctccctaagttaaagaatgtcgaagtaccaaacgggcgcatgcttatgcgctggcactcatgtgcatgcgctttgattttcttgccattaaaaaatggtggctcacaactgcagagttctttgttcagaaaagacacacgctatgcagtttactgttgcgtgtgtgtcgaatacattcatcgcgcatttccttcgtgtgtcaactgtttttcttgtttttctctgggaggttgcatgcctagaggcgtgccgcagcctcaatctcaatagacgcgggaaattgtatcatttgtgtttgaatccctgttcatgtgagtccgtatgtatatgataaatccacataagttatcttgtttttgtctctctgataagctttcatgcgtgacttgtgaagtgcatttcttagccgactttaataaacaccctccgtcggtggtttacctaaacactccacaaaa

SEQ ID NO: 3028 - DNA, 2649 bp, Toxoplasma gondii
  source 1..2649: mol_type = genomic DNA
gtgcttgcagtcacttttattggcacttggcgttctttggcaggaagcgagagtctcaagagactgtcggtgggaactgtggctaaccggatgtcactgccctcgctctcttttacaggggtcctttttgcctctgttccgcggcgagccgcattgaacgtcttgcagacattcctatgtgtatcgaggtgtattgagcgaggtattgggcagttacatacagtattgtgcactgcgattgcatgctgagaattgtatccacggagtgcgattttttcgtcagagctctttccacaaaacactaaccttgtgtccataggcaaatgaatttggggtgtgccgcgtaattatgcagtatccagaaagccgagaaatagagtcgccaagctcgagatcactttttgcgtgatcccactggtcgtcctgtgtggcctctagaaacgaaactgagtagtgaggaaccggctgggagagttgcatcctgtagagatctctgctttctcacggaacgcgtcatgtctcatcgagaagacccgcacgttttccggtgttttccaccaacttcgcactgcggttttcgacgaagacaacgacgctgacaaaccaacaatgcccgcttcactaatcaaattcgacctgaagccgcgatgcacctgctcatcggggcctcaaaacgtccacgtagacgcgtaaagatgtatctgcatatctaagtgaccggttgaatactcagaaaaattttgtgttgcggaacagccaccgaacgaatttgcggtgagggagtttgcaacgagcagaaagtacagttgcacaaaagagatgatcctgttgcctcaaagtttctgtctcagccacactggaaagcagttccgccactgcgtgaggaatagcggaaagtgcaagttcggccttcgcttcccatagtgttggcttcgcacggacagggcaaaaatgttccacgtctaccccgaaaacaatttgtgctgcgtctgcatacgcccgtgtttttgtctcggcttgctgtagccaaaactgccaccctctagcggcttgaaagtcaaaccgaggcgagaccatttaggacctctcattaaaacatgaggaaaaaggaaaaaaagggaactctaagcgctgcatctgtacctgcagggctgctagagtcattcagatgtgttctcgaaatcatggtaacacaatagaagatctcgttcggatgcggggactctgccctgccacaccgaacagagaaatccagttatcatttgccgtgtacaggcagctctgcagacccctgaaaacgccaagcagcaggcactctcgctggcgtgcattgggagcgtgtgtcgttgtcttgctgctgattcgttttgatttttccagcgccgtcagctctgcaggaagcccgcagtccgctgcaactgcatccctgcttcgcatgagcattctagtttctcttttcgagaacacatccagaaatacggtgcaaatgcgatgatgctactgtgtggcgagggaagggtttgcgtgtcgggacacccgtgaaaacggtttttcctgcttttcacacggcgcctggtgttttgttcaacgaccttctggacttctccaggggagttcgaaactgtcattgtagttgtcttctccggtgcctccttgtgcccggcgtgcgacacttgaagagatcgacgcatctgtgtgagtacggagcgatgggacacctgagtatgccaaagatctgaaagacctgtgctaccgcgacgtgtgtatagcggtgaagtcgaaagctggccacgagccacggaatggagaggccggtgcgggagcacaaacaaagtttgtccaccgacagcgatgggctagcgcgtctcctgagtattctgcgcctttgcatgcaacccccagttttttcggtcgtttgctggtgtgtatgtacaccgaagtcttcacctcgagaagtccttctttccatacgaagcgatttcctttctttgtcttccacatcgtcggaataccgtggtggacgctctctgcactcactcgctttttccacctctgtcggcggtcgccttccgagtcctcggagagcaaatacttttcccgttctcttctacctcttcggttcgcttttttctggacatgtccttcggagtcgaatcaaggggacagacacagagaactccgttttctatcatttctctgtgacgcgttctgccctttgctgctcgtctttgccttcctgtctccacgcgcctacacacagcaagccacgtacaaacagaagtgaatcggcactcggtttccccgtttctgtcattatcccctttgtcgttgaaaacgtgagacgattcgttctcgcgtcctcttggttttcgttctccgcaactcttctcgacgcaccaaaaaccggtgtacgtacacttcggcagacagatccgacgtccggtattcgatactgtttgcatcctttccctcgttttcgggtttgttgctcttgaatctcctttctcttcgtggaagttccgctcttctgtcgtccgtggcaacgctgacgaggacatctttccccctctgcgacatctcgattatccactctcattcgtctcagtcgagagagttcgacctcaggtttttgacagaccttcgcaaaaa

SEQ ID NO: 3029 - DNA, 3728 bp, Toxoplasma gondii
  source 1..3728: mol_type = genomic DNA
gcgtctgctctcgcctcactgtgcattctgtctcctcaccttctgaggcagcaggagctgaagagacggcggccatgcggcctgcgacagctgcggtcacctcgccgaggttcctccagttcgcgttttccgctgcctcttctcttccgcgagacaggtgctctgtcactgcagctgttacgctgttcaaccgcgtccacgcgctctgagagttctctcgctcgccttcagaatacctctctgcatgcgcaccgagccatctgccagcccccgccgcgagacgcccgaatcgaaatccgccgtccgcgaatggggaagcagaggaaggagaatcagaagcaggagaagaagagggagggagatgagaagaaggcagagaatgacatgtgagttgagccggggaactcggagcatttttcatctgagggaaagggggaagggggtcatcgccgtcgtcgtcctccatgaggaattcatcgacttcgttaaagatgtccgtcatggtcgagagtggaaacaactcgaatctggaaaccgagaaacgtggaagctctgctctggagacagatcggtcagacactacgacgtggtgaccctcagagtgggcaaagggcgttctttccacgcacaggagagaatcgcgacagcaaacgttcgtctgtcacacaacaggatgcagccgagttgaacctcgacaagaaggagtgaaaaacgaacccaatcctctgcaacagagaaacacgagcgtcgaaaacgacttgcacccgcgaaggcagttcggttttttcgggactgcatgcgttagcggaccaaagtcgcctcgcgaagtcctttctaaggcgactggcctctctcccgtaagtgtcggttctctttgtgatttacttttgcttctgcgccgtctgggtcagttctccgcagtacccagcttctgtctcctcggtctgtattcaccaccggggccgctcggaaagtcgtcgagtttgagtccccccgttttccagaaagcgtaggatgtagtcacaaatatgtcgcgggacttctcgtctgctgcctcctgctctgtgtgagcgtacatgtaccacctcgaatgggggaagggaggaagccggtaaacgaggacgcagaggatcgtcctcagataagaagcgcccggcgctgcagcgacgttaacgcagagcgcgggaaaaacacctcagagtccagaatggggaagcccaactgctggtttctcgagcgcaaaaagaatcgcgaattcgagtagctgaggtccacacacgtccacacgctatcgacggaggggggtactacttgtctgggagggcggctggccgcggtgaacgcaaaacgcgccgcttcgtgacaaacaaaaccctcgtttagagaaaaacacgcacagaaaaaatgcctctgaggcaaatcagaaaaaaagatgcacgacatgctcgttctggccgccctactcctccgccgaaaatccacagccgatcacgcatactgtctcaggagcgggaaaacgacatcgtttctaggcagcagcaccagtgcgacatcgcggcaacaatgttctgaaaaggtaccgtgcccgtacgtcttgcttgcgaaaaaaccttcgcagaattcacaactttgaaggcgcaacggtttttttaagggcgaaaattcgctgactcgaaacgcagcttctgccgagggagtcgggtaagcaaacccagaagtggtcggccaggggaaaagttgcagggggtttcgcgctgtgttccgcaagacgtgtgctcactgcattccctgcttcctctctttcctccgtcgtttttgatgtccgaattctcctccagtgtcagagaaaaaacagagaaggttgtgtgtcgagtgtcgcagaaaaagacgcttgtctgtgcccggcgtagacgatctcttcggcctctcggacgaaccgagttttcacggtgaaccttttgtgcttacttttcgtctcagactgtgttgttgttccctgcttctcaaaagccgcccttctctcacttcttgttcgccgattgccttcaagaagtgtggagttcccttccttttttctgggttctccggaagcctcctgtagcaaaatgcgctgaaattttggacacttctcgacggtgtctcgctttaggacggacctcatggtctttagggcaccgttttctttcactttttctgggaacatcacagttttctccatttcagggaacgaacaatctgcaagcgtccacttgtcctgtggctgctgggctcggatgccgcctctgtttagcaagtgtagcagggaccggatggcaagctaggtccacttcactgcagtttcaagttccaaaccaaggcatctcaatttgtatcgtgttctctgtcaacaagctgttgaacctgtcgacggagtgtcgtcccggctcctatcccgcgttcgcaagccgcaccgttttcagaacagtgttccccgtggtgttgaaagcgggctgcgaagcgcgagcgtttcgttttgtggttttttctgggaaacgatggggatctcttcgtgtggcgagacgcttgcctcctgtttcaaggcggtgaagtccggaaccgttgacttcaaggggcaggagcgagtatactcgtggttgatatactttgcgtgggcgggtggcctcagcgggtttttcgtcggagggattctggaagacttcacggtcacagtgtacacgattttgatgtgcatggccattgcggcgattctctgttttccgtcgtggccatgtttccacagacaccctgtcgagtggacgccgcacgaccccgccaggctggctgctctcttcacgcagcatcaaacccaggaagaaactcctcagaaaggtgcggggaaaaaacgagggaagaagagcgctgaagtgaaacggaaaaactgagtgtgtgtgcgtatgtagacaagtgagtcttcccagagttcgtccggattgttgcgtggatcgtgtcaactggacttctcgttcgtcaaagacctggtcgtctgacccaactgctctccataaaaaagcttgttaacgctccctcgaaaaatgcgacgtggagagaaacgtttgctttttcggctttcaactgtccgctgcagcgacatgttcctacacatctaaagagcccggaagttctcgattggcgcggggtgttaaccttacgtaaaatgcggttgctagcgaaagaccaggccgcagaaacacttcagagaacccccagtcgccacacacagttcaacacgttttcagcggatgtagacctcacaagttcaggttgcttgtttgttgaacagggtgtcctttctgggaacgttccgacgcgtatttcgccggtgtcgcggaaaaaagtcgatgtcagagaaacagaacacatccctatctcgaggtgtcttcagagttgataggaaagaagagcggaaattgcactggattcggactggtcatcgacgctcggcctgagttcacacttgctcatacgcgtataacgccctgttgatggctagttgtcgacaggctccccgcgaacgcgcttcatttatgttttttcttctgtagagttcctgtctcattggcgtcttatttctctaaattgtcttgctcatcgccacgtgcatatcgttctgcgcgaattgcgactctgtctcgagaggtgtcgctgcgtacctcgccaccggcgatttgtttctccacacacgcttagta

SEQ ID NO: 3030 - DNA, 2820 bp, Toxoplasma gondii
  source 1..2820: mol_type = genomic DNA
aaagtccctgcatatccagcagtcctttttctggtgaacgttcattttctctcggactctcgcagtgaactcttcgtgagcgtctgcgtagaaatcaatggctttctccacacacacccatctaggtcgcattctgcagcgtgttcgtcgcttttggcggtagtaggtgacctcagcgagcgtctgcagcgtctccagttctgcgagtttcgcctgaagtcttcgagccatgtcatcgtctgaaaatcgtcccctaggcgtatgcggagcggtcggcaggctgtcgctgacactgccttctcgcgcattttccagcttttcaaacgcagacatttgcggctgatcgccggcgggaggcggcgcgaagactggcacttcgtgcgcgggttctctctctggcagttggacagaagccgccgagggggaacgcgccgtcgactcggacggctccggtgtcggttccctaggctctggaattggcacgcgctccggggaaggtgtcttgagttgtccaggtgctttcggaggtggagaaacaggcaccgggtcccggttgaccaactgaacttcctgactggcttctcgggaaggctgctcactccccggcggtgtcggaagcttctctccttctgcatgaggggcaggccgcggcggcacctcgacttcctcccgttcctgaggaggtgcctctacttcttcccgttcctcaggaggttcctccacttcctcacgttcctgatgaggttcctcaacttctttcattggaggtgtggcgggtgcctcttcctcacggggagaaggcgcttcgatttcatctggagcttctttttccgaaacttcttcctcaggttcctcttcaccttcaaaaccgttttcttcttcgtcttcggggagttcgatgtggtcccgagttgtcatttccacggggatgctggccggtctcgagagcggcgcctcgccgaggtcttcggcgcgggttttgactgctctggggtcgaagagaggatagcgaagaggaatctgtgtctcttcttcttcctcctcttcaggctgtttcgcaggaatttcctgagccgccttccggctgtcgctgcgcctccccttctttcccccgccgaagcagaaaccgaacggattcttcatgcgtcccatagtgccggcagagatggatgacgggaatccccgcgtttttgagaaagtcttaacggacgctaattaaacgtacaacagtgcgcccaggactgttactttgtctccagagttttcaatacgcgaaaccagccgggaaggaacgttgaaatgcaccactcaacctagctcgcctcgggtcggcaggtgcaggcatttagtagaggttttccactgctcttctgaccaagagaaagcccacgttatattcacatgaaagcccacttcgaaccgccgaacaaagacaaaaagcggtgggactgcggcacttttcctctggagttaccgactcccccccatccagagtcaggaatgcaactgtcacgcaggagacacagaatacccgagagaagttgaaatagtccaccacagaactctcaaaaaggcacagcgattcaagacactctaacgaaatcggctgcagtctttgctttcgttttctcgccccagagcactggaaaacaccacaacgcgcattgaaggagacgccgcagcctatgcagccgtcgggctgctccgttggcttttgtcactggactgtggtcgacgcagaagtctcagaaaaatttactgtagatcttgacttcgtttgagaatcagatggcggactccttcacagagacggccgccttgcttgcccagaatgttgagcctgtcgcagaattggcaaaacgcgtcgcctgtacctccggcagcagcgactgctgactctacctgtccgtaacctggttgttcggctgatgatcgccgagttttaagggagtgagagttgaaagtcttgctttgtttcgacttaaggaagctacaacgtgaaatctggactcagacgtgggccacgagatatgatacccccgtcgtcgaacacagcgcctctcttgcgttctcacacctcctcatgttctcgcgtttccaccagcgaggactcacgggggagcagctagctgagcggcacgattttagcatcgaaaacggagtctcttttctcgtgagaaagagagaacttggaaaacgagtcggcgatcgactggggtgctttccatctcaatgaaagatgtatacacaagatatatacagagtttaccaaagggaaaacgctcaaagatttcataaagaacttccttgtctctccacactcggcgtgccttgttcctctcgctcgcaccacgacgaccaagacatgtaaaccctaaacgcgaatgtgtcgcgactgtgattcttcttttcgccgtgactttcttcctagaacgaaaactttcttttgtcacgcaggtctaccagttccaagctgacggcgtctgtccctgttacacagaagtcggcagtatctgtgcgtggtttagacaactcacgtggaactctatgcttattcctggcttttgtttctcctcatcgaaagtcctctggcattttcttcgtctcgtccttccttctgcttctgtggcggaaactgtcgcttctgtatggtctccacccgcgtttccgtttagcgtagtgttggccgaaaatcccgtagtgagctctgcgttccacctcaatttcctgctttcccgcgggcaaccgaaagatcccttctctgcgctgtttttagcgggagtcctttctgccttacgtgttttccccttatttgcacaa

SEQ ID NO: 3031 - DNA, 2132 bp, Toxoplasma gondii
  source 1..2132: mol_type = genomic DNA
acaaagcgcgcgttcttcgcgacgaagtctgtctccgagttcagttcgaggagacagaccgtcttccctcctccgctgttggacgcctgtccctccgtctctccagaggccgcgcctgactgccgagccgccgggagacacacagccgcgatcacgccctcagctgccacccggtcggctctcctggaggcacgagcaatgcctcgctttcggagattcaccgctgcttcttctagatcctgaagacaaccagacacaaacgaggggaaacacgcgaaaggaaactcctaatcgctctcgtgtgaatcaaaaaactccctttctgtgcaaatacacacttgcccacccacctgcgcacacatatacttacatgcatacatccgtacatacccacaggcacacacaacatatgtatacatatatacatatatatatatatatataaatgtatacattatttgggcgccctgatatggacaagacatgcgtttcatatgaatagatttccggaagacacatatcaactttttatgtgggaatgtggacgacgcggtgtgtggacctaagtgtcgcttgggatgtctaacaagagtgagctggaaaaaatgtttccctcaccatattggattcttcgagagctttgcggcactctccaatgctgaccccgccggtacgcgctcgcagttttttgacgagagcgagaatgtcgccttccttcgctttgggctcctcgcttctcgtcgagctctctgcgaccctcgaggccgccgctgcatgcgcaaatcctctgaagcaagtgaagcccgcagcgggggccagcgagggagaccgggaagaagagagagaagtagaataagatggagagacatgctcacgaggagggtgagaacggagaaaacaagaagaaaggactcccagtcgatgtgtaggttgcaggacagaccgggtcatgcccgcgagggaggagcagctccaccgagccatttggtgagagtggaaagagagaaacaagcgaaaataggaggaggctttcgagacatgccaggaaacgccacgcgtgcggctgcgctgggtctttgagaccagagagtgtccagctgaaaaggaggacggccgaggggaacgaggagacttcagtgtgcttcagaccaagagttcatttcccacggctcaatacacttgccttgctcaagaatgaccttgaaaaatcagggacaaaacacaggcgtcgtcgaacggagaacgccgcgaatccgacggtcaggaaaggtggacctaagactgagggtggaaaccgaagttcgagctggtctactgaggagaatcagaggaaaaattcgcgagttgcacgattacaagtgacgggggagggggggggggggaagtggagacgaaagaaaacgaagtgacagccgagaaacaattcgcctcgaagagacacatgcaagtgtgtgtgccgtcagagaaaagtcaccgcgcagagaaaaggttcccttctctcaatctctgggtagacgaggcgaggagagacatcaggatcgggatcgactccatggaaaagtgtgaggagaagaacgatattctttttttcgtgaagatatcggcccttctttttaggaaaagcaagcgagagatgcatacgcgatagatgtacttggctcaggcgccggggggttctcgttcgcgaatgatgtagcattagcttttgtgttaggcaaacatttgggctgaaaggacgaaaaacaaacaggtctggtggcgccattgccttgcatatacaagaaagggaacaaatgcaacaccctgaaggaaagtgagctccgctgaaagacgccagagaacatggggcctacaggaagacaaacgaatatgttttgcccgtctgattccatcgttgttctctcccttccgtattcacaatccattcctctctccatcctcctgtctctttactctccctgcatctctgtgcttcgttctctgtcgctttgcagtcgctgttctagccttctgcctcggtaccatctgcgtctctctcgacctccgtccgtctttgtgtttccgtgcgctactctttgactgctcgggagttgagatctttttacagatcttgacggtctttttttccagaa

SEQ ID NO: 3032 - DNA, 4539 bp, Toxoplasma gondii
  source 1..4539: mol_type = genomic DNA
ggcgacggcttcgaaaaggacaaacgagaaagtgttttctttaacggagaagaccgtaaaagttctgaagttgcgttgcccgtgtctggcgatgatgctcatgcgttgctgagccaattttgcggcggggatcgcttcgcgaacaccaacgatcttgccagcgtgaatactgtgaatgcgcccgctggcagaaccgcctcagctggcaagagcggtggagatgcaaaccatacgcaagagtcttgtgagactgggtccagccgtcctagctctcaaagtaaagatacacccttgctgccggcgtttttcattgaagtggatgaagagcccatggaggaatcaactgcgcaaaaacgactaggtcagttgcgacgagagacttgcctagacacctcggcacttcctccagtgtctctttgcttcttcgactgcccgagtgaacaacgacagcgaggaatcatggggtgatgattacaatcactcgtaggcgacatgtcacctggtttctctcatttgtgtcgttcgcttgctgcagacgaacgcgcccgcgagttgtggagtgactatcagcgcaggtatgaaaggaccacagggtgtagccgaaggcgttgaaaattttacggccgtcggcggtacacgcggtttcgcatgtcgtgttttttggcagggacgacgacaatagtttggcgcaagaggacgaagcagatcgagcctttttcgggtgagtgaggtggtttcggttatttcgtatcaactatgtctggcaaaggagcagcgcgaagaggtaggcttagatagtggatcacttttttcactggaattggtagtcaggtgcttttacaagatcgttgcacttccaaatatttctgtgtcagcatggtttcgtggcataaagcacagatgtagtggaataggtgaccgctctctaccacaggaccttccgttcatgtgtttgcgtggtatgtttcctgactactgcagcggcggagcatttcaaaatgaggagtacgaggccgccgaggacaaggtaggaacaacatgttttccgatttctcctgcagctacaacgaatgttcgtttctccccatccagatttgacatcctggttttgcctgttgcacgcaggtcctccaggcctttcaacggcggctaagcagaaacccccagcagatcatccgctacagcttcggcggcaagccgttgtggatccggacagatggcattgctgcgggatctcaggagccgtccagatgcgaacgatgtggagcaagaagggtatttgaaatgcaactcatgcctaccctcatccacacagtcaaacaaaagttagtaattagtttcccgtgatagttctgcgtcgaaaaggaccagcctgagaaaaatgcagtttccgtctgtctttctcttcgacgctgcaggtgcccgggaattgacagtacgctgctcaagaacggtgttagcccgaactggggtactgtcgttatttttacatgtaagtttaatggcacttatagcttgtaacgctgtgagcaatcagcagtgaagtggctgacgggttttcgctcgaaaaattgttatgctatctgcaggctcggaagactgtgtacgagattgtccttatcagcgagagtttctggtagtccaagaaggaatgtgagattcgggcaaaaagtaaggaaatctacacatacttttacgattgatgggtgttgttcgatttgacaggacgggaacccctctttctacagcgatccggcggcagatatagtgactgcctttgtatgtagctactgcgtattcttcaggctccgatcaaattccagtgctgctcttgtttcacatgagttcatgccaaagcagtggacacagtgaggaatacacgtggcaactaatgttttgctgccattgctttcgtttacgtttccttgtcttgaaagcaaaaagttgtcctggcaataacacgttctcttgccaccctcagcattacgtctgcttgttgaactaaagtagcggtagcttgcaactgtaggtagtaaagtatcagacatatttccacggcgccgacatacacagtggtacacaagagtactaggaatgaccatcgttgtggttccactaagttcacctcagcctgcccatacggaaaagatgtagcctcaaaaaaatagtaacgtattgtcggtttgcgagcgaccttcgccaaaaatgattttggcctgaaccgcacacccacctaggaatgcattacaacaatgaatacgcaggataagccacttactgttctgcgcgggtccatggttttgacaccactggtctggcatggccggtaaactctttaaccacgaaatggccagcgctcctacccctcagccattggggtgcactgagcgtttctgggaaagaagtgaaatagtgaggatggagggcggcaggaacagcccacacctccgtgctcggacattcgactgatacatagtaggcggtggatgtccccactcctgtgttaaaacagagagggttacgtaccctttcagatcgcaatgatgaataatctgcttacctcgcaaaatattgataccctggtgcacaggttgtccccaagaacagccgaaccgacacggttcgtcaggagagttgctctctgtccagtaaaggaggtgacactgggcaagcgtatcttgggagacaccttgggcttccagggtgaagaaaacaaaattcgcgggtgcgcgtgactcttttggtcgacgtgcccaagcgaaggctccacatcgatttatgcctgatcgcagatacacgattgccgcgaaacacatgagaaacgaggcatggagggccgccatgagccactatgcgaaaattgtgtggactacgtcatagtggtgctgatttgtaaggcagagactagattggtatagcgggaaggtgggctgattgggttgagtggcgagtagcaccggtgtgtcatggcagtatttgccgtgtatgtacacgcaagctaagttggctgttcaagcaagttatgcttcgtgctggcatgtgtcttgtctttcggtgcctatgcccagggagacagtagaagaaatttgttttgttttccgtggtccgccactttgtttcatgcgtcgtatggcactgtttggcaagtcggaaaacatcctctgtccagcctgtgaacgtacccaaagatccgctttgatggagaccttcgacagcgtagctcacagaatcatccatctagcttgttagaacctcgccacggaacaatctctactgataaaatcaagtactctcacattgggtacaattggggcgacgccaattgtgtgttccgtgcatacagcgcacgaataaactattcatttcggcctggtcccagtggtggtattcgggtattcgactacactctcacgagcaggcgaacaaactccgtgttctacccagccttcttcggttgatatcgtgaggaaccgacccatgattcagcagtgcctctaacacggtttctaattttccctgatatctcacgtttccactttgaacacaatgacagagcagaccttgtcagatgcatgtgctgtgggtgtcattgacgtacaaagtacaatttttgcccggtaccagctgttacgttgcatgctagtagactggtcattcaactgctggacttttcgtaggagcacagtcgcagggtgtgtagctcaatggtagagcggccgactgcagatcggcaggttcatggttcaattccgtgcgcgcccttgactttaaacaacgctgccacctttggcatttttgcatccagggtgatattttgtcaatcctttcttcagctgagtattcatatggcatgttacaggtttgtgtgtgatgaacaagttccatcggcgcgctggctgacgcgtttgttgtgtggaagcttgacggcaggcctccaagtctcatgcgcagtcggcgtgtcaaggggtggcacggagcggtggtggttcaactgagtgctttagtcgccaccgcagtagggatgactttctttaagaagacgttcgcgtgccactattttcactcgtttgtttggtgtctttgttgtgtctcttccccgtgaccttccggggagccaggtcaccgctaggcagccgactcgcaaggcaggcagcaccgctgtgtgttagagaacaggaactgtcttgctcggtgctcccgctgtgaactcatgcaaaccatttgtcgtggcgttctcttctacggtctttcttcccatgagacataaatatgcgtcatgggttatctgtattcagcaaacgtgtggcctttcaaattccgtagtctcaaagcaatacgctgcgtcacctctcgacctgcgacacggacttcgatctgtacacggcgcgctcggtctctcgtgggggctagcaggagtcgttaaacttctaactgcgctaaaaggggattgagttatttgacgaaaagtaacttcccaggaagaagggcctccgtttcggcctctcgttcatatttgacgtttcagcaccgttctcgaga

SEQ ID NO: 3033 - DNA, 1747 bp, Toxoplasma gondii
  source 1..1747: mol_type = genomic DNA
cgtttggctggttgtcttcggttttgaggaaacaggcagaaaggggggcgatcttaaaatcctcgttgcgggtcggaagagcagagactccagtctcgctgccttcttcgcgagccttggctgctgcctcttgcgccttcttcgccagcgccttgtgcagagctgcgaggcccatgccgacgatgttctctgtccgctctgcgtccttctgcgtcggtggcgagctcgccgcgggaagcgaaggaaacaaaggatctccagaacctgcaaagccgaggcggtccagccgcggtccgccacccggcgcagcagttgaaacagaagagtcttctgcaaatgcagacccaatagagcggcccgcgcgcaggccgccacccagcggtgtggtaccgccagaggagttgggtgcaggtgcagcgggggagctgcctgcctgggtgccggagtcggagggactggcgccttcctcgctcccgtcgagggggaaagcatttccgtcacgaggcgactggcgctgagaagacaagggtggcgaggaggatggcgcagagggggcgagaccggagacggcgactgaagaactactggaggcgaaagaagcggtgaaaaactccgtggaaaccgacgaactggcgcctgacaaggaagacggaccgcctagactcgggtccatgagaagccccatagaggaggagacgcacgttgcggcgttctccgtcgaggcggagtcctcatcgtcttgcagcgcaaaatgcattttgcggaggaggtcgtcgtcctcctcctccacggtgaaagatgcatcgtacaaatcagacgagacagatcgactcagaaaggcgccaggaagcgaggaagccgaagactcgaaggaggaggaagtcgagagcggaggtgcgccgccgacagcagcggacggaacgtccgctgaaggcctggcctcagactctgccgggggatcagcggggaggtgagaaacgtcattttgttcgagacctacgtggagttcagacgaagacggaagatgcgactcgggggaggccgaagcgtcctcgctcgagggctctgccatcctggtcccgaaagggggagaagatgcgctgatcagactgccacgttccccagagccaggccatttaatggatggggaaacggggcgctcaagatacaaaaatccggttcgtaccacagaaaaagacggcggtcaaaatctgcggacgcaacccgtcgccacgagacgctgaaatcacttttccacgcggagaaagggtgagacgtttctgcagagaactgattatagaataaccgtctcgcaagaatcgcgtaccaagatgcatgcaacccctgcgaaaaacagaaccctccgtccggccgccgccaacagtcggcaactcgcagcgtgtcctgtttcctctcggtcgccgcagaactctctctggaagttccagacgtttattttcggattcttcaaaaagtgaaaacctaaaactctggttgccgcagtacatgagtgaaccgctggagtgctgtctactcccggtataagtacagaccgtgtgacgcatactggcagctggcgagtcgggtcgagagtccagctgctgggcgtgccaggctgcaaactcggagacgcgtggattcaagcctgtcccgaaaagcaaatgagaaccagaaacggcgctagacactaaaagtgtttcttagtacgggataaagtgcagagatacttcgacagagctcgtctaga

SEQ ID NO: 3034 - DNA, 2341 bp, Toxoplasma gondii
  source 1..2341: mol_type = genomic DNA
gtctcgtcctcggagtttttggaggattttctgctgcagtgaaaggccaaaatccttttctgtcggtgacaaagtgcctgaagtagcagttaagtgtaggagactcgcacaggatccgcacatcccaacggtaaacagcgttcacccagttccctggtggagcaccatgcaaaggatgtactcattgtgttaatcagaccgagggaggctctgaggggtaaaagccgcgcgtgaatcttagtcacccacacgactgtggagctggttttttgcgcgctgacgccgagtttggaagaaagagttgccatgagtctcgctgtctcttctgcagcggaaactgttggcgcgacaccgtgtgcggagaccagggatgccctaatgcaccttgtttcctagtacctagcttaccactcatgtaaaccgttgtggttttttgagcatgcaccagtattcattttggtgttacgactttcggcactaagacaccctagaactcacacaccgaaggtttcgaagccgtaccgatctggatcgcagatcgtgtgcacaattcaatgctgtctcagtgatgatcgtcgccagtattaccatccgttttcaagacgctgtccgttatacacaagcaactaggattaagtcggacttgacggtgaatggaaaacaaaacagatgctgatacgggactaggattaattctcctttgtccgttgataggcagcagttgtcctcacgcgacgatgcttaacaatagatagacggtggatataagcatgccgttgttgaaacatgactaggatcaactgtggtttgaaattgggggattgagtaatttgcctttacatttcccgtcggtcttcgttattctacacacgcacgggcggttatggggctttcgcacgcggaccggcgacgaggctccggagacaattgcagccgcaacaatataaagaaagaatgtggatgggcattctgaggttattcatactaaaggtggcacatagaagcgcgagaaccagcggcggcgttacctttatcacggagcgcagcgcggatatgcacaacaccactgtggaaactactgttaaggtgcccactgttctctcctaccgccatgtgtatagtggaggcagtagccacatttgcaaattgagtgctgactgcgggctcacgctacagcctcggctgtttcttatgggaagttacaaggccaatctcacacgcgttctgttggttcagcagttctcaggcgagcccaagcaaaggaacagatcgcactaaacaaatgatgccacagtgtcttgactgatcgatttttgttgcatcgtgcacggcaaggtgcccgtgcagataggggagttctgcggcttctttctaacagcgggggaaaagtaggtttctctgaaggcgatatcgtgccttatcccccgcagagacacgtagacatgtgatcacagcattcgtcttttttgacgtgaaatgttcggctacagagtaccgcgttagcatagcttcagacatgtgcgttccccgccatgcgcatttctacgtccccggaaggagtactctttatgaaacataaggctgaactactctatggggaagcgctgcagttattgttcgcgagacagatagagctcacaaaaacttgttcaggcgcgagtctcgcgaggcatgacatagaaaacaccatgaaaacagcaggggagcgccgtgacgggcgtcggcttctcgtgacgaggccacgtcgctggtggcggctcaacatcgaatccactgccgccctttctcccgattccctgtcgtctgattaacgtcgggctctggcgatctcactccccttgtttctgtgtggcatagtcaccttggtgggacattcaaggcttgactggtgtgagtagttgttacgatttatcactcaccagtatgagcagtactgtggagttgtttcgtcgcacgctagcattcgcggtcgacgtggtgtttgtgccttgtggcaacgcttcgtctgagtagacgctcgatgtttttacgagagggtgccaagagccagtgtgcgtaaagttgtccaatgcagtttaatgcgtggcttcccgctgttgcaggaatgaatccaggcgtgaactccaactaatagtgtgcgtttcagcgtgactgaagtgtgctagattgtctattcagaaggcatgctccctcggtctgcagactcatctcaactcgcgtcacccgccccccttcccttcaacacgagacggggccttcaaattgagtgggtaagcaaatcttcgcatatcactgtaaaatccttccaagcgtccttgctagttcgttgccttcgcagcaa

SEQ ID NO: 3035 - DNA, 4586 bp, Toxoplasma gondii
  source 1..4586: mol_type = genomic DNA
gccgcacattcccacactgttgcctgaagacttgtcgaacagtaacgcgggagttttatccagcggagttttgcaaggattcgccccaatgacggagtgggtttctgtacgatctaacagtgaaggaagcgcaccaacctcgtctctaaagaggtgcagaagactacctgctctagggcgcgcgcggcaccgaacgcatcttgttgcttatcgcgaatgtcagcgaccttttgccagcagtgtagcgcctgaggaaaagcttgctcgctaccatcttcttggaaacactcggcagcggccttgtactcgagtgccgcgatatcgtagtctggagagaatttgaacaaaaatacggaggtcttgagtgccttttcggcccgttgacgatgctcgacgccgtcttcgaatttgcgcgaaccaggcaagccgtggtcgctgaaacctccccggccgaacaaccccgacatctcgagaacaagaccctacgaaagtctgtggtattgaacgctcttggcgcaaagagcgcttcgacgacggagctccccactgcactccacacgtcactaccctgctcggcactcccgcagattcttcactgcagctatcgcctcggctcgtttaatgtgcgactcaagtgaacaattcagaaaaacgatttcgacgctgccggaggaactccgaaacgagttgctagccgaagagcgagcgccgtcaacacattaaaagtagaggccagcaaggggtggacagaacggacatctgtgcactcgtccagcatacatgaaagcagactaggcaagagaacacccctgtcgctgctatagaagctggtgaggataatcgggggaagaaaacaagccacaaagagctgttgtagtgaggtgcagttaccgctcccgcaaacttcgcacaacaaccatagacgcacatgggctctgcatcatccgtagattcacaaatggaaattttgtttcagtggccaggcgaacgggagattaacggcctggaaatcggaatcgtgtgtaatcacgcatgctaggcacaaatcgcagcgccgggtgccgggctctgagtgacacggaaaagtacgaagtcagccgtcgaaacagactcactaatcaccagtgtggattgaagccgctggagagagcggcacatttctgtggtcaatattacgtgcattctgatgcatcttttaatgccatcgaccggggtcccgctgtcttgttcacaaaaatgcatgccgcgggagacacggtcgttgcctgagagctggttgatccacccttagtcgcagttcactcaaactcggttgggcacaagttttcagctgcgatacaacacagaaaccgcaggaactccagttcgagttgaaaaacatgcactgaaaagaagcgcatcctatagccgcgccaactattgttttaaaatcggaatctgcacacccacctgttgccttcgcaggtgacactgccactaagaggtttgtctgagtccagctttcaccatcagacatctggcatgtttccttaataattctttcttaactgcgccctgcgtatccccaatcctcatgcaaacgacggtgaaagtgccggtgactctagatgtgtaagaggacgcagccgtttagagaaaatatgttgtccgacgtgccacaccgctttctgggcaccagtacccagactacctgtgttccattgaatcggaatccaccagatttttccagagtttctccagggaaaacgccatgatctttattttcgagtggagcacataacccttttgtgtacacggtgtcctcaaacctttggctgctgccagaatccctgtttaaacagtacaatggtgaaaattggctctcgaggagggttaggctctcgctgccgcaccgtttggcaagccatttcttccacttctttaagacgtgcgcccgtgaaggacgcaaaaagaatttcttcacggtggaatagttgtggagtttcgtcagggcgacatctatttgagagggaatttttgccgctggagcgcagtcccagcggagtggtggcacaccagcaacgcagacccggtcaggccttcccgccgatgagaggctgcagaggcacttggagcttttggtagtatctggaatttcgtgttttctttgttgtgtgaagcttcccgtgttccgttttttgtgttaacagcctttctgttgtgtatacttcgggcacagtttcagcgctcgatcgtggcatcagtctcggcgctctcgcagctcacgcctgggcgccgtgccctttcctatattcgactgttgttttatggtggaaagatatccctccgtttttgtcgggaacttttgcccagcagatgtcttcatttctccgtggcgcgcctaattttgaaaagagaatggctgacaaacgatccttcaggaattcaaagctcgaaactgcgtagtcctcaacgcgaatgcctctcgcaggagctgcccacccacctgctccgacaggtttctgtgctgcgccacttcaagatgatagacacttggcatccgtcattaacatagggggctgaaaggcagttttaagtgcagtatctatgcttgcggtcgtattcactttctcaaaaggtgcctggccagcaggagccagatccgtgcacatacgataccgactgctggagagcggtccgggttcgccctgttgtcatttttccggaacgacggcgagctacaactctctagcagccccacacggttgagccttctcgctgggctggggatccagcggacttcagcggtcaggcgctccgaacggctgtcgccttatttgcggctatgaatcgatacgttggttcgatttgcctggttctttaggcccgtcagttccgccgagcaattcgttgcgaagaggctcttcggcgccagaggagagaacgtctacgttttaattgtggaaatctgtctcattttcgcactgcgaagacccggggactgtcaaaaggtatatggaaccgtcgttcctgggattttttcgtttcctctcgctgagaggagcggcctcgtcgtttaagcttacctccgaaaaaaaacgacgtaccgctggatcgggggccgtgactccaacagcatgactcaaactacatgtatggtgattccatttgagttgtcaatttccctgcactgtcaagtgagcaagaaggccaacaacgtgctcgggaaaaccgagcaggtatccaccgcagactcgggcagagacgccccactctagggggtcgcgtggaaactgaatcgcctgagcttgcccggttttaatttttttacccctaaatgccgtgcagtcagatagacaggcttttggttcactctcctgcgccagagttggcctcgcccctcgggacccgccgggcgccgtgtccctcccggaggtccggatcggccgttcgtcggccattcgttttgtttcaaagtttgtcaagtctacccttcccgcgacttcattcgtctttgaatttttttccgtcaagccgtgggcgtgaagtcctccaagccacggtttttcctttcccctcggttcgtgcacgcaggaggccgttcaaagacgagtggcaccctgcggatactgggtcctattcttccttgtgaaacactgcgttttaagtgaagaagagcgcgttctgtaggaatgcgtgtggtttcgtatcgggtcatctttttatgtcgacatgcatgtaaaatcacccctgccaccagtgagtccgcttgtgggtgtgtgtgcagaaacgagaacccatttgagctgtcatgtatgctgatcggttcttgcttgttgtcaagatatcgctgtcgcggctaggcggaacccttcctcaagaggtcccgcagcagagttcttttttgcggactgaacggatgtgtggtgctgtgagtatcgattgaagctcgtctctttcccgtaagcggtccgattgttccccgtttttttcagatcgacgccttgacaccttttaggccgttgggagtcgcactgttgtgtggcgttcgacgcgccgtcacttgtgacggacctctggacaacatttccatgtatatattaggtataggtaaaacagacttcctcggctttcccgctacaactttgtttccagtattcttttcaccgtttctcctcgaaaccgagttttctcttcaggttctaggttgcgcgccactttgcaatctgttgtgtccacccaagaaatcgtccgttctcgtccccgttactgctcccggctcgccctgcgtgtggcgtgcgatcgtgtgccctttctggcctcacgtgttgcccgtatatacggcggataaaaagaggcgtgactagcagcgaaaacgtcaattgtcctgcctgcgcggctcctctcggtggaggcaggcccgtctttctcatgtttcggaccctgtcggcaccttccggtccctgcacactgtgagtcgttcgccggcgccgagaaggcttggcgcacatgagcctcaagaagagagaggaaggtgaacttggttcggcatgcgccttggatcctagactgcgtcgcttcggttgcttgccttgtcccgctcaaca

SEQ ID NO: 3036 - DNA, 2417 bp, Toxoplasma gondii
  source 1..2417: mol_type = genomic DNA
gaaggacatgaatgaatgagggattgcctgatgacttatatcaactggccacacgtgggaacgggacgtctgcacaattagctgttaacctgcaatagcggggccatccgttgccttcctcgggagattggcctggttcatcccatattcggagcaccgcccgcggttgcttactgacaaacgtgaatcagaatacgatatctctgcctaaagggagagcgactttgggccaccttccccttgtcgttattaaaagcagctgtgttgtggcgtctgaaagtatcgtgccgcgtcgcttgggctcctttggggaaacgaaagccgttgctagcataaacgaagactctgagaagaggttcagcggtgcagatcttgtgccctttttcacgacaaacagggatttcttcggtttggatgctgggtacagcagagggagtttttcgtgtgtatggcatgagttagatggcaaaagggcagcgaagactgatgccaggccagttccagcggcgaaatagaagaaaatcccctcaagctctacgttttgcctcgatattcgatttgtggacaacttaacgccagcctagaactgcctcctgataatgttttttcccgacttgggtgtcgtacgagtacagcaattggtaagtgaagaagcgctccagtgaggagagaagcgaaaacctaccaccacagctggaaacgctccatgatagcgagtgtttcctgtcgaaagctaactcaaaacttccccctgtcctgaaactctgttcgataccttagtatgcatatacttaaccggcacctccagattcagctcttccgcgcttggggcaggaacgggcacccaccacacgttctagcgcaacgtcccccggtattccagtaagtgttccagctacggtttcttgtggcataggaaaagcagacagacacaccctgaaaaatacatatgtgggctgaatagcgcccctcccactgtatcgttcacacacacttacagggcacggcacgccctttaaagcatagacggcagtttttcgcggtgcaacaaaaagcacaatcaacacgggagactttcgggttgctacaaacagattcatagctgtgaagcgactcacgaaaacgggtttatgctaagcaccgagggaaaaagggcggcggtcgtcactttgaatcagcagcaacgcacagggaaagtatcttccagacacacacatttcaagacagcaagatgagaccctcctgaccacgaattgttacgaagaacggtgttccgatctaaacaaacctttaagtggatagtcaaaacgtggttcagcctgctgcagtgaatttcagagcccctttcatatgcaacacgaaccccctgtttctgttgcacgatatctgcggtcacccgtaacgaggcgcattcggaaatagctgcgggaaactattttcgaacaacaaatgaaacagaactgcactcatttgggcaacaaggagcttaagaaaaggtacgattcagtggactgatcgggaattgaacccgagacctttcgcatgcgaagcgaacgtgatacccctacaccatcagcccttgaacctcgtttcggtcggcatcgcgtcacaaactagttccaaaagaaacagcacccgccacggactctttagtgtgtatccatattacgaaacttcccttccgtggcgattctgtcgcgaagcagccatgtctacatgtgtttccaatggggatgctccaccgcactttgtgtcccgaactgttggccaatcaagagagtcgttgacaacgtcaaaattctttcgaggagcatgaaatacagtcctgggttctgtactgcatctttgtttttagagtgattcttgactgggaacgccactacgattacacggttgtgtgtgaaagacaaaacgtggggttccgttggtacccgcggcgtgtcacatgatcagacggtcgcagaggaagctttctggttgctacgcacccgcccactagtttttactgagttcctctcctcaggtgatcagtgaatacacagagtaaaacaccaactcgcagcgtttccttcttctgagagttgcattctccgctgtgtcgcggctaccgagtctgtccgcctgtgttttcgctccgacatcattcccgtctccttttgctgcagccctcagaagttgactgctattccacatccggcttcttccttcacgaaactgtgacaaaaacgcgcgcccagtttggtgtgtgtgtgtgactcaagcacttccgattcctgtttcgccgtctcttttgtttgctctcgagttcttttcttcgtcgtctgaccccaatcccagcaatggagacgtcgcgaatcgacccccggtgagagggcggctttcagtgcgccgtgtacagacgtccgatatattttgca

SEQ ID NO: 3037 - DNA, 2170 bp, Toxoplasma gondii
  source 1..2170: mol_type = genomic DNA
acaaagttctctgtctcgcatggcgcgcgtctttctgtctatctacacaaaggctgcttctcaacgcctctacactctgcttgctgaaacatcgatcgcgcgcgcctcggcaggaggttccatctgctttgtggccgagaacgcaggaagcatctggagatgttgaacgcggaaaacgcagcgcgtgagaaggcgaagaagcgtactcttgaaggaacgaaagagtgaaaacgagattgagaacgcttacaaaaggtcccaagaaaaagaagaaaacagaggcttttccttgctcacttgaacgtgtggtttcacaattcgcagacgtcgtcctgctccagcagatcttctgcagaaaagcgaggagagaagccgccctgctctcccgcgagacgacctcccgtctcccgcagcttcgtccgtcggagcgtctcccctcaaccacaccaccgaaggccaggcaacgcaccgcctctgtgcgggtgacgaaagacgcaaagaaaaagaaggagaaggagcagaaccgacagacggagaagccggtgacgccgcgcggcgttcgctaccaagtttcagtttccatattggatatgcgttatacacgtccatgaggccgacgagagggtgtttcgctcctgcgcagtcttcctccgaactttccttctctcctcggagctcgctgcgctctccaggcgcttctgtccactccaatacggagacgaccgtttctccgtcctcgtcggaagcgctgagtcgcgaggtacgccgagctgagagaaacgctagggaaggccgcgaagcgcgaaaaactggggaagagacaggagaaggagaagcagcacaaagggaagaagagagagaagaggaaggcgccgcaggaggagagggagacagggaggacggttgaggcgaaggaggtccgctgtgaggccgtccaggagactgtgagaggtcagcgagagagaagcgatggctggacgaccgctggaggactttcgtttctgcaaagagaagtggaaagagagagaggaagacgatggaggcccacagtgtggctgcactgttttcgcaggtttttcttctcttcattttgagggcgagctgcggtgattttccgcgagatttttcgatagttttgcatgttctggtgcttttctgcggaaatgcgttcttggagaaaggtcgcagagacacagacaagaggaaaaagagagctcgaaccgtggagttttttcgctttgcgtccaagaaaaacgcagacgaggggaggcttccaagaaaagggattcagaaaaggaacaagtccgaccgtcatacacaccagagcgcgagacacacgcatcaattctggtaggagttgtctccgttctcccgattcttgttgcgcgcgcgcgtctctgcctcgcagcgtgtaactttctccaaagaaaaaaagcgttcgagaggcttgcatcgaggcgaggccggaggtcaccattttctctttttcgcttcctccctctctgaagggaacatgcgagagagtcttctccctcgcgtttttcgacgcaagaccggagacacaacagaggaaaaaggaaggcgccaggcgcctctctcggttgcctcttcgctctgctgtgcttcttccagagaccgcctctctttcttctcgcctcacacggaagttctcgacaaacgtcgaaggagaggcgcttcacagacgcatgcactcacaaggcggagcaggcgtttctcttcttctgtcttccgcgaaaggcaagcttcctctctcgcctgccctgacaacagccccgcgaaaaacggactcacgcggcctcgttctacgacaggaagagttttcgcgtcgattctgctctgcaagtctttcaaatgaccaccgccgacgctcctgctgagagcgaaacgaaacgactgctcagatgctgctgcgacagcgacgttcgagaacaaaaagagaggaaaagaagaggaaggagtcgtcactccatcacatgctgttttctcccaaaaaagacaaatccaataggtttcgaacaagcatcaaccctttgagcgtacagacgcgaaacaagagagaagagaggaggcggaaggcgctaacgggcaaagcagcggagatgcgaaaaagccttctgtcactttctgctcgaacgcagtctctccaaaa

SEQ ID NO: 3038 - DNA, 1794 bp, Toxoplasma gondii
  source 1..1794: mol_type = genomic DNA
atattctgaatgtagggcgcgtcacaccgcccgcggtgtgcagagcagcgcatgcatgtctcgaaaagacctttccaggatgtagacagcctcagcctcggcgggattcgtagagaaggagaagcgtctgttggagaaaaggattttctcgctggagaccatcgtggcgaggctgtcaagcgaaagttttattcttcatatttttgtttctccttgccagcttcggcgaccctgtgcctctcttccacttcaagagaggacaggaatccagcctacagcagttcagtgatctttccggattcggctgcgtagcagtgttgcatcaacattattgagagctgatggaggcgacaacgcagagacagagccttgctgcatgcagtctacgccgtccccaagtcaacgaagaacatctacacatctcagcgccttttgttgcgagcaggagcgtgagatctcgtctagtgatgccgtattgtgtacaaacagatccactgcacggaagataaatgcgacctttgtccaggcctgcaggtacacagacaccgcggaggccagacgacttgcccatctgactctctgcagatgcaattttgaatcctcgaaaagggagaagagtcgaggcgttggctcagctggccccaagagaaaaattgccatctctcagttgttctgtttcttgtcgggaggagacgtcgcacacccgttcggcaggcttgttcaaacaaagcgagacaggcgggaggcgcgtatacgcaggaaggaggatggccgaggcgctctgctctccttcttgcattttctcttagcgtcatacttttattatgctccttaaacgcttgtcttggcctctgcgcttcgtgtatacggcttacaatctaaaaaactgagctctgctctccttcttgcattttctcctagcgtcatacttttattatgctccttaaacgcttgtcttggcctctgcgcttcgtgtatacggcttacaatctaaaaaagtgagtctctgccgcagagtcggcgctgtccaatacaccccccgcgactctcgcgccggctgctgcgcatgcacactgtcgctttcctgcaaacgaacggcggtgaacatttccgaggcaggcagacttttgactgaggaaaaaggacggtgcttttcaaggaaagggagacgagaacagtgaagagaagtcaaaaggaattcccgtccaaaacagcagagtcctcccccagcgccatcttcactcgagtgtcttgccgaagcaggtcaccgcgtttgggtccttcgtgtcttctttctctttctctcttcatctgtttctctttcttgtggacttttctagtctccctccccaatgcttcactctatctcgtccaaagagcctccgctgatgtcgtttccccactgctttgctgcggcggcatgcgtcttgaggcttgacatgcggacgaccgtcgagccagtctgcacacgcgtttttcgactgcctcgctgctggaggggtactttgttttttcttcctttcctcaaactttctcttccccgtcggcgagagagaaggcctcgaaaagagagagttttatcgcttctctttttttgtctcggccggattcttcgcacgcgacctccaagcctgtgacccccgtcttttctcttctgtcctcgttgttttcctcgctcatgagacgtcttcctccaacagctccttcttctgtccccggtcgcgctctggtctttcagtcctccttttggctcctttcttcctcttctctcagtgtgtgtctctttcctaaaaa

SEQ ID NO: 3039 - DNA, 2265 bp, Toxoplasma gondii
  source 1..2265: mol_type = genomic DNA
aggcaagcaaagaccagcagcgttttccagaatctccttgcgacgtcgatcgctgcatgcagaagaaaggcagaagcggcgtcgccgcggttctcccaggcgtccgatagcacgcgactcaaaactccgagcgcgaggggcaccgcgcggccttccagctggacgagacgagcaatgaactgcatgcaaaagtgacggaagaccggaagcgcgtggcttccgagggcgaggaaccgcgggactgcacggtggatgtacactcggagccggtcgcgctctatcgcgtcctcgccgcctcgcgagcctgcgttgggatctccaccgttctgagggatcctgcagttcccactgggtcgctcgcctcgagaaaaagcaggagcgaagtcacttctgacgaacaagaggccgtgttcctccctcacgagagtcaggagttcgcgggcggctttctgcagtcggaccagacagttttggacgtctggagaatcggctgctgtgagagcggcgacctgagcgaagacgcattccagtgacgctggggacgctccgccctggactccaggcgcgctgccgactctcggagcacttgggggagctgcgctcgccaacgctggactgggagctcgcggcgagtttcgacatcgtagtggcgaattggaacaagaaagagaggggagggtgggtgcgaagggggggtcctcggagctggcgttgcgagggcgcttctgaggaagactggactcaggctcctctcgacgccgttgagagggcaaaggcgagtgcatggcgcgagttggatctagggagttcttcttcgagcaagggaacggtcgagacacagagacgcagaagccggccgagacggaccgagaaaagaaggaggacggccacagagcaactgcccagacgcgacgcgttgaagtagaagaggaatgcgcgagggagaaagttttccaaaagagctgcccagacagaaaatgttaaacgcgtcgtaaaaggaagaaaggaacgtctgcaggttgtgcaggacgcgggagatgggcgggcaagcagcggcaagcggctgtggaggttgcagtgcttcacggctctctggaggtgcctgcgtcgcgagagaactgcggtggagaaggagagggacatcgttggaggaaagttcccttctagaacggcgagttcgagcatgcagcagtagaggggaaaagacaggcaattctcgtcgcgcgggaacaagagaccaagaaaagaaccctcgaagcactggaaccggtttcgaggcttctccaccgggggacagacagaccgccgaagttacgggatggttttgccgggctccctgaagaaattcatatcgttttcttcaacaggggaaagagaagcgtgtgtggagaagaagggaacgcaagcacgcggagcatgcagtcgtcacgaaatttatgacctgtgcagcgacacactgttttaacggggccgaacgtccgtgaagggaaggatgaagtctctccaagtcgtgaggcagaaatcagcgaagagtacagagtccgcaaggaaggaagaaaaaagccaagacagaacacaggcctgccctgcaggtcaatcatcgaaatgcataaactatgaaaaaagttgcgctgccacatgcgggaaaaaaagaactctctgccgccggtgcatgtgtgctgtttcctcctgctcctagatgctgcggccgcagtgcgcctggaaagtgcattcttcggaagtggaattcgttgcttctttgacgaagcgtttgtgtgatttctttaactcgtcaggaactaaaagcgcacggcgggtgaaaaagcttactggcatctgatgtgcctttcgacgaagcagtcagtgaccctgaatgccggccggcttctgtgtggtcgcatgtttgtgttgagcagaacgctcgcttctctcgctcgtgaaaagctgttaaacgcatcgttctgtatctgatcctgcttgaaagactgccgctgacctcgtcgtttactcgcacggtgcctcacccgaaaaaaactgtttttagtgagttgcgtggtgaagactacacacgaaaacgcgcgcgaggtctgtcagaaagcgtttgtgaagtcttgagaggcacagggtgcaacctaactgtctctgtcctcagcacgaacgctctgccactggcgactttatgagtcgatctaggttgcacgcattacaccactcctgcctgaacaaagcctgacaaaaatcccgaaaagagacccgaaacagaga

SEQ ID NO: 3040 - DNA, 4027 bp, Toxoplasma gondii
  source 1..4027: mol_type = genomic DNA
tctcgcgacttgcaggcgaagccgctcctcagaagaaacttttgcctgggtgaggtcgtcgtcgccttcttcgtttgtgcgccctgctctctgcgactctgctctcggttccacggaagactggagagactcggcaacttcgtcgacaggagtgacgctcagcaagagagggatgaggagagaagccgagtagacgtgaggggcggcgtttaacgcaaagcccgacagccagctgcagacggaagcgccgtcgtacgagctcaggatttcggatgtcatgacacctgcgggttgctgcggcgcgccttgcgacgaatggcgcggaggactcgcttcccgagagtcaggagggacgggtttcagcttcgcgaacagcaggggaggagcagaggcaaatacgtcgacgcggaggagaaacgaaacaggcacagacgaagaggcgtggttcgaagagtctccttgccaaaaagcgtctccaaatgccgctggctcttgcgcagctcgaagcgccttcgcagccgccagcgcccccaacccgctcaggtatacagacacctcgagggtctgcgccggcgcagagtcgctggttcccggcgtcagagttccttctagaacgacagagtctctgctttttttgaacgcattcgccacttcttccagagagagatacgcttgtgtggaagtcacgactcctgcgggcagcggcgcgggcgcagccgaggcagacacagataaggacaaaatgccggaagcgactcctcgaggccaaccccagcaatcgacagacgccggaggaccagtagcactgcacacagacaacaggagaagagaccacaccagcggaccgcaccgccacaggcgagaagcctcaagggaacccatcgtagaaaaaatgaaaaccctagcgaattcgatagaatgaaaaatgtgggtcaaaagaaagtgctatgcaagagaagtggtttacgtgagcagcagattagaaaaaggttcgagaataaatccttaaggggaaagtttgccggagaactactctggaaaggttgacgcgaacgaggtggcggtgacggcgtatagagtcacacaagttcaggcgtctgtggtgtcaagtccgagaatcccggaaaaagggggctaacacgagaaggccggcgtcaggcggaagcacgcggaaatctctgagttcgtaagaaaagactcttttaagatgtaaacgtcattccacgagtgtctagagagcaggaagaagcaccggagactgatgccgactagcaaggaacgacgacacgcactggctgtttctatcagaccaccactcagattatacaggtagaaaaatcaaggaaatgaggaaaagacgaagtggaacagcacttgccactaagcaatacaccgtagacaaggggaagaacgcggaacgcacgccgagaacagacagctcgccagcacacacgaggtgggccggaaagtgtgaaatgcactgcttctcacaagctgaatgtgaaaaacgtagtcctgggaggaacgcggagaaagttgccaagggaaaagaacaaaaacgacggtacaaagaaagattaacggtggaacgctttaaacgcccgctgtcactcatgaaactccagccagccagtttgccaaggagcaacctcgaagcatcgcggaaaccggaaagccttgcgaaagtgaaatcttcggagtccgtttcatagttgcgactaagaagccgaatcaggaaaaaaagagcaaaagagaacagagatacaactctttggcatgatgaaagactgcgcagtgtcttgttgaggtttacccggcacactttcggcaaaaagcgccgtgtcgatggcgcttgcacactcaaattcgtgacattctcggcgctggttgcagccgcgccggaagacacaacacaaagattgtctgaggaaaaaactaagcgaatctgcggcaggattcggctttgaaaacgaagaagatccgggagaaaatcgtacacgtgctaacagggtcccggcgggttgcgtacaccaggtgcgcgactctagcgtagacatgcagcaggctgctcgacactggaggtaatttggaatctgttttgtcgctagtttttcaacaatccaataaaacgactcgcgagtgtcagaaaggagcgaaactccacacctgcggtgggctttcttcgagcacagtctcgagcttcgagtgtgccacgccccgagcggggaatgcctgtggttcttatcgttcttggggggccagcaaagtcacaggaaaggctcgctgaccgttgacagttttctgttcctctgtcatgtcacctcctcacagatgccaactgcgcgcggtcgtcagaaagatatccggcccttcaaatcctgaaactgaagagccgccgtgtacccagcaaccaaaacgaattcggcgaacagacaaccaagaaaccccccggattcagtgcagctcgacttctgctggctggccaaagggtggaagaccttatgcggccggtggtacctataattgaaatcctttccgatcggatcccatctaatagttgcggtttacattggaacagggtgtcttttctcgatgaaaacgcgggaaatggaacatcgcgataatctaggttccagaatggaagtggtggtgtacaattgcagaagctttctgtattagaaatgatcgaggtgaatgattgcactcaggagcgactgcgtcgacgcctcgagctaggcccggctcacatcagggtgactagtcgattggaagttacgactagatgaatcgaccacggtatatcacaggagactctccgttgtgctagcaagtacaggcagatgcagctgaagagtttgcgtttcagatatcgtgattacgttgtcaaatcccttcctaaaacatcaaatttcgacatttgcgagagttcgcaattcctgatgaacgagtctacaagcaacactcaatggcaactgcaagtcgacccttcagccacaatctgctgatgcagaccggaaagggagccgggggtggtattcgatgtccttctacgagaaacagacccgcttgtccggtttctgtcaaaacacagctcaaaaacccacccagtctgacccttctggcgcgcgactttttcttttagactgctgcaacgatccgaagccgaacctgctcatatcctgcgaagatagtggaaagtatacgagcatctctgctggttctttggacgtccaggtgaacatgacactcggatacgttttaattttaacttactaaagcccacgggagcgaagcaaacagctgcttgtaagcaaatttcctggttagatgcgtaacaactccacatcctttagaaatttcgtcgcggtgccgagttccttgtgtacagccgaaagaaatgtgcttcacattactcgtgaatgagtgcgcgagagcgatgagtctacggatttgtctggcccacaccttctcgacatgagtgcgagaggggccgggcgacccgtccgattccatgaagcatgcttggcgtcttttctgatacagcaggcatcccggtgacccagaccgaatgtgtgccgactcaccgggatttctgcggtgttttactgagtgtgagtcaaaaaagcgtttggtttttcctttcacagcatacgtgatcattgtatccggcgatatgaagttttgaaacccatagatgcgcacgttcgttccgttcgtgtccctgcatctgcttaaagtacgtgcggacgataattatatcaatgaattaccaatttaagctgaagatgcacttcgcgtggctaactcgttagctcgtcgacagggtgtgtagctcaatggtagagcggccgactgcagatcggcaggttcatggttcaattccgtgcgcgcccttctcagacgtttgagaatgggggttctgcgggttaatttgttgtccggtttgccagttacaggatgagcggatgccatacctctgtctcgatcttctggaaagaagcaagctaactcgttagctggtcgacag

SEQ ID NO: 3041 - DNA, 1886 bp, Toxoplasma gondii
  source 1..1886: mol_type = genomic DNA
aaaaacggaaagaaatgaacacttgcagagcatcaccgcaccatgtgggctaaatggaagtatacagcccgacacggcgaaagtccagcagggcatttacccaggtaaaaataacacattcatctgctgttacgccagtaaaaaaaagcgcctgttcaggagaaatcgtacctgcgacacgtatctcgggaacggaatgagagaagaaatgtgcgtgcaacttagttgcctcgcaatgcaggacacgcaaaccaacaacaggcaagaaaaatggacgcctacgagaggaatgcgtcgccaacagatgtaaacaatactacaaacggcctagaaatctgtgacccttccgttgtgcgaccagtcaccatgggccgttggttcggggccttcgtatttgaagccatactcgggttccttcaacacgccaccggattcttttgattgtggtccaaccgttttgctctcttgcttgagatgagcttcgtggcgagcagtgccttcagccttttcatttgcatgtgcagaacactcacccgacgccgcacctgaccttggtgcagaaccgttccggttaacgcggaaaatttttttcacaaaaggcgactctggagcgccttcattcagctgcgtagatgataggtcgatgcctccacttctcaaattgttatcgttagacgcttcaggggatggcgggagttccttgtctctagccatactgtcatggtggacgctgccactcgatgtaggttgaaccagggtagaagcaaagtttttctgtagtccttcgaaataagggaaagcagcttcctgtgggtgaaacaggcgctcacctgaaaagaagagtaacaccagaggatacccagtgggtttggaagaagagccgctgagtgctaagcggtgggcgcggccggtcgcagatccagtattttagtgaaagcaccggcatttttgcgatttttgcaccttgagcgacaaaaatcaaagacgtactggctttgcagaagcaacttgtccttgataaacgctgcaactcgtgggcgacgcgcgtggatcgcaggactgcttggaaagctgctgcaccgggggtttcccgcccgtgcgaagcgagtttcagaagaaactttccgcttttcagcgatgtcatttccggtgaaaaacgaacaagaagacttcggaccttctgttgaccacgtatcctgtctctcaaaagtgacctggaaacgttgctttcaagtgccagcgatcgtttcgcatgccgcgacgttcagcggtaggtccagaagcacaaggcaacagcgagttgtacaagtttctgaggtaaagcggcacgacccttacacacagacgcgccataagaaagccaaagatgatcagccactgctgctgtgccgacacggcgtttttttcgggtttttgcttgagtgtcccgacgggatgcatgcgtcgatgagaacagggccgcagcgcatgcacgactaggcgtgatacactatgttcttctggtatccgcctcgtttccgttgtatctgggaacagtcttgccgcatttccttgcctgtctccttgagcgctgtcggatttcttcaggcaaatggtggttgcatattttgtgctggcaccgcctttttctacgtcacgagcgagagccgctcttcagtttgactagccggttgcctcgcaaccccctccctctgttccgctaccgggggaattgtgaagagaaaaggcgtttttcctggcttaaaagcagagattcgttcttccagctgctcgtgggacctcggggcttgcctcagcacccccggcgtcgcctctctgccgctttccgcccccagaatgattttcgggcatcctgtgcctgtcgtctgcgcaagtgttaagcgcca

SEQ ID NO: 3042 - DNA, 2625 bp, Toxoplasma gondii
  source 1..2625: mol_type = genomic DNA
agatcgctcactctttgttttgtctacagcagcgccggcaagcgaatgggtcgcatcctgccgaactctttcctcttttgacattctctccgcgctttggattccatttggagatccctcgatcccagaggctctcttccgacaccacgacgcctttcttctaacgcgcgcaatgggagagaagatgtcgtgaagagacaaaccgagacacgaatctgccagacaaagatgagagagactcgttttttctgtccttctgggcgccttccgaaacccccgttctctccctgactcacctggatcgccttcgcccgggagacaacaatgtcttctccatcgtgctcttcttctttgtctctgtcgacttctcgcagcgctttcagtgtctcagatgcgacgtctggtgccttcgtcgacgacggaggcagaggggtctgggaggcgcattccgccgaagtttcgagcgcgtaggaagcggctgcatgtgcgagacggcaagcctctgccaagaagcaacgcacatctttcgccgcttgcgtgcatgcggaagcttcgctggagtctgacggtccgaagccaccgtcccgctcggagtctgcggctccgcgtgagacagaaaaacgaagagaggagagaggtggagaaggtcctgcggaagcggcgggagaaacaggcaccgaggtgcgagcagatcgcctctcaggcgcgcgagggggaggaggcgagggagccagagtgtctgccatgtttccacaacgcgaaggtggaagacttcacgaaaactggaggaagtcctggtcaacggagccgagggcctcgccactctcaggaaaggccttctctggtaaacgctgcccgccgaaatgcagcaagagaaaccgacgcagaacgaagaaaggaacaagaagaagtcgagagagaagaacaaaagaaagaaggagtgaaagcagaagaagaaagagagtggaagggagcaagccgggagaaaggagacattgcgggcaaaggagatgcttctgaatatggcagaagacttgaggaacgcgaggcatggacgagagaagaaagaaagagcctctcctctccgttcgaatcctgacgcttcccccccgtcgcgcgtctgcttcttcgatttaaacgaattttcggaactttctagacatcctccacagcctctgaggcactgctctttttggtgaccgagaccgtcctggagcgagacgctcaccgccgtgagaacagtctttcagagactctttcacaggtggaaaaaaacttctcaactcttcgacaaatgctgctgctcaagggatacacacatagacacacagagaagcgcagctactctataaacatgcggaagaccgagttctttttctgccttttttcctgacagaagccggttccgcgtcctttgtcgcggcaggaggcagcgaagcgtcaaagaagacagaaaggaaaggacgcttttgaaggacgcgccgcaaaaggaaagaaaaaatggcgacttgcaggttcttggccgtccaggcagccgcgagaaaacgagacgcgtccccgacttcaaacgaggtctatacgggaagccatacacgccagaggatggtggaagaggatatctttcaaatcgaaacggacgaactcttctctcgtctcgctctcaagcgcttccccgacaagcaacgcagtcgcgctctttttctgcacgatgaaaaggttttctcctttccgcttgagagtagaaagtcctcccttttcgctgaagacagcaaaacaagaaagaggtgtctgtctctacacacacggggcttcttcccttttctttttccttttctttttcctttttctttcttctttctccttctctttttccttttccttttcgcctgtgtgtccacgcgagtctctggcgtgctcggcggctcgcgagaggcgctgaggagactctccacggaggagtgagagaagagcgcatgcagcttttcgcgcaaagaatcctgcgttcttccttgcaggaggaaatcttcggatttggctggagaagcgaacttctgcttcagtttctctcttttccttctccgccgaggccttccttctcaacggaggtcaaagaggtcgtctctctccttgcctgtctcctttcgaataccccacacgacggcagagcatcgagagggtcaagtttcgcagaaagcaggcagatttttttttaattttcaatcttgtcctcttttctgtcgaaaacaaactgcatggaggcgtacaacttcattctcgcggcactgttaggggaggtcctcgtttttctgatctgagatttgcctgtcgtcaccgtccttgttcaagaaaccgcattctcttctctctcacctgctctccacttctcttcctcgagtcgcgctactgtctcgcacctccaacgctgtccgtcttcagtgtctttcctgttggcttctcttttctctcttctcttctccttttctcctttccgtctcctcctccgcttcccgtctcgcgttctgccctgttttctcgattctctcttttttctttcctttctttcctttctttcctttctttcctttcttttcttcctttcttttcttcctttctcttcttccacga

SEQ ID NO: 3043 - DNA, 4963 bp, Toxoplasma gondii
  source 1..4963: mol_type = genomic DNA
ccccttgtaacgatgtcgcagggtgtcgcctaacggaggaaaaatcgagggagctgcgggcttgcgtgcttccgtgtccattcgttctcgactttgggggggcaatcggggagatttttccacagcaactgcatctcgttcattgaaactcgcacactcatctaggaaacaaatcacgtgttcgttagttttgtgtggaactcgaagagcgggtaagtgaaggggctggcgaagactaggtattcaggggggctggtgcctgtaattatatatgcttgacagtgttttagctggtaattacaagaactcgcttctgtgcggtacgtttgctgctctcacatgtatgtactgccaagttctgtgtatacgtacgtctagggaagaaagcgtgcacgtccttgaacacaagtgcctgtgtcagtctgttttcgttgaggtcgagcacactaaacatgtttcagacacacgtaaatatctcactaaaaggttgccggaaatgaagacgtggcgcatttcgtcgtcgttgacttgtctcttccccacacctcgaacagagcagacgatgttcgagcatgcacaaggatgaccacgctttgcacgactcggaaacgacacttccgcgtagtgttgcatccgacagcctatagaaggctgaatgctacagccgctcctgtcattgccatcagaagcgtagaaagagtagacggccgccggctcatggatcgcatttgccgccacaggcgtttggtttttggaaagtctgttggtggctatgtgccagagaagagccaacccatcaacactggcatttttacgctgttcggattgaacaatctattcagaatggccacgattggttcagattatctaagacataagattagtgttggtgcaaaacgttcgagcaaacctagtgactgccggttttaccagaaagaatgactagtggaagccaagtgagctatcggcaacaaggaaagaaagcaaccggcaacagaaaaagcagctcgctgaggcgcaccggggagagtaaagtttagacgcagtgcagtttaatctcatgctgttaggataatcaaattgatttcatctgttctttttctgtttgcttcaaaacaattcatcggaagtcaatggagtaatcgaggggaagtgacaacgatttacgtactgctcgtagaggcttgccgttttggcttggggaatgactgtactgcgtgcgaatttgtgtaaatacagacccgttgtggactatctgacatggctacagccagatgtatttcagtgcacagctaatctttatgcatgccgttatggccaatctcagatacaaatacaaacgacagtgttgcactgttttttgctgcactgtacctgcacactgaagagcagcagctgagaatttgtaattcccatgccttgcatgcagggtgatgtcgttggaatgtcagtctctcatatccatctactacccttcttagaagacggatcttgatgttcgacgccattgttgtacgaatgcaattaggtttgcccaaactgcaatctactgccccatgcctgtctagtattcagtcgactcgtggaaaagcatgagaaggaaccctcagaaccaatttgtgatcggtcggaaaagtgcttatatgctcgaaacgagttttgtctctttatgtctcgtctacatgaagctggaatgcacctgttatctttgataataaagaacgctgtgaaccaactgaacccctcgaagtcgtctagcctggtgaaggcatttctgcaagttgatggggccgtgggattaattgggcctcccccgtgaagttccaaacaaagcactaagcgcgacaagtacatttaccgcatccataataagttattcatacaagactgaggtgcagaacaagctgcttcactagatatgcgggtacttgatgggcggtcttcggcgctgcatctgttttcatccgacaaattccctgtgttttgttagatggacgacgccgctgggaccatccagagacaaacgatctatccaaaagtaccgaaactgaaaagccactacaaggcttgtggctatatcatggtgaggcggtacctctgggtatggctttctgttccggtttttagcaaccgccctgagtcgataacgaacctgtctcgcgaacgcaaaaatgctgttgtgacacggatgagatacagagctcaaatcctatcctcatataggtggaatcgcggcatgcgctatcacctgcaaaacagcgaatgcggcatttgacgttggctgtgatttatgttgtctcgtgccactcgagacggatggagtccatggacagctgccgtcctaaagggtcccgcccagaactgtataactcaaatcgaataaaccgctattttgtctcatccatagcatgtaacaattgtgtcgattcgtgtgtttcttgttcggtggtggcgcacgtaaaactacaaagcgtggggaagtcagagagtccgttggtgcaaggtcaagctgttcccatttcggcgtgctcttccaaacaggggccccacggaacgcaccatccggaactcgtggtgcccgagtcagctaggcataaagcgcagcatgcatccggttaagcacagcactaaagagagtcggtggtaagtgcgtttttgcggttattgaagccgctctcggttttcgtgcagctgcacgaccctttgttggggatctacgggacggttggcggggagacagcgtagagcacagagctcggctggtgaggatagcatgctcgacgtgcaaccggccgcgggcttgagcgcagtaagtggattcaagttcgtggccttgccggggggtaccgcttccaaaggggaagcgacaggtgctgctgagaaccaggcaccaaacaaacagaaaatttctttcttcgctcttgggtctgcttcttcacctctgtttatgtctcgtcaatccctgtgccgtcttgacttgtttttatatatacctttttaacaccgccccgccgttcactacttgcactttcgctcgagcgtcgcccagcaggccgcatccgaggcgcgctccctacgcagcaaacgcacttatagcagtcaaggggggcgctgcatactgatcgtcccaccaatcaaaacactttacttgcaaacgtagcaggcttaacaaacctgttgagccgcggaaaggattgcatcggtttatgcgtgttgttaagtggtgcctaatgctttgttttcgtgcttttcctgtcacagaggctgcggtccaagcgacttgcagtctggcaccgcgaccttctgtggggcgcggcgatcgtctgtagtgtacagacagttgatctgcgctgacgtgtccttagcgttccattctcatcgcatgtcacttccctcgtttccgttactttgtgatatgttctgtatcagcgaatcaggtgtttttttacgatccgtaaagtggatcggaccgttttcaccatcgcgtccacagcaaggggctcaccaaagttttggggacggacctgctcataattcactgttcagaaagacttactcttgaaaaccgaaagcgaccaaagaaagaagcgcggaagaagcggaacagaaaaacgagctcaagtctccttttatatgtgtgggctgccgtggtacgctcttccacttgcgttgcacagtccgtgcatttaagtgcaagtgtgggcatgacagcatcctgttgccaaagacgagcacaacgtatttgcgagtcgtgaacgagtctcaacgaccgtctagagtgtctcagtgttgagacagcgactcgttgccagctttttaaatttggatcacggttgttggaaaatcgggagcccgatcaaaaaaagatgccgtgtccgcctttgtttaacgaaattgaaacctgtacatttcttatgccactgtacaattgattttcttgtccgtatgtatttgcacgcgacagaaggagcaagtattattggtacgttgttcacgttctgtattctgcgctcacgggactagttggattgggtggattcgtctcatccgaccgtccccccaccctgctgccctagcttgtctcgaagtatttctttcgtgtcttctcacttcttttaccgggaatcatccttctgtctggtttcgccgcggcgcatctcgataccttccgccctctgtatcatcgacctttttcgtgctgaagactcagggagcctaacaggccgagcgccgtaaggaaatacatttgcatttaatcgtccgcgcgtgacactgctcctgtgccagaagactgaccagttcgctcgaatgtggactgaggagcacgtagcttggcgaaagtgacatcgtgtagcacccgaacagtctgaaaaccaggcgggcactcactgtgttgtgtccttcagttgtagttacactgtcttccattatctggtgcttggatcctctcataacactgaagaccgatttgccttttctctgtcgcaaccacaagtcgtgtaatccgtatcatcgtagccttggttaatcaggccacccattcaactcaagaaactcattctttcgcgatgttgctggacttctgttgatctacaagcgttgcggcggcttattcagtcatatatatgagtaggggtaattattttttgcaaccgtagttagcgtcgccactaagggaggggaaattcgaaccttgccgtagcttggattttgctgttgctgtgtcttttcgtctttgcagggtttcagctttttttcgaacgcggtgctctctgcccaaagcattttgctcacaaagttttcggctgtgcctggtcgcggtgatctaccgggacgccgtttttttctcccttctggagacccgttctcgccagcctccggctggttgcgaccgagtagcaggcggggagtcttttctaaggaaaaaagggaaagcattcttctgccgctgtccgtgtaccga

SEQ ID NO: 3044 - DNA, 2075 bp, Toxoplasma gondii
  source 1..2075: mol_type = genomic DNA
ttatgctacgcgtttcgcgtctctaccacgaatgttgacctttcgttctcgtgcacttgtgtcctcatttccagtgtctgttttgtatcgttctgtgatcgtccagcggggaagaggaagcgatgaacggtttttgctatcctaaggcaggatagccacatgtcaattatgtgggcaggctcttttgttccgtcccccattgtattttgtctccttctgtagttgcaccatgttttcggccgtggcggtgtccccagtttcttttgaaatggtgcaggcggttctctaggctaggtgtatctcgtgtgtcgggaaaaaacaaggaccgtgacggttccttcttgataacgtgcatccacacacacacatgcattcgtgttgtcgtggacatatctactgtcggtattctcaggcctggttttgccccgtacttcaacgattaaaataaaacatataccaaaacgcctttaccgcaggtgtatgtaccctaacatagtagggatagggcaattttggaggaaaagggccccgacggtacatactgtttgaggattaaagtggcagagttcccatatgatttactcacctgctgatacgcctcgcgttaacacgaatgcttttgttgctcattattcagcgaccacgtagtctgtttctctaagccaaaccgaccccacattcgaatcgcgttgtcgtttgcggtagcgaacctctctccaacactgtcccctacagcagaccactctgctgcgtggattctggcgttagtacgactccggcgattagtccaatgtggaaatccactcgtcatttttgatggcgccactcggggtcgtggcacactcacggttaattactagaggagtagcaagtcagctgaaggatagtaaccgccctgaaaaacggtatcatatccaccacagattacgacagttcctgaccacagaggtggcgataggcagtctccgacgatacagacagctgcagccagaagcaagacaacagggtgtctaacttagattattgcagccttttttgtacttgggatgacactgacatgccaagacaagaatggtggggttaaccaacaaattgcacgagtatttattaatcgtcgtgcagtgcttcgtgctaaagggacatcgtcacagaattaagtttgcctcaaacagtagctgccaggcaaacacagcagccgtttcttgggaagttttttgtgggtagcttactttagagttgcgattgttggtacgcatctgtcttgcggattgttgtggcgtgtatctcgacagcaagacaaccatgcgaacgagttcattgtacggggttccctactcggacaagtatcttttttccccatgttcgcacagaaaatctcggaaaacaaatatcagagcaggactgacatggaagacgaatccgatacctcaactgcaacacatgcagcggctctcttcatctgggacttgcagtagcgcttgttgtgtctcgctgtcgcttgcttggtatcatgtagcatgcaacactttttagatggaccggcagcgcatgcgacatcgacaacctccaacgaaggatctcctttaatgtccaccatacttagatgccaataaaaaccacaacatctgcaagtgtgctactccatggggtacatttctttatgcctcgccatatttagggtcttcgtcatgcctgtgccaggaagtatgtacaccagatgcgaaaaagttcaccgcaagtcagcactcccacttgttattcgtgtcttttgaaattcggtacaaagtgtccatggtttcccttcgttctgtctgtgtccagggttggccatctttcgtccccgtcgaactaacgaaagaccgggcagtatgcaaagctggggtacgcctcgtgaacccctatcggcgcaaggcagttccctggctttttgtgcgaaaacgggtcacaactgtgaaagccgtaggcggaagcctttttgtcttgaaaaaattagttccgaaccaggcgtctctcctcttgaagtagttgtccggcttcgacagcgggccactaactagaaactgttgtcgacgcga

SEQ ID NO: 3045 - DNA, 1984 bp, Toxoplasma gondii
  source 1..1984: mol_type = genomic DNA
gcacgagaagtcgcagttcgacgaaggaagaatcacaaaaatttgagaagaagaaatttgaccaggaactccacggcacatgtcttgctatcgttcagtgtctctctctctctcctttgcgtcgattcgtctactccggcgtcttcttccttcagtcgtcacaccgaaggaagaaagttcgtcctcaagagactgttcttcgctctcatcagcgtgtggttttcttctccagcctcttctttctgctgcgcatgtgcagtctctcaccctcaggacgacaggaaatggcggcgacctcctcgccaggcttggtcgagctacgcgcggcgcctctgccgttcgtcctcgcctccgacaacttgctccagagcctcattgcgctgtcgcaagacgaagagaaactgctgtttgcgccttttaccgcagcaaccaggcgtccgggcagcagcggttaaactggaggaacgccgaggttgatcaaaccatttcctgcgcacagagtctccgccttcttcctgcgctgaggtcgcctggactctcctcagcctgtctgttgactgctgcaggttcctcctaaattctctccctctcgtttctctcggaactttgcacgctcgcgtcgcgccgcagactaggggggagaagaacgtcgaaaaaagggagcaaagagcgcgcgagagcgagaaagagagaacaacagaagaggaaaggaggacgagccggtgtcaggcagaagaaggaagccaggacaagccgcagaaacggaaacaacgcagaaatccggtttttttattctttgccgctcgacagacacgactggacagagaacagcgcaaacgcaagcgggaaagcaaatggtgaagtgaagagagcggatcgcaaagcagttgtcaaacaaagaagaacgacaagcgatcaaaggcgtcgagactcatctggactggccagagagaaaaaacaggacggcccaggcgatgctgcccccaacactcgccgtgacctcgtccgtctgtctcgggtgactcacaaatttgtcttggccatcttcatctgttcctcgttcctcgttcttcctgtctctcccgcgagcagcgaacgcgttttttcgtcgactccgacatgcgcgaaccgcgcctgtttgcgcctctgtctctcgcttcgtcgagagttgcttcttcctgtgcatgcagcggccgccgcagccgctccgagcggtgtgtctccaggagaacaagaggaactccgtgaggagaactcgcgttttttcgagaactccccgaaaggtctgcgagcgcggtcgtcgcgacagccgagcgcgtcgagccagcggactcgcagccgttgccctgctgcatgcagtttgctcccgaaaaggggaatcacgaaaagaagagggtgaggggagacggtggttcgtggacggcgcgcgcggcgggcgtagtgcacgcgtgtataaagtgagagaggcagcagtgaaaaactgggaggggggaagacgggtgtatctgtccaagcagaaaacgacgcatcttctctctttcgccgaaacgcgtcttctccctcgtaccctctctctctctgtctctctctctctgtctctctttctgtctgtctgtctgtcgcgtgaggtgtcctcgtctgtctagccagtctctgggtcgaccgactccggcggagcgcgcgcgtgtgtgtgcacaagcagtgcaaatcgcctgaagcgtttcagctgttttctcgacctatcgtttcggctgctttcctccttcgacgctgccgaggcacacacggagttcggcgtctcgacgccctgcttcttctcggcaacttctcccctcttttttggatgcttctctcgctgcgcgctccagggactcaccgtcttcgcgcctcctcttccgattcctccatgtctcttcttctctcccgccgctcgaccctgcgctttctctccgagttctgctgctcctctacaccgcgagaaaga

SEQ ID NO: 3046 - DNA, 1751 bp, Toxoplasma gondii
  source 1..1751: mol_type = genomic DNA
gaatgatgagccgccgcaagaaacacattggaaccgatggcatttcccttcctctttctctgcgtgtctgtggctctgtgccttctcagctgacgctcgggcaagcaagcacgactggcgcattagtgtgatgaactgctggggtttcactcgtcgctccctgcttgtgctggaaacagaccgggcaaaaaggggggcattcgtacctctggaggatacacaccggtcgcggcaatgaattttccatctggcgagactcggatgcactgggaggagacattgaactcgaattcctgcagaagctcgacatcttgtgcatccggtccagcggcttcttttccgcccgcctctcttctgcggcgccgcttcctgcgaggaagaaagtctgcagcgcggctgcgacctcctgagaggttgtagattttgttgttgtcggcgttgctcgtcaccaaaaccattgtgaatcaagaagctgtggacgtgaaagaggcgttcttgcgctcgcctgtgcacgaagttattgcggtgcagggtccaacaagaaattgcagaacacactcttatcagtttgacgccgatgagtacccactctttggttggagggagctgtccctgagacaaaacgactggggtatagaaaacttcccttcactgagagactcagacgcacagcgcatccgaatttgttcgatggaggagaaatgggctcaacatgcaaagaagctggagactcgacgcagagcgacacgcagacgagctctcatttggtcgacgtcccctgccggcggactcgaaggcagtgtgggcagaaagtgtggcagagtgcatgcgtttctcgccgacgcgtcccggtcagaaagttcttacgattaaacaggacttagatagatgcaacagacacgatgctggagtgagacagatgccacgttctcactcggtatgtatagaatctagcgcgagttgcggcgcagcgaaaggcaaagaagtacccgttgagtgcgacgggtaatttgaatgccagggctggaaagcgagagtttcacacgaaatccgggccgacatcgacgttgaaaaagccctctggtagcctcgagaagcatacagagtgacaacttgagagatgtggtctgaggacaagtactttggtatctggatcggctgtactgaaacgatatggaatcgagtgtggttttaacgcattcgagagtgcatgcatgcgcgggcgggttgtcctgcccgaaaggcaacgagccaggacacggtgctcccgacacgcgaagttattacacaaaaggtgcagtgcaaagcaaatctcttcttccaactgagcacttgtgacaccctcatatgtcgaccatcttaccgaggcttaccagaggggagaaaggtctcccaagttttggttccaagtgcgcgattgtaaacttgcggaatgggtcgtttggctgccaagctcatgatcaacaccggagaaagtctgttcccgctttttcacggctagagacgcggcactctctgtcctccgtgtcttgggacgaaatatccaggtgtgcacatcgtgttggggcacaattctgcttgttgcagctgtctgaaccccgaccaggtgtcttgcggttcctgctcgctctgcggcgttgtttgagcacagttgaggaaaatacaccaaaacttcaccgttcggccggtggaacagcactcgtaccgttcggccggtggaacagcactcgtctttagcttcagcgacacaa

SEQ ID NO: 3047 - DNA, 5007 bp, Toxoplasma gondii
  source 1..5007: mol_type = genomic DNA
cgtctgaagattaccttgtccatacacttgactttcggcgggtcatgagggtagtttgcaggaatggcaatgaaaaagaggaacttgccgcctcgccagaatccatcgtcgggagatattttcaactgcatgttcagcaggctgttccccagcagctgaggagaagaagcctccgcggcaccgcgtttctccaaagacgagaaagtaagaacacactgatgaggaagatctaagtcctccagctctttctgcaggcgaatctctccgggaaaccgacgcctttcttgaggatctgcagacgctgaagaagcgccagagacacccgaactgctgccagtgtctcctgagagaggagcagctgaagaactcggggaggcagaagatgacgcctctgcgttgttctgcgacgtcgaggaagagacctgcttaggccgcccacggcctacgccgtacaacttcagcatttcgacaaagtgaaagagaacgaagagcgcgcttcctcacgacagagccgagagggagaacagacgcagcagaagagagattcgagaaaggatagagacggggaaggggatttcgcagagaacggcgcggctccagagaagagcagatctaaacgcaggcttgggggaaaaacgggactttacacgacaacagaaaccgagaatgagaacacgaggtaagaaacaagcgtgcgaggccacaacatgcgaacttaagaggagaaaaaacaacagcgagaagcgataaacgaaagagttgtggcgggaaaaaagagaagcgagatcgcgacagcgaagaagctgcgagcccggtcgctcaaaggaggccgcctctctcgtgctcagacaggacgctcgcaaagagaatttaacgcatatgaaaaacagacatagagagaattgaatcgaggagaaactagacggcgagaaacaaaagacagaaaacaggggaggctgactccgagaggaattctgctgagaggggaggctgactccgagaggaattctgctgagactccagagtccttcaaggaagcgacgaaagaggacgctctttcagagggtgtgtctgggaacggccctctgctgccttgcttcgtctgtgcataaactaaatgaggtcggaaaatcgaaagaggaaatggcggagacagacagacaaaaggaaacgagggcctcccttctcagttcgggcgctgagacctcgatgtgccgagtgagaagagaagcaaggaggagaaaagaagaagaggactaaggatggaagaaggaagactagggaaaactacgggcaggagggacggaaagacatgacaagcccagaatggtaagaaagcagcgggtaaatacgagaaaggacggcgatgatgaaagaagaagttgagacctgagtcggagtcaaaaaaaaaggaaaaacagtggcctgactaggtttgaattcgagagaaaaatgcagtgtacaagaagcgcgcgagttgcgtcaacgtggaaaagtttggtgtgtagaccgaggcgcaagagagaaaaaggggaactccacctgcgtgtgacgtggctgaaatagaggtaaaagtagaaaatcgagcgtcgtttgtttgccgggtcttttcaaaagtctcatttggcgtgatgaacagaagaaacagcgagagcagacatgcaagggtcaatgaaaacgatttcagaacagcatgtcacaccctgattaacgaatccaaaaagatagcagcgacgtttcctcgatgaaaaccattctcttttgtgtcacttgcttcttggagaagagtgtttctcttgtagcttagtccagcaaatgcagtgcgattttctccacgcgatttttgccactgagttctgccttctgaccgcacgggtagcaaataaggcacgaaataggcggtcgggccgcacgtgacaaagacgaaataccttttctatggaaagggcacttcgtgaaatgtagaaggatcgctttatacgttttattttagcggaaaaacagatacattcgtctacacactcccgaaatagctcctttctctgtgagggattctccgtccgggcttcttcgtgtgttaacagtccgcacccgtcttccgcttttcttctttttacgaattagctgtcgtactttttacagcgcccagcttgcacagcagcgccctcgtctggaacaagttgcacacgcttcttgttctcctcgggttcaacacgcagagggcgagaaaagctgaagagtttgcggcgagaacccccgcaagcttcttttctgaggaatcaaggagggaacagcagcgacatttttgtcgttctccgtcattatctgagatgatgaatacagtccagtagtttcccgtcgaagaaactcgacctcgagagagacacagaatgccgattcagctctaccgcgccgcgaacccgttcgtttttctcggttctacgggagcgaaaccttctaacgcaaggaaaggtggaaaagacctttcaaaaaacaaccctgtgcttctcacgattgcagcaagctgccaacacctgaacagtaggcttgttccgtaggcagggaacagaagcgaaaagagggaacagggcgcacgattcaacgatggcaatgtccaagaggatttcaagacatcgagtgccgcaactctcttagaaagtaacatccgtatcgcattcctatcttgtgatgtggtctccccttatagtgaggggacgcgaatcggcttctcaacaaaccagtgtggaatttccttcttcgtcgtgcaggggaagcgttgaagacacactgtgcgtaaatggaaagcttctgtttgagagaagatttcagccccttccgtatcggtgaggcatatacgtgaatgagttactggattggcgagaaaaaacaagaaccgaaggtgagaactgaagcgtgttttgtgcataacaatgccacttcttgtgtaaacagagtgcgcctcggcaaagtatgttggtttcttcttgattcttgaccctgcaacagagctgttggtgtaaaaggctttttcgcgtcagacgttggatactgcgtacccgtggacctctactcgccttctgtttgctacttggcaagtggtgtgttttagacgggttcacttgctttccgttgtttatctatttaacttttatactgacacccggaacggatgtgcacttggaaaactaaatgggcacaccgttgctccatctcctcaattatgcgatccagatatccctccgcagtccgtgctttcggatgctccttgaaagtactgccgtttgcattctctttgcaagcgtgccacgcccagttagagaaggagcagcaggctggagagctagaacgttgcatgccccagcagcctctaaatagccacacagaccctctcgcgattgtgagtccgcgcttgccgagccgttttacttggctgtcgacagagcaaaacagaggacgctgcatgtaaaggaaaaactatcgagtctgacgtaggcattaaggagcagatgctttcagtgtctcacgagaacatcagataccaccttctccttgcccgcgattcgtgcttgcttctaaccgatttgtagttgacttccatcactctctgtgacaactgcgctacccggtgaggtggatccgttcctgcattctccacctcgactgaaaatgtggatgagcgaaagcagtgaagagacgcacgagagaggcgcaagtgtgcgtggtagcgatgaacgctcagtggcgacgtcttggactcttcacgtcccctggtatgttgtcgaactagaaggacactacagggtatcaaaggacgcatttctcaggtccccataggcgtccgtttgatgtgtgtgagggtctcactctgtgtcagctgtggatcgaaaagaaggaaccgagtttgagaaaacttagacaacaggaccaagtgaattaccacgggagactacgtcgacgagaggttccctgtggctgaggtggaaccagaccagccgcctcttttccctgtttgtgttgcttaaagtgaagctcctccatcaccaagcatttttctcctctcccaatatacgggggcattagaaactccttatgccgccgtgcctttccgcctccttcgacgcttccgtgcttcactggctcttacaaacgcgtggcgcacaagccagtacaaagacaccgtgagaactgcactgctaaaaacattcttttgaatgttcctggaaacgaacgagctgaagtccgaaaccgacaaagtcccgtcagaccgctctttctagacgaccaaaggtccccttgagattgcaatttagaaacaggacccgtatttccgtgttgtcttactctgttttgtggaggggcgctgtttctggagtttcctcgttcggtctcttccggtgtttgcatgcgttcaaactgtcgaggacggccactgcaaagagagcttcccatgggacacgcgggagagggtcggctgccactgggagcttttctcgggattggtgaaaagcgacgttctttgcgtctctctgttttttctgttccctcctgacgctccagttgacagggtgaccttttgccgaaagaaccgaccgtctggtgttgtgcgattcgctgctgtctctctgccgcgctgttctcgggtgcagcacaccggaaaacaggaaagttttcttttccaaaagaagcaggagatgactttgtctttgtagacagcaaaatatcgtctttcgagactcaggacgtagcttactgcttgcgtcctttccgttccgctctgaaattgatgttagcggttcttgctgaggtgtgccggtggctgagcgactgcggaatacccggtcgttttctggaggcaacgtgaggtttcgtttcagttttcccgcttcatttcgtcgttacagctgagaaccccttgcgcgtgtcccccttcggctcgcaagctcctcccttccccttctccggtctcttcttcgtctttttctgcaccttttccactctgtggcaaca

SEQ ID NO: 3048 - DNA, 1345 bp, Toxoplasma gondii
  source 1..1345: mol_type = genomic DNA
gggcgtcatccgatcgccgttgcagatgagctttagtgaagaaacgccgagaaggaaagagaggaaatgaaaacgtcaaagaggagagagaagaagaagaagaagaagaagaaagagaagaagaagatgaagaaagagaagaggatgaagaggaacaggaagaaacagaggaagacggtggatgactacgtcgaggagagggaatgtcgggaatgaaagaacgtcgagagaatggagaagaacatgacgaaacgaaaagagaatccttccaccggcccagagaagaagacgaagaagataaagaagacgccgaacagaaataacagaaagaaggtggaggaccgcggagagaagaaaagcgacatgcggtggttgtcaacgcggaaggagggaggtgaagctgacgaggcgagaaggaaggcgagggcggagaaagatgagcggagaagcagaaaggagaaagaagagaagaacgcacaggaaaggaaggaggagagaaggacgaaaacgatctccgagccattttctggagagcaggaaaatgaccagaaactcaactagaaaaacggaacagcatgtttctattctaaaaaaatggaattctcgaggaaaacaagagaatgagagagaaaaaacttcgcagttccgccagaaacgcctcttatgaactctttgttctgtctcactcctccactcacagcagcctcgacgaccctctgttttccatctttgttcttgctccttctcttttcgtctttcgtctcttgccttcgctttgctttttctttcttttctcttctctcttcgcctttctcctgctgtcttcggctgtgcgtctttgtttctccagcatctcaaatcgctgtctccgttgactcgcggcttctctccaggtattgtacgcggttcccgcggttttccctggccaggtttccgcggtttctttcgcgaggaaggcaccggcctctcgccatgtgtctgcaggagacagcgaagagaagacgagaacggagacgagcgaggcaactgcaggaaacgcgtttctttgtcgcgttttcgtcgtataattcttcgcgcatgcgcatgcactccagctagggcagtagagcgacatgcacagaagcgcgcgtgagaagttccgcttcttctttgccgttttcctgcgcgttcttctctccgtttttatttctcctcaacgcgccctctctctgctgccttcgttctcagccttgcgtcgctccttttccgcgtccttccgcgcgtcgcctctctcctctttcttgttctcgcctcgaggcgctcggcgaatttctttccttcgtttccggactttctccatggacaa

SEQ ID NO: 3049 - DNA, 1704 bp, Toxoplasma gondii
  source 1..1704: mol_type = genomic DNA
tcaatgagaatgtggcagaactcgcatgacgatcgtgtttcttagggaagccagagctgcaatctgatttggactttcctccgtcctggacccgcttaccattaacacgttgagttctattcgaatcagacaaacgcactcaaagtgtctagcggcgcttgaggggaacttcgactgaatcataatttccctgcttttccaaatcctctcgcgtttcattgtcacatctgagccagtgccgcattttggcggcatcatacaggcttcatcagacgtagtcagtaccttgactctcccagcagtaagaacttcaatagtgcattttacagaacccggacaagtagaaaggtagcagtttcggctatatacgagaaaactcctctgtgtcgaaatcttccgtatgcattgtctccaacagttaaaagcctatcacctcctacagcggggaaagccgtgtttttcgaccctcgtttgagcagactgcatatcccagactaaggcctccaggattcgttcatcgcagaaactgtaaaacagcgaaggtcgtggattttatatcctacgacagagaaccttcttcacactggtcgtattctaggcgtaagatgtatatggctgttgtcactcttaggcaggttttggcgcgtctgtagagagctcaaagaaacacactaattgcagtgtgtagatcactataaaggaagtcttgcacttaacatggtggccgtagaaaccataatagaacttggatccggtaaaacaaagaccttcaagatctaaaccgggagtccgactcgtagcatttgatccctgccctgctcagcaacaaataatcagcggcagcattctcttttagaatagtttcttagctacaatattttactctgctcctggattggttctgtgcatatgctaaacgaacgctgctgacggacagctccccagcacacccgaatgccggtaggatacagaaatccaccgccttgagcattttcaagaagtctagtagattggtggagtatagcaatcatgaaaaacttttcccagaaacaagaaagattgattgttgcctggggacggttgactagacacgggattgaggtgccgccacgccgtttttgtgtggtcttttctcatggtttcgttcagttaattctgcatgtgcatgcgcgggtttttcccggcactatttcctctgtttcgaatttcctttgcgttccgttcttttctgttcttcgtagcccgttttcgttccaactcctcgaccatccgcgattgcgagagatcgttgtcagcatacagagttctttttgggtaccgctctagtctcagcgttgctccggctgtctcgaactctccaacctctcgagttcacagcgtccgttctctttcttttcctcgcctagccgtcgtcaaaatctactctttggaacttgtcggtttcacactgttttgccgacctgccacttatttcgtcctttgacctttctccgcctctccagtttctttctcccgcggaacgtcgagttctccccgtttatcttgccacctcaaggtcgcctgcatttcgcttcccgtgctttctccgtctctctgtcttctagttttggtccttcccttctctgcccttcaagtggacccttggtctccggagctgtctgtttctcctccccctccttctgcttgtcttcccgctatcgatta

SEQ ID NO: 3050 - DNA, 2297 bp, Toxoplasma gondii
  source 1..2297: mol_type = genomic DNA
ttgtaaataaaggatgtctttctaaggaggatgcgttggtacagtgcctcttggagaatgacacacaatgaagtatcagcacaggcaagcatatcagcgtttgctctgccaaacaccgatcggcatgtgctgtgcatggaagtacgcatgtcccaatgattcggacaccgttgcagaacgaatcgaaagaccgccaaagcccaagattgcactgagcttcttctcgactggcccaagtgtgacacaccacttccctggaacctgaataaagaacaaacaaccatcaaatttcatcgcccccacggagaggcaactggaaacgagcacgtgtgctaaaagtcgacgacatatcttctatcgaatatccgacgcaaagaagagacaccttctcacacgatggtgtaaccgtacaaaacccgagattaacgcgttggaggcaacgtcagaaagaccagaaatctcttcgggtccaacaaaatacaaagctccaattcttcacagggaactcggatccttcagcacgagtacccgcatgcctccgttcgcataagacacaaccctcggcggcagtacaaggagcaaacaagaaacagtgcttgctgagtggctgtttgccggcaatagcgttcagaataggctggtccaacagcagtggtgtcttttacaaaatgaagcacctcttgagtgctactgttaacggtggcacgtgcaccttgcagcaacgactcttttcttcaaatggcactatccctcaacccgaatttcagtggccgaaagcaactagtggaattcaaccctcctcatgtattccgtataacataaagccgctgtgaaaaatgatacgccaggtaaccttccagatgacactgtctgggccgacactttcctcataggagttgtttgttggcgcgtacgagatacactctcgctatttgcacgtgtcaggcagatgctcgtgtccagacaggcgttgagggagcattctcgagaatcgagtagtttccctctactgcctacagaatcattctctacaccacatttcatcacgacgccgggagattagttcgtttcgtgtctttttaccactctaaacacactttttttgaagcaggggcgatacctgactgcgacaaaacgacgaacagtacctcccccttcgcctgtacacactcttggcaaaattgcgcccacttaccgctgagcgccgaatgtggcatagtagtgctgaacaaattgcttgccaatggcgtcaaactgagggttaagctgcagcatgatgaatggagatatcgcaaaggctcaccaagatgcggggactgaaacgaaagaaaggacaaacaacaggaaacgagcttcaaacggcaacctttaaactgccgacggctgaggcagaatgaacttttggtaaagagaagggaaaaacaccaagaaagttctgaaaagttcaagagccactctcagtacgcactgaaaaccggtatccacttctggcttcgctgtctccccgtttcaggtctttccatccccacccccccccccagtttgagaaaaagggtcagagtgcaacaacaggagtcagtttcttgaacacttcgcgccggagacatcgcaccccccatcacctcaccgtcgtgtctcgtgtttttctttgagtgaatcggtgtttgaaaattgttccattgcgtttaatagaggggttcgtgtgtttgttgctggactggcttagtgaacgaatcgacgtactgcacagttcggacaccagcgactacacgcatgtcgtcttccacagaggcttcgctcagcacacttcgtgttctttcagtcaacacatcaattttctgagtctgtagtgttcccgatccctttcacaaccttctaccacgttctaagttttgcgtcaggatctctgcgaacggatttgtgcatttaactattttcgtcaaaattgactgggaccggagacaggcctccatccgccagccccgtccgcgaaatagcaagccgctttttccaaggtgaaaaatacatcacaatcgatcgcgaatgaaccgaacgggaagccaggagacggacgaagagtcaaagacgtgaatgacgtcgtactttcgagcctcctcatcttctataaggaatggttgtttgccacactcaccacccgcctcgtttgagtgccagtagtgttctgtttcagcaagaaatccatcacgcgagcaatcgcttttgcagtgtgttctgcttactctaatcttcaatccgtagcgatttcagaagtcaatcgtgtcactaactcgtaacga

SEQ ID NO: 3051 - DNA, 3388 bp, Toxoplasma gondii
  source 1..3388: mol_type = genomic DNA
taccaggtgatctaaaatcgcaatgtcggtttcttgtgcctatgaatctcattgattaatgtgtcacaggcagtccatcttcagtcgccgtctcactgatatttccagatacgccaaggaacagccacaacctttcaagtggtcgaaatacccaggcttcgtacaaacaacacggaaaaaagagatgcagagagacacgtgcgtctcggtgaacgcggctcaaaggcacccgagtgtgtgtggcgagtatatacgttaatgacagagtgtacgcagaaatctggaaaacgcagtcgttcccatggtgtgtgggggcactgaccgcaaatgtcgttgctcttacacacagagacagacacgtttcccttggagactgctgtcgctcgtctttgcagcgacataaacgactcggcagaccctcgtatactctgtaacatcatcctggagttttagcatctcggagacatgactatttgtcagcgccttgtgctcagtagaggagagcgacgaaaccttctgctcctggatgcacactcaacagcatgcatgcggtccggttgaatccctaaaaattttttttcttactgcattgtattgttccctgagctgctgagtctcggcttggagactgaagttggagtcttccattctcgtacagtgctcacaaaaaacgcgtctttctttctggacacgtgaccgtcaccctgtgacgcgagccgcagaagcttggcgtcttcggtggctgaggtgtgtacaagaggttagtccgatcgctgagtcgaatgtgatgagagggacttgcagttggatctcagaagactgcgctgttcttggtatcttttctcgaatttgcagccatggacacggctaacaacgactgcgtcggctggagggacggcggagttcgtgcgaggaaatttcggaaaagaaactccacggctctctacgacagcgctcgatgcaggggaagtggtgggaattctggccggatgaaagcagacgaaaacaacagaagggctgttgcgagttaagaagcagcgtctcggtcgaggttccccgtttcgcgaggcgagctccgtgcaggggaaagcgggaaaaagacgagaaatatgaaagcgaacgaccttccagacaattcgagagactcacggacagggaagcccgatcggcagaaactaaaaattcacaccgtggctgctgtcgctggcgttgacgactgtgcacaagacacaaaccgcggtgaggggaaaagggtggctcgagggagacttcactttaagaacgactgagaaacacacagaaacagaagaccggcgcttgagtggcgttcagattcatccgtcaggcgcagaaatatcgtcttttttcccaacataagtatccagcatgcaagaaaagaagcgccgcacgctgcctctccgtctgcttgagagtagatggacacgaagtcggacaaacaggtgttttccacttttctttccaatccggatggcataactgttctcagcggacgtgagggccgagtggaaaagcttcctctgcaactaggtggaaataaataacaagtgccgccctgtttgtcgtttgttttttgcaaaccatagtggttcgtcctttccccggtgcacgtcttcaaaagagacaaagcggatatgattcaacgaaaacgtgagaaaagcggttcgattatccaccactgcctaaccatctgagacatatacaacaacatgaaagccagttctgacaaccgcggtcagtgagttgtatcgtctgaagaccagcatatatgcacagcagtttaccagcaaattaacgcacggacaaggcacgtttgacgatgcattctcctacctacaaaaaagacgagaataccgcaattccgttgtcagttgtgttccacagcgaaccactgcagatctgaaaaaactatatatatatatatatatatatatatatatatatatatatatgcgtgagacgcggagaatgaagcagacgctctccatgaaggaattgcacaaggcggtggcggcgaaaaggcgcgacagatgaggggaagaaacactggaatttcttgaaaattatctgtttcgatcgttgctgacaaatccttttcttaagctgtttgtagttcgggcgcctcctcacctgtttctgcgtgcgtgggaagacagcacatggacgcatgttgaagtatgcaagcctgttgtaacagaagccgttttcttcagaattgcaccgggcgtctcttcagcccacgtgcagcatgaaggaaggaagtctgttattccctcagggcaatcgttgtttactcatgctaagtggaacgccactccttgcgcatgttgcagaatatagcaaacagaatgctgcaggtgcccattcaagttctccagagagacagagactaaattgagacagatgtcacgtaatgccatgaaacaaaccatcttcgtagaccgcgaaaactagtcgcaacgttgacgtgttttttaccactgctggcggacagccatcgctacgaaataaaacgttctgactgtcattatctgagttgtgcaagaagcgaaagaaggatgaacgctaccatctgcagctggtgaaagtctgctacttccattgaaaggaattctctgtccggttctactgtagcgcctcaatgccaacacaatctcacatgtagaacacgggaatccaataaccgacgcaaggggagtttaccctcgaggatgccttactttagtgcacgtaatgtttgacctattcagtcgtgtcgaagtgcttcagatttctgtcgtttctttcataccgatcctaagaaaggagaaacgccctccccaaagtggttaactcgttgtgaactcttcctacggacacgaggcagcttgcaccgtcgttagtttcacgctagaaagaggcttcctctctttgttttccactgaatcgtcgacccgagacgatctaaaactttgtccgcaacttacatccacaaagggacataatgaatcttggaacggtctatagtggtcttcctcctcaatccaagctgaactgtggttgatcaggactgaagtcctcagaactaactccgagctgatatctgccggagcgcattcagctggaggtgcaaatgcgcaggaaatgtgcacgtctatttgcgtttgtagacactcgtttatatccacgtgcacgttcatacgaaatgttctatgtccccgtacgtgaaagttggcaactgccacggcagcggaaaaaacaaagagatttctgctcaagagcgagtgctagcctctctccggagaatggaaatcgtctctttcttctgtggtcaacgtatccttcgcatcgagattgtttgcaaggaagattcccaacggtcttcagcgca

SEQ ID NO: 3052 - DNA, 3802 bp, Toxoplasma gondii
  source 1..3802: mol_type = genomic DNA
cgcttggttaatcaaaatgtttgcatctgccgtgaggccggcaacggcgcacatgacgtggtcgtcgacctgtacagacagtgaagagagattcgcagcactgaaagggagagtctggagaagaacgctggcgaaacgagcaagcgagcaagtcggcggcggcacagagcgcagagagaagataccgagacgtacaacggacgaagactgagagaaagtcaacgggagagcggcactcactcacctggcgacagagaaaacacgagacacgacaaggggaggagagacggcaggaaatggattcaagatcctgtacgaaaacaggagtataccgaagggtggagaggaggagagagcacacacatgcaacgctcaagggaaggagtaaggaagagcgagaaaacggagacgggagcagctgcgcaggaagcgacagacggggagagagaacgcgaaacaccgcgacgggagagagcagagtgtgaaaagaaagctcgaactcccctgctccgggaggagcaaaagaaaccactttgtaccttgtagatcttttccttcgttctgccctgatccagcagcttggaagtgaccattttgtctgctgcgaggacgactccgtcggtcgcgagaattccgagagttgaagacgcattgttaattgcctctaacgcgtactccacttggtagagacgcccctccggcgagaaggttgtggttctggaatcgtagcgcctggccatgttgatttccgtctaaacgcacgcggtcgaaactgaaaggttgctggctgctcgagcttaaacaaaggcgcgacgaacaacacaagacacgccgttgccacgcccagaccgaacgggcgctctctgcgatgtgaaacagagacaaagaagaatgagaaacgcgaacaacaggcagagaagaaggagcacgggagaaaaacgagagagcaacaggacagaaaacgaaaaggcgaagaacggaagacagaaggcgacgctggcaaggggttccaggacgtagattggggtatttaggtctcagggttccacggaggtcgtttttctggaacaaaactggagacaagaagagagaaaacgaggaaagaaactgcacacgccttcacattcaaggagcgattaagacacacggactgtactccggtgcctgcacatctctgcataaaaagactgagaggaagaaacactcccgcacctggaggagagcacttgcacagaaaaaacagtgcgttgagtgaaccacgaggcacaagaacccagagaaaagtgccaagcagccggctgaaaaaagtaaaggccccctcgcttttcagaaagacttccccgggtgtcttccgtctccctgcatgcgcgcacaaactgcagtgtgcacccggcaacggcttctgcaagtgacaaagggcacgaaaggcaaacgctaacacatccgcgaatccgatctctttcaaagcgaacttctacacgggaaaccacggtgtgcagtcgtttgcatgcctttctcaatgcgtctgcaacacgcatgaacatgttcgtgtgtgtcaaaacacgaggaggaggccgcaggttcctgacaggcgaaacaggctgcttgtgcacgattcaagcgaaacacgaattttggcttttgtcgctcttttaaggaaatttcaaacaacgttggacagagactggggcagagcagcgaacgccggcttacactgaagcccccgcctcttgtagcagctctcccaatgtggccagcactacccttgactacacctctctctgtacctcctggagtagtaaaacaggtaaatgttagcaaacgaaccgtaaagataattgaacaaatatataagatatatttaaatcagtagatgtatgtaacatgtatgaaaatatgtactcatgggtatgtatatgtatctatatataatatggatattaatgatgcgtgtatgcatgtatctgtaaataagcctggaatagaaggcacgcttctctaccagaaaaggtacaaagaaagaaggtctgagtgcgaatgtgcaggaagacggcgaagggaaaaaaatgagcaaagaggggaaaataattgaatctttctgaccacgccgagacagcctcactgctttgccaccctctctgcgaggttcacctggaggcgcatttgtttcttcatttgcaactttcactccagatgctctttaaaagacactggagtacctaggttactgaatagaaacccagtcatttcaagggactgacagccaagttatgtacgattgctcacgaccacgaccccctgtagtgcttaagacaacaaaagctggactgaggagtctcgacaaatctacgaaaatccctgccttggagggttgacactttcagaatggataacgttctttgcctccaagacactcgcgaccttttgcaggcttgaaacgccaagctaggacagagacaactggatactaccgcagagctgcaattccacttgccacgaacaacacgacggattcaactcagcaaccacttagcgacctgagaaaacagtttagtagccagggcgagacacagcctgaagtgggggtcttcccaaccctcgttgttcggcgaaactgcgaagacacccgcggaaatcgacaggtcacagttctgaataagtgggcactcttttctctctgatgcccgttgcatgtaagaagcaacttcaagaggctagttgttctgtctagtctgtacgaatggtgacggcaatgtaggactgagatcccctggagaaacgctttctcggggggctctccggttccctgactctctagaacaaggtccaagcgaagagcactctgagttacttcctctggggagacgttctcatgaatctgctcattccaccgaggcttctttagctccgctcgctcctgctgcatagctgtcacacggtccgaccgcgaacgcaaataacagctccgtttatatcggtacactggcgcacctggacacctttttgtgttgagctccagttctgccagcgggggttccctttcttcgaatttgcatttcgactatgtccacccgatgtgtgcgtcggcccgtgagtcctgaacacgatttttgtcacttgcgagtcgtctcggtgagacagtaacagttaaaagaggaattattcttcgggatgttcaaagaacgggaacagctgcggatagaaaaccgtgtctccagagtgtgagcatgtcgtttccccttttcctgggcacatgacaatgtgccaaggtctcaagacagcgctggagggaggaacggactcaagagcttcctacggtgaacttcagacgttccagcgcggtttggaggttgtcgcctcaggctgacatcaatggtttgtgagaaatgagcgcaagcgtacactttggggttccccgttactcgttcgctctctgcggtcgcgtagtaattcgtgagcgactttgactttcctcatggtgaatgcgttctctagtctagaaacgcaacgagagctgaggggtcaggtgaaagacagctcttggctgttgcggaagttgttgatacccgcctgaaaggcgcggagcagtgtgcggcaactgtcgtcggtttgtctgaggggtcggaaccggagacgtgcgggtttcgtgcttgtcatcgactgggaagaaattcggggacgcattcgcttggcatcttcgaagactttgcgttttttgctcgtctatcgccacacgctgttccgaagcactcgtcccaaccaaagcaggcgggcactccgggtgggtcatcccgctgtcaca

SEQ ID NO: 3053 - DNA, 5044 bp, Toxoplasma gondii
  source 1..5044: mol_type = genomic DNA
gggaaagcgatccgccttgccgttaggcctctctgtgccagataattattctgtcgggagcctcgcaaacaggaggacgcgtttggtcgatttgcgggaaaagacaggagatgaccatcaagcgcaggagaggctggtctcggtggagcgacgccctgcgacccaggtcccggagaagccgtgacacacatccctgttgagaatgactgcattccaatgtccgaggaactgagactgggccactgtcctacagcaggttgaggaggtttcatatgccccggaaaactcccctgtccggtgtatgttggttgaggtgcatgtgacagaacctgccgatttgtacccgaaggggaaaggaccggatgatcgtgtgggaccgccgagtacggctgccaggcgcggtcgccgtttgcagcgccgccaacctctcgatagtgacctttccacatgataagcgaagaatggagcgactgtatgacacctgaagtatctagaaagatggcgcgaggctgaaaacgttagagatgtttgctcgcgcgtctgttgagagaaacgagggaggcacaggtaacatggcttggcactggaacgcaaacgaaccaacgcctcaggccaaaatttgtgaaagcgaccaaagacaagggaaaacagtcgtgacacgcgaaatcaaacaataacgctgaggtcactgctatttccgggcgaagaaaaaatgttcaggtctgttgtccatggggtatttaccgatatttgacaagagaatctcggcagtaacccggcaagtgatactgaattgtgaaatgtgactgtgagagtaggcacttcaagagagatgaggagatggctctcacggacgtggcttgcttccagaatgaaacagctacttgccaagacatttgattgaagagagctttgacatgtcagactatgctggttcatagcacctcagaaaaaccagcccacggggtacgccaagaggacagacaagaaaacccaaaaattggtctacagatcgtcgtccacctaagtggagccacgtcaagtcccgtttgcctgatgccaatcttggtttaaaaggtctgatacctgagaaagaaggtcacgctatagccactgtttacgcgttgcatcctctccacggcagcaggtctgagaagaaggcagtgcgttcatgaaatcctccggtcgggcacggcctaggatttctttgatgagcaatccaatgcaccttgcaattttccgtgtccagctacactcggccacgtttcaatcctccaacgcaagtgtaaaatctacgattcgcaaggagcagagccataaaatgccaactgtagagaaaagcgttatatcaagggatgatcacccggggaatcaaaatgacgtttcgagcccaaaaacgttgtgttgcccttgctgcgatgtgatggcgggggtttaccgtcaccgcgcagtcgaggacagacggtgctctgctttctcccacgcactcttcctgaccaagaagctccaactatcaaagtggtgggcccaagattttctcacgcacaaacctcgacatcgaagaagtacacgcagcacaatggccatcgtaattctggagaacgcacggggaaaagcagcagtcgctgcttggccctcctcggctagcacgctgttgggcaattgaggtggcggtgtcttgagcaaccggtcacggtggctttggcttgctctgcgcctgcaatcaaggtcactcgcggtggaaactcgacataggccttcagtgaatgctgtacgaaaaaatagacacaatcttacggactacggtggaaagtgcgcactacaaagagaaatgtaggagtgtcagcctgttgctgagctaacgttcgcgttggcgtctgccacccagtggggatgcggtgttgacgctgccctgctttcagcgcgacttgatatgtagctaaatgtattgccgagagtcctgcaggatcaaactctcaactttttagatagaagcgcagaaggagcttcttggcattagatagcatatccgcattctcgggcggaacaccgctgagccgtccgtgtgagagggtgtgtcgcaaacaaactcgctagaacagtatctcgcggtacgccacctttgggggcccggttcaacagacatctgactcactggccgctgcgcctatgttgatttaattgaggggtaacttgataaggttaataatagtgcacccattttcttgggaaataggggggtattatgagttccctgcctctgcggtcggctctgcgtccctcgccagtacaaataatgtgcttcggatgtttccaatgccgcctcctggagctgcctaccacgcgcgtcgcctcatgcgtatcgacggccgtaaagatgcttacgccaaccactgcgtataattttcccccagctgatcgactactagcagttaaacaagaggcgaacgcgaatatcgtctaataaagggcaggagacatcaacatctaggccggccgtggcgattaccacagcttcatcgcaggtcgtgtggtacaaaggaaaaacgagagctggaagtgacttcacaatagtggaatgcttcaccgtgacaactgccggtgctgcggatttcccccgctatgaaactacaccactgtcaactagggaacaaacagtccagatggacctctaggcattcgtagccatatcataaggtatcgtgtcgggtatgaaatgccgccacacgtgcagtagatttctgaagcaaatagagacgtcgctttctaaccatgtgtggcctgtacatactgcttccaaaatactatgaaagcaagtttaagaagtgcagttttgagggctcttcttccgggaggtaccggtttgccaggccgcaggctcgcagcaaggcgttccgtggccgaaggcagcaattggtaggtagcggcgcacatgttacctccacagtcaccagcgacagtttttcacgtgcatgctgatgagagactgtatacgagtacagtacgtccacagttacaactctatgaaagagcgtctgtgcacagtattctgcagcacccgcgtttcccgaagcttctcttagcagttgagcggggagaactggtgtttgggtgagaacagcggaagccggatttgtttcttgggtatcacaatactggtaaaataatacgtgtaatgcgttgcctacgacagtcaggttatttctatttccatcccttcacgcaaaataccagaacagtaagccttgacctgctgcatactctagtgctagcaacacaactactatcgaaatcgctactgtcgtgccatactagtgttgttctgatttgtacccgcacgccaatgcaggaaggctgtcgcggcgcgcacgaactcagtgagagcctggagttttctacagaaaaaataaacctcgaagcatcccttccctcaaaacaatagcgtgcagcattacgaaaacatcggcaacttcgcacgtgtagaagcccgctttattgacagtcagaagcgtttcgttctccataagttttgcttgggcatgggcagcgtcaaggtagcctaagcgttttttaaccgccagccaccacgtcacacatgtgttcagcgaagacagtgacgagcgcttcccatcacatgtcagtgaccgtgttttttcagcagacgttcctcctcgacaaagtacaaggggacgtttgacttgaaagtttgaggctgttatcaggagaaactgttccagcttggcataacctttttcccaacaatgcttgcaacaagttcggtcaaaccaggacgccgcggtctctcgcgggctattgcacaagtgactcccgtgaacgactaaggggagcctattcctcaacggtcagactgattctcagaacgggcgttttctgaagtgtagatgccatccttattggccgtccacccccgacgccatcttgtcttgccgttcagctatcggaaacgtcgaggtgttcggactgttcggtgtcggcactttttcgtcaatacagagacttgtaatatattgtctgactgggcccccgtcaacttttcttactcctgtgtcagagtgtttgtcgaccaatactgttcgacactggaaagcacctagttaaaagtatcgagtttcctgttggcgtatcttcacgttacgttgagcaccaaatctcgattgctattttgccgccaaatggtggatatcttctattgagttgtgccaccaccttcgttggtgcaggtctctggaacgcgcctcagttgttctctagccgttttccagctgcgccgcgatgcgactttctttcctttggctgtgcgtgagtgtgtcgccttgtctctcaagtggcgcgggacggccactcttggcattgggggccgaaggagattctaccgagtctgactacttccgcacgttgatgattatcttccatgatgactgcgatgcagaggaagtcaaacatagggcccttcagagaagcttgcaagtccagctctcacgtttgtcacactccacggatatcagcggacaggcaagagccggcgacttcgagtaagcaagattgcctgttgagtgcttaccccccgaaacgtgtacgtaaaaccacccgaatagaaataggcagtcgtggtgcgcagaattatcaaccttgcaccatgcccctactttctttggttagatggtgaaagccgttaaatgcacggtatgcttttccactgtagcgacatgcacctcgagttggaatactggtctgaatctgggtagtcgttttttccgcatgcagatgctggacctagaaaagacactttacagtgcttttctgcttacactggatacggacttgtcctgtctcacgagttctgagacccgttcacgtacctctttaacgataggacagactagacatgtgcattcatcgtggctccatccttcaaatcaccaacggacgcagtaaaaaggctgaaatttcttttccaagaaggattgaaatccaacgccatggcgtgttctgatgtgtctgtggcgtcatttcagcgaagaga

SEQ ID NO: 3054 - DNA, 2649 bp, Toxoplasma gondii
  source 1..2649: mol_type = genomic DNA
gaaaaattacctgtggatgtaaagcagcggttcttgagagctgcagtattggaggggcaggaagatgggggcagtgggggtgcgggagacttctcgcaaagaaagaaaacatagaggtggagggaaatttgaattcatcggagaaaagaggtgcgtctgcggtctctgttacgagtgcaagggcgtcgagagtggctgtacaaaggcaacagagacagttgaaatgcgacaggtaaactgaactttttctccaggcttcgctgggaaatgaaaggggaagaggaatcttcgtggccgcttacattctcagaaagaacagcaatattttctttccactcttgcagccagtgcgtcgattcgtctcaggttaggtttggatgcagttttctgctggcatttgtaatttgagacatgctccgccgttgctgcatttgaatacccatcttcttcagaagcacaagagtctacaactgtctttgcccactttcttctcagtcctattcccctttctagcctgttctgtcgcagcgtctctcctctccttttctttgcttccgctctgcgctgttgcctgctctctgtttttggccgttctcggggccgctgctctgtcttcgcgggtctgtttcttgtttgtcaacctctgtgaacgttgctcgtttttttcgactcggaaacgctgttgtcgtctttttaaccagactagcgtctaccttggggaccttggtgcagacggaatgacaggaaacagtgttgaaactccagttcgcgacagccgccagctcaaccgcaccgcaggcggctgccttcccagaaaggagcgtcgccttgcggcaaaccgattcgagtgtgggctgtaaaaaaatgcaagtgccttttttctgagagtccctcgaacgtgacgagccttcttgtgcacgttcttgtttggaatcctccacaacgagtagaagcatgtctcactggcttccgcaatcgcgtaatacgtctttgatgagaccaccaggtgcactgtggcttgccagtgaagaagttgaataggttgaaggcggactgaactatggcttgcgaaggaaggaaataatctcacgtatcgagaaaaagcgagatgttcactttcagtggcggatcaaaaggccttgcaatacatttccgttgatttaggtcaaaacgtttaccctgcttcagcccagaaatcgtagacacactcggtcattttcgtagagtcgacagctacaaacgtcaaagcagacgctgaagaaggtcctttaccaaattagctactcttaccgcacgctcacctcttctgggactgccattcaagtctgtttcggtttttccaaggcacacctttgctctcagttcttgtctcattttgtaccagtttcttttgcttctaaagccaattgtatggatcctgtaatatttgtggatacaaagaaagacaaggacagtatcgcactcggatgctcacaaaggagtttcttgctgttctacctagctcgagcaagaaacagctcgacgcgcagtacccgagtcgtgtctctgtcttcgtgtaggtcgaagatcgcggtgaaacctctacaagaactacattctttgccaccccagtgacgaagatgacaacaggagcaactcgtctctgctgccggctttcggaaaaggcttggaaaagtcctctggtgtgcccccgggggggtcgatccgacgctcgacttgccactgtgcgtcttccatccgacggagggtggaaaacacaaggagatggcgtcttttcgttttttttaaccacagaaagcagtcccctcgggattcgcgaatggggggcggcagtcccaacgccgaaccgttttagcaaaccttcgtggtgtgccttttcttcaggtggaagagggtgggtgtgtacaacagttgagttgcaaagcccatctctcgaggacggtggtcagaactgctgttttttcggcggcgaaacagtttcttttgatcacgaattcccggagcatttctccgtcgacggctcaagaggtcaagaattctcagtctgtgccactttttctttggacactggctcagctcaccgcctttttcagaaaaagggcgttgtcccccccctccccccaaattctgttgatgcaccgcgatatccgacagcgtgtctccaaggagagttttgagctttttgcgcccattgacctgcgaaacacagttgtcagttggctctgtggaaagtgtcgcttttccccaccaaaagtctgtgttttgccgcgacgcgtttcgcgaacaaataccttttcctgcacagggagttgccgccgtctcgtccagacaacatcgtccctccccccttcgcacgacttagacgtgagatttctctttcccaacttctttccgtggcgaggaaacggcgactctgtcgacggcttgtttctctcgtgtttttccatcctttcccgccgtaaaaagcgccttgccctgccgtcgttttgcccccgtgagctgctgtctgcgttctcgtgttttttgccgcctctccacactgctgtgccgatagtcgccgtttctccacctggtttctgcgctctcttctcttcgccatttctgcgtccttgcgcgtttccccgtttcctttccataggctcgacacca

SEQ ID NO: 3055 - DNA, 2184 bp, Toxoplasma gondii
  source 1..2184: mol_type = genomic DNA
tgtctataatcgactcccgcagtcgctcaggctcatgaaatctgtctgcatttcggatgctggcttttgctgtagtgcctgagacggcagttgcccccctcccgccagacctctgtgtttttcgatcgagacaggagatcggacctgacacgaacggacggctcagcacccattataaataaataaacaaataaacaaatacatacatgcatacatacatacatatatacatatacgtacatgtatgtatttatgtatttatatatatatatatatgtatatatatatatatatatatgtagctgtagctgtcaatttgtgttggaaaataaatgtgtgtatatttgtttgcctatttgtgtctgacctcttcgacagctatttcgcagaagggattgatggagtgcttgagtccttccgtctgcatcgtcgttgcgcctgcctggacgcgaggcttcacggcgtagtcgagagtcctcttgacgcatacgacagcagtgtcgagaacgcctttcatcttgaagagttgaagaacgtcagggttgagtctctgcttcgaggcgccaggttcgcgtactcggggaggcgagaaaaggatcgctagctgggtgttggacgccggcgaacgctccgctgtctcctcctcgcctcaggataaaaaaagtcttgtttccaggaaggcgctcttcgcttcggagctcgtaggtagtcagggagaaaggatgcgcacttcgcgtggaagtcgtgagtcctccgtcgagtccccagcgacggttttcgcatccgtcacaatgatcaactcgtagaaaagtacaagggagcttgcgtgtgcgttgaggaaggacgtttcaatgacacccaagagaagcagaagagcaacgaagagagaagaagcgaaagaaaaaagaagagagagggatgcgcaacttcctgcgcctcaaccgcactcaaaagacgacaacctggttctgcgtgtcttgttctctctctcctctctcttctctcactgcctttggggtcgtctgcctctcatcgctcgacgaaaacagcatcgttttcctcgctggttttgaaagacttacacttcgcggtctttcacccgttgctcgtccattcttgtcgactttccctggcgctcaattgcgacagcctcttcgcgccttcacggtgtgcaaaaaagcggcctctctcgcttcgatccccgacctcgctgtgtgctctacgcgcgttttttctcggaactggcgtgaggccgcgccgcctttcttgtcttcttttttgtcgcgccttttcctcgttttctccctctccacgttcgttttcctctttcttcctcgtcgtaaagccaaacgccaaggaacgcctcccgcgaagtttttccccggcgacagtgtctgggcaacgcgaccggccgccgcgagtgtggaggctcggcgtgagtggtgaaaaagacaaaaacggaaaaagaaaaaaagtttttcgttggcggcttctttctgcaccgacccttctgccagtggaacggcggagagaaaagaggagaaacgcacgacggagaggcgacagaaaaaaaggggaaaccgacgccgagagaagaacagcagaagaatttctggaaccggtttcaagatgaacagtgtgtgaggagagactaggtccacaatcgaacagagagaggaggaaaaacgacgagaaaacgggagacgaccttaggcgtgtctctcctctctccggcaagacccagagaaaaacagctgaagtcgtcgtcgtttttcttctcttcttattttctcttcttctcctctcgttccctcttcttttctcctttcttcgtgtacttctcttctcttctccccgcctcgtttcttctctcctcgcctctttttcctcgcgtctccttctccatcttttttttcgtatctcgcagaacagcgagagacgaggctgtctcgcttgtccgcctttcttggttgccctctgccgcgtcttcccctcttcctgccctgcttgtttctgcgccgtcaccgagcgccaggtctcttcgttcaacgaagaagttttttctcgtcgccctgtgcgtattgacaattcgccgcggcaactctcttagggaagaaacaggcctagagagagacgcagatgcacagaacgaaggcaggaggggaagagaacatcaaacgaaga

SEQ ID NO: 3056 - DNA, 3721 bp, Toxoplasma gondii
  source 1..3721: mol_type = genomic DNA
tcttggcaacatcttcctttctcaaagcaggcagctggagaggaacgcgcgaaggtgtctgcgggggctttgccgttccgcgacgcaggccggcgacgtgcagtcgtttgcgcgagaggaaggccacgggatttacatcctcttgctctggagtgtatttggcagagcgtggttcccgtccaggacaagacaaagacggctcttcagtcgctcttttgatcgcaggagcagagactgaaaaagacgtgctcatctcgcggatggccgcgaccagctgctgaaggagacgttgctgcgggagggttttcaggccgagagtttccgagtacttcgaggtcggcaggtcgagaagacttttgcctgacagcttgtgaaaaaaacaaaagacgaacagaaacaggaaagaagggtatggggaaggtaagggacgaaacggacacagtggacgagaaacacatcagcagaggacactgcagtgagcggtgcacgagcaactacgtaattgacaaggggaccgatgtgagggcctccacacaagcagcgcacaagatgaaaatcaggggaaagcactttcaaaaaggggtgtcctggatgtaataatgggagtgaaggtgaaggaagcctttgctgtgttgacccgagaacagcaaatggcaatcgatgattctgtgagtcccttttctgctcgcccctgaaacaaaaactggaaatgtgttacgacaagccgttcttgctttacacaagactttgataactgttttacatcttgaaggtctttgtttcacgagtcccaatggtgcgagacagaaacgggtgaacgtcggcataccgactgttcagatgttcactagtggagacacagaaagaagttgctgtttcctcaaagaatgtatcagcggttgcgttacacaaatacagaaaagtgaaagctggtctcttccacggtctccctcgtacctcttgaagcttgacttcgcgaactgcaggcgccagagtctcacctccaaccttcaagaatttcgccaccgcagcatattccagctcaccaaaacctgaaacaaaccagcacgcatgtatggagagtcgacgcggacgtttccagtgctttgaaatctccagatatcgactgaacaaaaagcagctgatctcacgctataggtggtctcgtagggcaagtaactatgcgttttttcttgtatgcgcgagtgggacctctctttttgtttcgcattctgcaggtgtgcgttccctcatgatgaacccgacactcgctgttcacaggatgcgacggaggtgtaatttcagaggcccatctaaaaagcgacgaacttggcggaagcggagttgccgacgaacctctgaatcagagcttggacgaccccgctattgagaccggaaacttttcgccgtccctaggttttacctcagcatgacaatgacactttccaagaaagagtagacgcgtagacgcgctgtgcagacaccacatctttccgcgcactgcggattcccgggtagctgacaaaaaatgcgtggaatgtgtagcgaagaagagtgcatgccacacggagaagtgtacaaagtgtcttactggaaagttggtcggcgtcaatgagctgctgctcgatggctttcgccaatgacggagcggacatgctgtcgcgcatggcacgatttgcggcggttctcggagggatgttgcgccgaaggcaacactttcgggtaatgtcaagtaaaatttagctggtgtgctattaagacaagtacgatgattgcaggagaagagagggaaacgagagagttgctgaaagccgagtgaaaaagtcagccgcgaaggttctcagggaaatgcagcgagactgttttcgggagcaactgcgaaggctaagcagaagttatcacttgagcgaggatcttcgtcgcgaaagggtacccatgagagtcaacggggaaaaaatcaagatcgaatttcatcttacaagcaagaggaagaaggaaacatgggtaagctaacctgtgaccaaaactgccagcacacagaagcgatacactgcagagccggaatcctggggaggaatggacgaccacccatccaccacagctacgtgaaagacacactatgtgtgtcatgtgaaaaaagccaacggtaacccttagagaaatttaaaagatttcgccattacgtatgcatgatttgccagaaattgtcctcaactggcaagacatgcagcgggggtcggggggtagtgggactgcgtaggcgagcccctccaacctgattctgtggtttaccttcacgtgatcatcgtttggaggcttgcctaaactgcctcaagtgtacttctttgttcgatcaacaatccctcatcattgagtgtgttggcgagagagtgcaacggacgaatgttggcaaaactaacccgacgaacatgagggaaagatagaccaagaaatggaagaaaccctccactgcactagtcaccgcgagggctcggccaggaccccgtgtgtcaaaagttagattaccttcctttttacttaaatccaaaaatgtgtaatgaatgtgcccgatgcggtgaaggcagaaagccctacgagcttctgcagctgacgtgtgcccgtccccagcttttcttcaaccgagagaaatcttcgcctccctcgcacaccgccagggcatcggcacctgcccgtaggcgctgcatcactgaagcaactcaggaagagtgtagcgtagacgttggctttccatatagtgttgcagggttcctgacgtccttaactcggcggcccaacaggttcttttaagggaaagcgaaacgaaacgttccttggtgcgaatttggcgatttgcgttatctgccactcgcggcagtggcgtatcgttccgttggtgggtacgctcggaagggtacttacaaaactagcaaaataacggtgtctttgttttcctctatcacaaactcggcttggcgtgttttctccatcactcgttgtttcgcacaaatgcgcttttggagaggacgtgtgaatggcaggtccatgcgttggaggaaaacaactttcccgaaactgtgcagaaatgatccgtcaccggagacatccgtctctcggctgcgggccgaatcgctgagcttgagaggcggattgatcaatttcacacccgaatgagagagtctttccggtggtcaagaagggtgcaagagatgcgtagatgagctgttcccaatcccccgttatccgccgcgggacaatcggaattaattcgtggcggctagctggagacgcgcgagcgccatgcgtgggcagaaaggtacgctgaaacaccgagggaagcatcaatcaacggttcgcgcgggcaacggcgcgtgtgcgtgccacctcgagctcgatgccaccgtgggctgacttcagaataaaatcttccccggaaaagtttttcacgtggttatttcaccccgattatttccaggttataactcacttccaggtttaggcgtagggaatctgttgctaccgttgtgtgtaggtttcaagccgtcaccgagggaaatcgaattaaaggtgcacggtacagtgcggtgacatcgacgagccaggctttcgccgttgtgttaccttcgcgcagagattctccaaggaagagtaccagcgctaagacggaacaaaccaatagaaaaggcgttgtagcagcgtcactttgcgaagctgtgtttcagaa

SEQ ID NO: 3057 - DNA, 3237 bp, Toxoplasma gondii
  source 1..3237: mol_type = genomic DNA
tgtacatacacccggcgctccttccgttctcgcctaaaacgaattccctcggacgcgcttttcccccgttttttttcgtgcgtggtccttcttcccgcgctctctgtgtttctcccctgcacccctgcatgcttctttctcgctctccctttgtccttcgtctttctccgtcggtccatctttttcgccgcacctccgagcttcactctgaggttcttgcgcacgactttgttcaggcgaatctttccttcgtcgaggtcctggtcggccaggacgacgcagacggtgtcatgccgcatctttcccttcagaaggacggtgtctcctcggaagatctgcagctcctccatcttcgctgggttcagcgccacgacgctgttgtcgtcgttgatcgcctcctcgacgatcagccgattcggagaccgcttcttctgactctcctcctttttctccgccggaacggattgcggtctgcgaatgccgccggccatcttgtcttcgcagtcgaaagaagcagcgcgtctacgcaggccgagcgttgaagagcaggtcgcaaaaaagtcactggggagagaggcggcagcggagggggagaggcgggggcgcacagcgaaactctctcggctggtgagtcgtcgccaggtgtgaccagcagtacggagcaaggttagcggatggaagcagagagctccgaggatcccgcgggcgaagaaaagaggaaatcgcggggaacggtgtgaagaaaaaaggagagcgcggctgcaggagacaggggtcgtcgagagggaggcgcgaaaagagcgagaagtccgcagaggcaggacgcgcgaccgaggagaatgcaacggaaatgacgaggcgaacgccgcgtgcagaggagcgacaaggcagaaaaaaggcgagggaaacggaaacggtctctccagtgcaagaaaagaaaaaactggcaacgttttctgcagacaccgggaactgcagttcttgcgcgcacgctgcgccggtgtctcgacaccccaaaaaccgcgagcggagttctcaacgcgtccggcgcctcggcgcttgttcagacatttctcggcaagactgagaaccgcgatttcaacacagaaactctctggagacgcagaagaagcttccgacgcgccaagcctgcagctgcacttttcctgaaaaccgagtcgcggcgtccacggacaacaaacgcgcggtctctggggggtggtgttgcagtgtgcgcgagcgccgagcaagcgccgagcaagcgcgccggcgcctcttctcttccctcgtggacagccgcgctgcagatgtccggcttcggtggcaagtccttcttggctccagacgaaaaacgccagccctccagcgatctttcagttgcacttcagcctcatttcagttgcactccaggcgaggaggcatggcgaagagacggacttctctccgtctcggtgctctcggtgagagaggcaagaaggaagaggagaaggaggaggaggatttaggcgcgaaagagccaggaaggactcgcctgcctctgcgcgaggatacgccacacagacgacggaggaaacagaagatagacatttgcacagacacagagaaagagcgaactggaaggaagaaaaggcgcgccccagggacgcggcaatccggacaggagaaaacaggaagtaaacaacgaggagacgcgagagagagacaacctcggagaaccgcctcggcgctcagagggaacagacagaagattcgactgtacaagaacgcttgagaaagggacgaagtttagacaaaggagggaagcacgacgcgcagctggtttacgacagaggacacagaaaacgcgagagattacacacaaacggcagacgacctttgtcgcagccatgctcgtcttcgatgttgtccgcttgcttatatatgtgaatccttcgaggggagatgaagtagagagggaagagatctacagagccgttagtggttcaagacggtgaccttgtcgtttcaacaagcatatggacgacaatacaagcactgtactcccccgtagagttggaactgggacgaggcgtctcagctgccgaagtttctcctgtattacctgacagcaattcgcggtgtgtgtgtgtgtgtacagccggtacagttgtcgttcgaggaagttcgctgcatcgctgacatcagacgtttctcgttcgctgctctgtacgaaatgcgatgcatgttctgtcactacgggggtgtatttatagattcggaatggagaatgcggcatcatgtgagagagggggaactgtcttgtgtgtctccttctttccttcctgtgttctcgccgtcctgcatccttcatcgtcttttctccttctctctcttccagaatatcccttctctcctccgttattcgcctttgctcttgctcgttcctcctcaccttcttctctctttacctcttgtttcattcctccctctttcttccttctcacacgcgtatcgctttcttcctcgtctcattttcgctctgtctgccttttcgcgttctccttcctctcttctccacttggcagtctctctttctttctctctgtctttctctttcgttcttctttctttcgttccttcgcccgccgacctcttctttctgcgttgcagtatgctgcgtctttctcgcctccgtttgtccgttccaggacctgcgcgtctctcctcctcaggcagtgaaacgcgcctttctcgagtctcctgcttgcagtcttggcgggacttggggagacgacgtctggccacagaagccgcgaacgcttcttcgaatgccgagttgtctcgccttgtgcctctcgggcgcgcgttttttctccttcgctcgcttccgtggaaggaggcagtgacgctggaagcctccgcagagtccttcctttccacgcgacggctcttgctcctcgcgctaagaatccctcgcccagagaaggaggaaaaaaggacgcagagcgcgtacccctcggcgtcttccaggagaagaggagacagggaggggagggaaacacagagagagacgcgacacaaggacagaagagaagacagagaagagaaatagcaaaaaaagagaagaaagagagagaagaggaagaaagggggagggaagagaagcgaggaagatactcacgccgtacgtagctgagagacccgccacctgtcgtgttgaatttgatagagtgaaatgagaatagaaacttcgaagaa

SEQ ID NO: 3058 - DNA, 3929 bp, Toxoplasma gondii
  source 1..3929: mol_type = genomic DNA
agcgacgaggacgaagacagttactaagatcatttgcctagttgcttcgagacactcggccttctccccccctgatccgggaagtaaatgacaacgctggtcatcacgcgagtcaagcgcatccgatttagaggctacattcaaatttggaattctgtgaacgagcagtcgaacaccttggtctcctgaaacctgagttggctgacgatcgtccgcaggattcgtggcacctccggaggggtgtccatgttccccatggatctcgtgagaaaccgagttagctagtgcttccggggtatttgacggttctgccatagcgagtcgtcatacctattcgtcaaacggcatccgtcagtcggcctcccaacctgtttccgacagaatgttcgtaccgttcttcgtcataattcgcgagcggaaacagcgaaagcagaagtggtgtcacaagggacgacacgcctgtaattcacttttttgggccccaacggagatacgttagactgctgaaagaggcgaggggcacttgggactccttggaacggagaatcgacaaacgtgagtggcgtgccgtgacagtgagcgtggctgtcgatgaagaaaggagtcaaggtagctacactcttactgcatgggcgcccaacggaggttcagcacgggaagggaggaaatgccggaggagcggacagaggagcaaaatcaccaggccgcaacccgaagcaatactagtcgtcctgagggtgattaataagcaaattaccggtccccacctcttgcaagtgtatttttcccaagaaacataaagctgtcggagacagagagtactggtaccgtctgctttccatcctgcaccacaactatgcctgggtgctggtagaggggttcttccgcagctgcttgtgcgaggagagctagtcactgaagcagctgactgaagacagtgctcagctaataacatgaaacaaacagagaaaatggtggtggccggcacttgacgtcaagagtcctgcggtggaacggctctcagccgaggcatgtgtctgttattcttcataaggacatctcaggacaaagccgatcgtcgacattatgtaaggtgctgttttcagcagacatgtgcatggacgtagtgacatctgtcggtatacattcttgtgtgcaaggaccacggcaaccagtccacagaaaaatgattcgacctcctgtagaatgccagctggagctcgttggtggcattagaaaagaagacacaacccgactttggggaacagtggcattggatccggacgtggctcattttccatggcctcaacactaccgcgagcaaacatgcccagcttcgctcttttcacaacgccataagattcatccttatttatttaaccaaagcgaaaatcacgggacacttccgtcggatcactcctcatttgggggcctgaactgctgcggtcggccaagtgacggtgctagccagagccaccagggaccgctggtctgcaccctacaaggtgtcttgtaatctgactaggggtcgctcccatcgcgaagtgtaactttgctggggctgggaggagaacgttcgacgtggctgtctggtgcgtacagctgaacatgtgttacgcgtttttgatcgagaaaacatacacccccgaatgcacaggatcatttgtgcggaggcagtctaacttcttgtccgtgagacccgaaaccaacgccgatatcggggaaactgcccaagagaaaattgtcgcacgtccgaatagcatgctacaccggttgttcccctccagcgtcgctgtcactgctcggaagaagtgtttgcggtaggcggagaccggggtactttctgaagtacatgtgcccatttcagttcgctgaaggcaagggacacagatacatgagccttatgattaggatacgatgcataaatagacattactatttcgtagaactcacgaagaaacgagggctacagaaccgcgctacgtaccttgcggaacgacgtttgcagtgtatcttcctgtgcagtcaaacgcattaaaaataatcataacaaaagattactagcaactgcacttagattaacgtgtttgagtacgcgtcttgttaaggttcagttcgccagcgaatgagaacaaggttctgttgggtcaagaagctcagctgctgcggctactttactctgccaattcgcgtatgtgtgtgcgaccgcaagtcgtcgtggttcacgctgtacagtcaatttgaataaatcaaactcttgagaaagaactgcgtgttttttaacgtgtgcctaagctaccacagtcaattttgcccccttgactctctagtgctctggcttggaaatcgaaactaacaagcagctcaaccttatgttgctctactcagtcaataccaactgatctagcctcgtgatgcctatttgagtatacagcgtgatcttgactattttaggttgtgttaatccacaagcaacataaaccttacatggtaactcgctatcttatatgttactactggaccggttctgtacttatactcaaccaccactgttaatggcttcagcttccacccaccgagtgaaatccaacacttcctgcaatcataggcagtccattgaggtgttgttgtacagcagtatttctctctgtctcctaagtggagtcatattcggtatcctaggtacacaatcatcttacccatgtgtgtattaggatttaatgttatgcaaggacggatccgagtaccgtgattctctttattgtatacatgttgttcagttagttgtagtcataaaccggttgccaacttacctgtgttctgctaacacaaaaaagcttgaattccatatacaagacgctttgaactccaagctaaaccactagtgtagcccttggcacatgcttcccatagacagcttacaaataatgcaacttggagacgtggtggcgttccacgatggagctagatgctaagagccattaagacgaaaatgtgctcgtggcaattttccaacagaagtacgatgggctttcgagattgatcttggattgttagctggacaattcggggttgtgttcgctcctgcaattggagaagacatgcaggacgacgacacactgatacacagagcctgtcaatgtggcgggcagctcggcgccatttttcaggtttccagggactcgcctcgtcagacgaacatgagaaatcatcccgatccttctagaaagtggtctgagggggacataacgaaccttttagagggtgcctggcgactcgcgccgtgcctcgaaaagtatcatcgacaagctggctgcgcatgcgcggtattcgctgcaaaaatgcgcgcacagggcattctgtggtcatctcgagtacactacggtgttttctcatccgactccttgcgaacaaatacgggcaactctctttttctcgagggttctgccactgatgaccacagcagcgggtcttcatggtcctcctcgacggacagatcgagtgaccgctcattggggaaggcagctgctgatggagtccccatcatcgtcgattcgcctatagtttgtgttctaacatcctcccgactcacgtttcgtgtcgttcgaacatccttgtcgttgcgtgcgtcatacgacggcctcttgccgacaaggacttcggtgccaaacccgaggcttctctacgcgcggtcaacgctaagagctgaccaaacctgctgcgtaaggaggggcacaatcgatgtagtttctccggccaacatcagttgtaacgtgtatgacatgttgcgtggtcagttctcccatgtggagacgtctgatcactaacgccgtcggtggacagccaagcggcaactaggctgttgtcaacctgcgacagctgacatgccacacttccgtcccgcatttacgatcagtcagaagtaacga

SEQ ID NO: 3059 - DNA, 2643 bp, Toxoplasma gondii
  source 1..2643: mol_type = genomic DNA
ccaagaacagccgcgagtgggacattgttgtcacgttcaacgagttgtaagtggaggtaaatgtacacgtaggtgatccaggcaaagaggaaaagccccgtgactatgacaaggggaatcagcgacagccccctgacggcgcggctcgtcgcgtacatcgttttcaccgcaagcagacagacacgctctgcaaaagtgaggtggcaggctcaagctgcagttggtgcccagagaaaccctctggcatggtgcaaaaggcggacgcccgagaggaacgccgcacacagactccccgaaacagagacaagaaaaagaatcaatacggaggaagacgttacagtggggccgacagtacacacgatatgggaggtcgtgaaaaaggatctaaaggggaagcactttacccgcagtgcggcaagaactgaaacagccgcgcgagtcgtgggcacagcacacaccgggaaatgcagaccttcgtattacgttgatcatgaaacgtgcgtcgcaggactctgatccggtaacgaaaggccttcaaagtccgggccagtagtctaagtcgcagaagacactgtctagaacaacgtcataaatgctcctttgattcacgaccaacaaccgaacctccgtttaagcgtccagaaaatccatcgacagtgatatcgcaaaaaaactccagtgacggtttcacctgattcccgttggctcttcgaccgcagagtgctgaacgagccacacgccgacacgcgcggccaagggaaacgactgttagcagaagccttcccggatccaactgttgacgcttactagaaaggtcttttggcaatatggaaacgctgtctatatttctgtggactcttgagcgtctctcgtctgttcacaaaacagggggactcaaaccgcatagccggggggttcgctggaccgccaacagaaggcgaaaatcgttgttcagaaggaaacgagagagcgaaaacgagcgagaaaagcaacgcagatctaaaggtaacaacaaactcctccacacaaattacaaaaactccgtcgcggaagggttttggacttcgacgcgagatgacgagggagctgaacactctcacgagacgtggtgctggtaatggtgcgtcgagaccggagaagcaagcctaattacactggaatgtgtgtgagttcttattcagtggggtacttgggaacgatggacgctggcatcagcaactgataaacctgacacgaactatatttcatgttcccattaacagggtcgcgcgtcgactcagcggcgtgtggttcctaacttcatcacagggaaacggagacctgagacaaaaaacgccgccggaagcgcaccagaaaacccgcagaactggaaacttttcggaagtaccaaaacttgtgatagagacgagtcttgttgagcgaacgctcgatactagcgcctagcgaaaagagaccccaatggcagggccgagtcaagcattccttccattcagcgctttctgtgaaacagtctccagtaaggtcttgaaaatcggttaaaaggacataaatatctgcccctcgtttgcaatttcattctcattcagcaatttagcagatcgccggcatctcggccggccatgtgcctcgcagcttgcacggttcccatggctcagcaagctgacacatctgcgctatgtctctcgtgatttttccccatctgcatttccggtcaattctcaacccttcaaataagtaagtagatggcttccctggaaacactgcaagggcctgtcaacaaaagacaaaagggttcaagggttccgcagagagttccgcaggattcggcaaaagacacgggaaaaaccaagggtgcaaaagctcactatactgaggccggctaatagacgaaactacatggaaatgccaacgcttgcaccaggggaaagagtggcaagcccgtctcgaacatgtttttctcctgtttcgatcagcgatctgtttcaagctataaaaagcacacgtcgctctcagtccttgtgaagggagcgctcctgttcgttccagagaaacgctgcactgcagttcctgtaaacagtgtgtggcgatccgcgaaacggtactgcctgtacattttgaaaactagtgtatctggggttcttggggggaaatcagcctctcataccgttactagagaatctctatgtttaccgtcggtgacggaaatctccgtactagtgaacgtatctactcctgggtcatgccgctactgccacgaaagctggtaaaaccctagtacgaaagatagctatgtattcaaccacaccggtgccttttagagatctcggcttctctgtgcgatacgagagagcgtgccgatgtttcgtgagcgcagaagaacgggaacgtccgccgaagctgcggaaagcgatgcggacctaagtagaacactcagtggggggccggggtggcacgcgtgttggtggcgcgtttgttgcgcatttttgaaaatgctgaagggtgcccgtcaacgcggaggctttttcgtccctctatcgctcattactactctatcatgcattttttgtcacagctcgtgtcctcttcgcggctcctctatcccttgcagacacgtccttctgctctagtgttgacacttccaca

SEQ ID NO: 3060 - DNA, 1995 bp, Toxoplasma gondii
  source 1..1995: mol_type = genomic DNA
gatgttgcgttcagtctcgtcactgtcttgcaatgcgttcgtcaaagtgtgtgagttcgcgacggctggcaactgtccaactccttgctcggattcatcctcttgcaaaccgagtcggggattcgctgaacctggagttcgcagagacgagatgtggagtttctccccgccctgagtcgaagtttcactgcgtatcttctatcgagagatcctgagaaatctggagacacccggccgttcgcgcgaccgtgcggcagatgaaaagtcccggaagactgccgagcttcgcggcgacagacaccaaggaaaagcatgcagaacggctctcacctaggttgacggacgcccatcgcggatgtttggcgccgcagtctgcacacagtttattgcctgctcgactcaagacctcttgaagcgcttccgtgatcttcttctcatcgcctgagtgctccggattcatgcgccatccctggccggccttccccgagccttcctgaggccccgcagcgggcacccccgcggccgaacgcattggataagcagagagggaaaccgcgaaggtggacgaacgcagagagtgagagagagagaaaaacgttggagacaggaaacgaaacgaagaagagaggaggcagagtaagcgaagacgaagaaggagacaggaagaaggggaagcgacgaagaggagaagcagacgcagaaggagaaggaagtgagggtctgaaagaaacagactgagcagaagggatgggggagcaacgagttgcgggaggccagcagagcctgaaaatcgagaagggatggtctctctcggaagggaagaagcggtctgcggagagcaacgaggagacgcaaagaaagtagagatacgaaagagagggaggagaacgtggaaagagaggcaggtgagtcagccgaaagggcagacacgcgagggcgggataaacctgcggcagcgcagcagaaaacgaacgacggaggagagcgacgcgtggaaagatgccaaaagaactcaaaggggctcggggaaaataagagacggaggggaaaaaactggttaacaaatgtttgacatgagtggacgactccctgaaagtttgaaaaattgaccgccacaccctcccgtacggtgtcttgtagagtgggagcgcggaagtcgaattggggtttcctccaacgaaacaaaagtcaaatcttgcaaagaggaaccttcggcagcgagaaagagccacgggaaatccgagagaacgcactcagctgtttcttccaggattcgcgcggttttatcggagcaggtctgcgacccaggataaatgcagacccagagacgacggctgtagtcggtggtaaaaaagcaaatcggaaggggtctcgctctgtgttttgccttttcttttagacagtgtttgactggacagcgtttgcaggagaggtggtgagagcggcagaaggggcgcgatttcgagagtcacttgccgtgtctctgaggagctcgaactggccgacaacccgggcgcgcctcgacgagatcctcccttgactttttcgagcaggagtgctggagcgcgcgttcacaagaacaatgaaaatctcgcgttcgctattgcttttctgcgaaaagcagcgccgggcgcgtcgttgggtccccctgcgaggccgcggcctcgacacgcgcgagtcacgccaaaaagggagggagactcagacagaagagagagcatttgacacccgcggaaggtcctcgaccaaagaagcgtgaacaactcgacgagaaggcaaggaaacaaacgactcacgaaggagaaacacgcagccagaggctgtctgcgtctgcttacaacgcagccacctcccccgtgctggcggcaaccgaggagtcgcccccttgcgaagacggatgacgaaaaaaactcgagtttttttctcgtcgccgcgctcagtgtccggctgcgcttgagaggagactccttcgaattcgacacaaagactctcaca

SEQ ID NO: 3061 - DNA, 2211 bp, Toxoplasma gondii
  source 1..2211: mol_type = genomic DNA
agcgaacagaagtagacgtcgaagcatgagtttcacaagttctgaactttcaatatttgtaagcgactgttttttccatctcccgcgacagatgtttcaagcgcttcccctgttgaagacaaaatcataggttcacatcccgcgagtccgaagtcgagttattcactgaattcaaattcaaaagttctacaaaggcactttaaaaggaggcaatatacctaaacggatcaattaaatacgcttcgtcgagaaccagatgacaaatgtcctccgaaacacgcgcctcctgttcgacttcttgacaaatggtctacctgccgagacactgagggacattctctacgtagtcgtttgcggacaaagtttcgtctgcttgtttacttcagaaagagacgttaaataacaaggtctcgagcctaaacagaaacagtcctctggcgtgctgtgtttgccgtgtctccagcgccgccgtagattacggcaaccaatgctttcagctatctcgagaagccgtccagtcgagtggcggtgtgtacacagcagtcctgcagaacaaggtcggcggtgtctcagaactcgttccagatttatcatgttctaggtactcgagtgtgtctgtagaaaactttgaggagtgctagggtggaagcctccggtcagcgagtgcctcgtggactgctcctcacacatgcgtggttagaggaggagcaacggaccgcctttctcctttcaagttctgccccgtcaacatgcatagagatttccctttcgcatccccactctttgaattctttggcattctcatccgcttctctgtcggttcccagaaagcaagaaacgcgtagctgaacaaagaaaccgaggttctggagcaactccagtggaggcacgaaaacctgagtgtggaggagattccgcctctcttgaaggaatgcggtttactggctctagcacaaagcgtccttcgaataaacgaagaatgcgggttgcaaatcagcgggattggagcgctctggaaaaaacaaccgggcggaaggaactcagaaaagagaatgcctccctcgtctaggtgtgaaaggcgtgtgtgcgagatttatcaacgttaaaaaacacatctgtggcttcgccggagcgcctttcctttttctctttgttgaaacaacgcaggactctcaatcgaactcgaacttctgggttttttgacagggaagccgcgaacagttgttgcacgtacgtttgaaatttccgatgcatgcaattcagcagtgtgtttttcccgtcagctcgaagggaagcaggtccgaccagagagcagtattttttctaacttctgcgattattcgtgtccagaagcactcggggttcttcacgtgctttttcatctatgtctcagttttccctgtttcgccccgggcccgcgtgttcccggctcaagctctgaaaatcgctgtgcgactgttgcttgtcatccgcagattcaagagttgtcggactgttcaccgcgttttcctccttcgctttcttccagttcttctcgagtcctcctcccatggttctatcgcctcttcctcttcctttttgccggacttctccacctctccttccctctatatttctctctgggtccacatttgccacacagaggcagcgacctgtttcccttcccagcttatcttgttcacttttctccgtctcgtgaggccagttctgaactcttcttcgcgctgcctctgggacctcctgcctcggctgctctgcagtcgcgtcgagtcgccgctggcagccaccctgacagcttctgttacatcagcagttcacggggctcaacagtcccgcgagttgtagcatcataagtagctcgacgtcgcctctgtgcagtggtccgcgatccggaactgcacaccgtttcttttgttttccacggtctccgctgcctcccccctgcgagagagaagagagaatcttgtctctggccgcacgtagacgagcctcaggcgcagaagaccgctccggctctcgggcggtggtactagatgtcagttgtgatacgcaggaactcagcggagaatctttgttcgggaactgagggtgagtctgacgggatcccaggcagaccgcgcgcgtttgctggaaccgaggaagctacggcttgtcagctcggagtccgagtgttcccttgagcgtctcttcgttccgcagaaacccacaaaa

SEQ ID NO: 3062 - DNA, 1692 bp, Toxoplasma gondii
  source 1..1692: mol_type = genomic DNA
gccaaaacgcattcatcgttcaaaaatcttgacgcatccatccaaaattcttcatgcatgtggtatacacggcgtccgtggacgttttttaacactgcctaacagtggatttccgccccattatattttcgtcaacgggactttttcaatgccgccacgcgtgggggtgagaatgtgcagcatgcgtttcaagtatgatgtaatgtgtacctttggtcagacgtctagtccgccgtatggcaccctcctcttgagcgatatatgaggctcctcaaatcgttctaacgcagcccctcactcaggtgctgactcatgacgttttgcaagctatgcagggccatccttcattggtcatacctgacccccaaagtgccgccgttcttgcgtcgtctcgtgcttccaagaattgcaacctccgacaaagtgagcaactcacctctcaaggccgccagcagtcgaagaatctgcgctgttgaaaatgggacggtcatcagcctcttctttgatctggcttacgagatgacggggcagcttcaaaagcaggtcctcaagagccatttcgactggcaaggaaagccacaagattgctcctggactgtgctggcggtttcactccaccgagtagcaggggctcaaacctcgcaagtcgtccacaagcgggtcagacattcaaagccgagccaagggagggtcgctcaaacagagctcagtccccgtacactgcatcgagaacagttgtcccccactcacattcagatcacacactttcttcggaatggaactccatcttacagacagagtcttcaaactgtcgccggagccgcagattgccacaaaatcgttgtcaacactggcagtcgctgtgtgacgcaacctggtgcttttgaaagtgataatgagcagcaggatcactcgctgctcatttcagatcccttgcgacaagttacaatgatcacgatagcatccagctggacttggggaaacatccgtggttgggtaggcttcaaaatcacgaggtgtgcaaactgccgcaggtaaaccttccacttggatgggacggagcactccgttgacgaccatccactgtagcgtaattgcgttttctgttctcacaagttccctgcggcatacagcccccgctcatcgaaacgtagtgtggcgaatgcttgtggttatgcgcccagcctaaaattcctggctggcggctactcggcggagtatttagcgcgctgtgacacagtcgacggcagccggcaacaccagctaccctaactcagagaaatgtcaattgcaggtatgtggtccgcagaattcattctcaacaggcttactaaaacagtaaatgcacaaaagaacaacatctaataccccgagaaggcgtcacaagtccatgcatgtgggcaaaagcggggtttgtgcgctgcaagcgacactctgacttcataccgggaaatttgtatccccctctagcacatgagatgcaggaaaccgtcaccaggagacataaggggttgtcggttgtatatacataacataatttgtaataaaaaaaaacgcggtgtgaggagctcctccacctgccctgttcagccggggtgacactctgtgatccctgctctgcgccacagcggacacttttccctgctctgtttccagcctgaggcgttgcgcgtctcatcatcacccgagaga

SEQ ID NO: 3063 - DNA, 2122 bp, Toxoplasma gondii
  source 1..2122: mol_type = genomic DNA
caacatcacttggcgcctggaaacgcgcgacttctgcaggaactcttcgcagaacagatggaagcgaactgtgtgtgtgctgaacagagagatggtgggcatctcgttttctctgttggttcgagcgagcgttcagagacttgactgcaggtttccaaagtcacgacctttcggctgaaaggagggcgcaatccgcagacaatttcctgccgggagaacgggagtcgattccttcagccatgacatctgtacagctgacaggcaaacgctggattcgaaattttcgccgaagacaagctctgcactgatgcactgcagttcgcaattggagaggagtgtttaaacccaccgcccttgtacacaccactcgttgtgacgtatagaatgatcctctgaatctgttgacggtatgataacataactgtcgtaaaaaactgaggcgaagccttccccaatcgtgactcggagatctcctgtgaggggggaagttcacagaaatcgtgaagacgctccgttacagccgagaaaacggtttgcgagagtcttgtgcctcaaccagttagacatcagaaagtggagagcgagaccgatcaaacctcttgagacaacttacggagtacagcgagaaatcaaaacagttatggtgaacgaaacagagattctttcaagtaaacgtcggataactgaaaagaatccaagctccagatttataacgtctcagctagtcgactcagtaccgtggagacctgttgtcctcagtctcgatcctcggttgaaaaacgagcagctgaaatctcgaagaatcagaaactccaccttcttgctacgcgctgcaaattgcttttctaagtgtctacaggaaagcgtttcgttgctctgcggaggggggagttgcgccgacggagcgagggtatattattccatttgaatttctttcagtctctctcggcgtcggagaatcgcctttaaacaggagctcgtgaacggtcgcttcttgcaactgaaaaaaagataattttcttctaaacttgaacactgcaaaagaagcgccagtggagggaccgcggacttatctatttgtaccgcggaactcgacagctctgttgaacggtgttttaaacgacaagtggaacagtttccagtgaatttaccctacaatcactctgggagcttcatcgagagagagagaattggttcccgaagcgatagatctgtgctctctgaaatgttcaacgaggacgcttcaccgtcacaattgtctcgatctctccttttcgctcgaaaggcaactgggggctcacctcccgccgattttttagcctgtcgacgactcgacgacctttgagtctttgagaaattcgacattttagatcgacgtacaactttctggaaacccagatgttctctagatgcaggttccgacgagaagagtggggtgaagacaagccgactgcatgtctcttcttcctcgtatttctgatctctgcgcttctcagctcgacctgcttttcactccaattcgagaaaaacaacaagcagacagatacacagacatagagaaacacagagagacagagacagagagagagagagtgagagcaaggaaacaagaccgctgtttttcgtgaggtctctctctcggcaagccactgcatgcaatcgcgagacatccgcaccgcttgctcgccggttgagtaagcaatacgtcttttctctcgaacctctgtctgcgtctgtgttttcctttcccagtaccttttctttctttcgaaccttgtcgtccaacgcgttctgtctgctccttctttacaactgcaaaggattgcttttctgcgtcgtgtctcccgtctcggtctcccgctcttcttcgaggcgggtctgttcacctctcatcgactgtgttttctctctctctctctctgcgtttcctctctctcctcgcggctctgatctccctttatttcttgttgatccttcgtctcttctccgtacctccaccgggaactcggagctccgtgaggacgccgctgccgttttctttgttttcttttctctgtctcttggcgtcctttttctgcgccttttcgttccttgccatggccctccacgaccgcatttgaaa

SEQ ID NO: 3064 - DNA, 3214 bp, Toxoplasma gondii
  source 1..3214: mol_type = genomic DNA
tgccctagttttcgttccgaagctacatggcttccgcgctttcctcgctgctcactggtctgctgtccttttttttcttgttgtttgcttgttcttctgctgtgcatcatgcacctgttgtggggcccttggcttgacttactttgtactccccctcggaatcaacgaccttgacgacggcagcaacgcacacattcctcatggaggtgataatacaactacggaaaggaatcagaaccatgacaacagcccgcggtcgcgccacggaagcttgccctgctcgtgcagagcttgtgctcctcttggacagacccagtcgccggatggtatctcgcgacctaacgaagctgtccccctaggcggctgtgaacttgttcctcgccaagttacaaattctgtacaggatggcggcagagagcctcgtttgatggacgcatctaaagacctacctgctaacgatggaaaaaaccacccgtgcagcgaccaagaacaacatcgatttgctcccgccgtaaatcaggaagggactgcacgtgaagcgcgcgtggattttgagttgttgaaacaagaaaggcagatggaccacaaggaaggagagtcttcttccttagttgagaacgaactggatgcgactctccctccctctcttgctggagaagcgaaagcgagaggcctcgaactcagaaaaagaaggccttcagcgagagatgactgagttttggagtattggtacacagcgcttctttgctgtgagcgccacgttgaaaactcgtggcagttgacgatttttgtgcacatctgccgatcctaccagattctaccgctctcctgtgtatacccgtgatggactgaagagtgggccgtcggcaaaggagaacttgcagttgcggccaaccagtagagcgtgaagcatatggtacgactgtatgcgagtggctaccgcgtatttgagcgcccaatggggaaatgcgtataagaatgtggaaagcgaaagttacggggggctactaagttttacggtgttagaatacgcttgagcactgcagcgttcaaattgcattgtattttacgcgttcttcacataagacgcaacaggtagagcagaattccgtattcagatgatgaattcctcggggtggactaatcgctgtgcggatatgtcttcgctcacgacatcttagctctagagataataaggcagcctttccccccttaaaaaacagagaagaggttcaattgatttcgacattatttctcaactatcatgcaaaatatgaaaagagaaggtagtaacttcgggtagcgtctacgaaaaaaaaccgccatccaaagtgtcacagtgcccatgtaggatctgtttgaaacagtttccaatatagtggaaatattgccaggagctcgttcgccgtttgcgatgcactaagagaacccgcaagaagctccaacaaatgttttttaccatcgcctaccaaacctgatacccagatttcggagtggtcctatgcagtggagactactgtactacgctgtaattctacgcgcacatgctttcactggtagatgatcaggtctatttacgatttgacgtttctgggttagaagttttaattgactttgaatgtagcataccaaaaagctagagccccccaggacgccggcacaatgcgttctacgtcaaggactcagattgagataacgagcatacaggtgaactttcctactagacaataaaatgatttgcagatatggtcacacagcgttttcttgccagcttcaaaatatcaaccaccttgtgcaagacaaaatcgaattgtaccggtagttttttctgagtcagcccttccgtcggaggtgaaacagaaaataaaactcttatcaaaaagaaaaccagtgcatgaaagttcaagtatcaattagtgtggtcaaatcagaaatgctgcaccacaggactctctgtatcctgagagattctgttgttcatcaaagggccgaaacgatcttagtcggccgtcacctacgttttgggtcgtgactagtgaggaagcaatgtatctgaagcacgcgagacagcgcatgcagcgtaatagtcttcatgagctaccagctacgcaaatttctttccaggacgtgcctgacagataattttctcccctgcttcgaagtaggtatgctattgtgcgtaaccgtgacagttgacactggatcctgttgtgtgtgtgtgtgtgtgtgcttctcaagacaacgctttactctctagatccgccacggtgtgttacggatcgaaacctcccattcagatattactggaaatacctcgcgatttgtttttgtgctggtagaaggtttggtagtatgacgttcgtccagctgcgacagcttcagcattctttacagagacgcctcacataggcacgcgcgtgatttctctcgtcgatgagatatacaacgtcgctggaaggatacctctgctcattgcttcctctgggtgacagtcgaaacgcattatggattcgcttgcccattcttcaccagcggtgtgtgctctcggcatctcgagcttgttcacaccgcacaccgagtcacatcattacaatctgttgggccgtctgcgtgtcaacaacagacagcttgacatgggcgagagctctgtattggacgcgtctccgcgtggctaccgggtccggcaggtgagccgtaaaaagagacgcaggcttcttagcgctgtggtacttccgttttagcgcaaaaggctgaagctttcctgtcgttctgcttcgcagaatttttacgtaggttaaaaatgagtgtatatggttgtctcgtggtttgctagtagtcctgtcgcccttgtgccgaacgtcttggtggtggctgcggcttgacgagggcgttccgtgaagcgttcctgtccactggaaaacagtacgttttgcgttgcttaatagctaatagttgcgaaggattttgtggatcatcgttcgtatgctcgcgctgctggtgttgacgcccatgtcaacgtgaactagagttggccgggggtatccgttagttacttactctttccgtgcataggtggtttgtgtgttcgtcttttctcatttgagtatcgtaactattttacatcatcgagacaagcggaaccatgccgtgtggtcacacaagccgtgtagggactaccaagggtttgcactagttcacgttaagttttcaacca

SEQ ID NO: 3065 - DNA, 1642 bp, Toxoplasma gondii
  source 1..1642: mol_type = genomic DNA
aaacataagagttctacaaacttacggcagactcagcctgctggagatatttgccgcatctagcgattccccggcgtctttccgcgcctgctgcccacgaaaatagacagtaaataagaaaacatgcaccgctcgtgatgaagtgaaacaccatctttcgcaagaacgccacaacagtctttcaccgtgtaattctggagaagctcccatgtagttgttccttctctcggtacaaatctcgaacttcaatgggaattctagtgcggtggaaccagaaaggtgtaatcaagtgctgcaggtgttacgtcacgcttttgccagaacttcagcttatcgacatatcgtcatttacatacttctgtcctcggttcgaagcgttgcacagccggacttgaggagcgcgtatgagttgaggaactcttgctcgtagtccagaagcctgtgatccatcgtgtataacctgaaacattaaacaaacttgcagcctagtgaaaccgcacattcgccgttcccagctgtagctgaagttcttgccagaaacggtaagtcgagagttgcccgcaacgcgagtgtggcgaatcgcggaaggtgatgttgctcttgagctttccctgcaacaaactacctatctttaccatccctgttagtattgaaatatatccacattggcgtctttgtggctagcgaatacgctgcacgcgtcctccagtttcccccttccatcgaaacacttttgcagagagacactgtaatgagaaaacttcttcaagtgcttagcatgcgaaacatgatgggtaagcgcgttccatactctacagacgaaaccgacaggctatgcgccagtcatgattcttgtcgttgcgacttgggggtatctgttacggatgcgcagaaacgtgtgtatgcaactggcacacggcaaaatttcgctgtgttcaccgcggccacaggcgtacacctccccgagaccaggcggaaccgaaagaataccaacaacgaatttaactcggtcccgacattggggaaacacgggagtgtataccagtcaccggttattcgcgtaagccgtaacttgcgaatgacgacggaggaactcgtcgtccatggcttgtttgaaaattcgtcaaagcaatagctagcatgcaagcgggaaagggtgtgccgcaacaggagcaaggtggtacctgcatcaagacacattcgagaaaactgcatgcagccacgctgaggcgatcgggcttcgagacttccaaatgtcgctggctttcagcagtttccttatacaaaatggcgtagtgtccgacaaccaaatcagtgctcgtcccttttttcccactgaccgttaggccgggcgtgtagcgaagtcgttattatggttccccgtgcaccagatgatcctttgtaaaaatgcaactctggtatggtatctgtgcctctttgtgaacccaccagccattatgctttgtccatgagctttctgtcttttgtgcttccgtctgtgggtacgagtgcgtgtgcttcactacgcgactgctcgatgaagcttgctgctagagttcatggcaaacacaggaacgccggtagtctgcatgcttgaaccgtttctttttttcaaaatgaggacgccgcatcagtgaaagaa

SEQ ID NO: 3066 - DNA, 1585 bp, Toxoplasma gondii
  source 1..1585: mol_type = genomic DNA
ggcaagaccgtcgttcaacgtgcatgcgtatatgcgattgtaagaggaacggatctggagtctgtaaagacttatatggtgacgttatacgtgtaaagctttcagttacgtgtacatcttgtttagggtgggttatcaggatataaagcagacagcagttggtgggaaagtagtgtcgtcaaacgtcgtcccgttgcgaggaggaagttcttgtttcagggcttccaccgtagtcagcggtatctgagagatcgaacagcttgaagcaggttatgatttatggatgccactgacaagaggagctctgatgaaaaacagccgccgctctccagcgcacacccacttgtctgcattggacgcgttatgcacgggccagtgggggaccatcatgcagtgtctgctccaattgatagacagctagaacaattacactctcgatttttcagtgccaagaacaggtgtcaggactatggaaaccgtccaaggttccacagaggcctaagaggacgagatatgctttgttaataaatgcctgccgatgatggaccggataagcaccacttccgctagcatgctttctaggaaccacttcattactcacagattaacactaagcacacttcagcaatatcggaaagtgagccaaagcgcgtagaaagccagcgcccgttctacacagtcattcggaaaagcctgtatttgctcttagcttccagaaagaaacgtcgggagccatttcgccactgccgataatggggccattgtttgaatggagccatcgtttgacaaggaaacaatcttttcacctcagctttcgtcgtgattcgattcgggagcatattctcgcaattggtgttgtggaatttccatactagtggccatgggagtattttgtctcgcttcgtaagtgtattgaacctcggtcactgttggcgcatccgcgttcagttcacagattcttgtcgcactattgatctaaagctctcgcatttggtccacaagagaatcacaaaataggagctccctccctcagcaaaagtgatgtcacatcacgatttcccgtatagattctgcacaaactgccacggtaaaccgtttatagctcctgacctaacaatttgcacgcagcgaatcattcggctggaaaggagatggccatgtcagtaaagctgtgtgtactaaaggtccaacaacaggtgcacttcgatttccttccttcaatttcacaacccgaagccgtggatgacaccattggaaggaacccaagaccctgacatcgcgtgtgtctgtgtgcggcttaacccatgtcaccgtggttccttttttacacgccttgctgtggaagacccggcccttgccggcccgtctgtatccttgaagtgactaactcaaaacagatttttgttgaattccaacacaaaataccacagacttggccgcacgccccggacacggtacgcacgtagtttttccaacttgatgttcatcaagcagttgaccgtagtttgtcaaaataaagtcgcctcccgaaaacgttgactatttcctcgcttacacttgtgtgagtaccacgttcgctttttca

SEQ ID NO: 3067 - DNA, 2183 bp, Toxoplasma gondii
  source 1..2183: mol_type = genomic DNA
agtgaagaaccagggagtaactccacaagattcaacatgcaacagcgaccgacaagtatagcgccccaagaaacaggaacacagccataggaatagttccgtataagagtggagggaaatacaagccgacacatttgcctcgagaagagacatggcagaaaaaaggacctgtcgaaacgaacacacaccacaggataacacacaacgccgaacagcagacgcgggcttcaggcagaccaccgcagcttagcgacgaagcacatgacacaacaataggtatatgtacatacccgctagtacagagagcggaacacgactttctagctgtttgtcgctttgttgtctttgagaaaacgcaaacgtacctggccgacgttgatctggactgcgccgtgctccttggcagggatgagacgacccgtcgcagagcacttgcgcgggatgtacagatccacgattcttccttcgtcgttctgcattttgtgcagggaagcggaagtgcgctgcacagaaaatgccaggaacaggcgagaagccaacagaacatgcaaggacggaagggcaaccgtgtcagcaacgagttcggcacagcacagggaaacacggattaagcaagacgtcagcacagagaacagggaaagttcgccggcacaaacggaccacaagaaatggggagagatctactgaaacagagagaaaaacggggccccaaaaggggcaaagccttcgcccgcgtgttgctctgacagcaaattacggggctttgaaaagacaagcaggcaaagttgagtccggggaattcagcagaaaaagtctccacagagtcatttcagcgcagaaacgccgaagacatcggagtgtagcataagattcttctgtttcatcctggtccccgcgtcgcgagccacacaaagtccacttcgcacgaactccggtgctgccacaagcgcaaatgcgcactcgataacacccgacacgttcaggtgtacatacacccggattcaagacttgcgaagactaccgtctctctcgcagtagagttttggggcttctctgttgggaccccaagctcccgcggcagtcaaggaagtgggcggcccgcatttcagtgaacggccgacagctaaaacgcgagagacggagaaaaatagacacgaggacattcgagaagacaacccctcgtttacccgagaaaccgtccctctatttccgattcttcacggcacgacgcattgtcctccgcttctgccccgcgcctgtgtgggggacgattttctcgtttcctggccgtctcccccttctcttctcgcgaaagaagactcctagcgggatcggcagatttccgcttaccagcagagagcaggggaaagaagacaggacagcaaaatagacgaagaatggttttcagtgcttcagtctcgccttcgcatttctctccacacgctgtcgcagccgacgagcacctccctcttttcctgcccaggagtcccagcacctgtcgccgcctcgacgaggcgatcggcctgacccaatataagccgacgagctccgcgcatgcatcgagcttccgcccaggtcaccgcaattttcccagttgcttgtctcgcgctggagggtaaaagacagccacgaggaataaggaagcgaggaagggagaacacaccagctggtatgcagcaatcgatgtccagagtgtccagtcctctgcagtgttctggcaggaggctccagcaaaaagcatgcgcctcgcgaaaggtgaaacagccaaagcgctcagatcacgataaatcgaaccgacaaatcgcagtccaaccagctctctctggggtgtctttacactccaattatacaccgctatagataccactgttttcctgtcgtttcgagtcggattgttcgtcccttgtttctcagccgtggaggctcgtctgggtttcttttatcgtcgcgaccaagggatttccatgcttcgagtgtcttacggaggcgcttcacagctgtcggttgttgcccccagttctgctgctagaaaatcatcgacaagaaaaggcacacaggagttagctttcgatttccctccctcgttgctctcttcagttaacaaactgaggttttcgatctctcgtttttcgcgccttgtgtccacttcctctttgggttggtgtctcctcccaagggtccga

SEQ ID NO: 3068 - DNA, 3224 bp, Toxoplasma gondii
  source 1..3224: mol_type = genomic DNA
ggacagaagcttgtgtcgtcctctgttctggataccgttttcttttcgcgaaatctggcgcagctggacgagtaaggcattcccccttgttgttaccaggttgctgcgtagacgcgctgtggcaggggaacctattggcaccagcagctgtttgtgtgcagcagccagcggaacatttattgactggttttacttgtcattcgttattttcagcgcaagaattgcgaaagtacatcacgaaggagcaagaaccaataccgaactgtttggtgttcaactccgagacgtccactgcagcagtggccagtctgcccccaccaggtgtttccgtgtctgctctgaaaacggcagtctaacttcttttctgaaacgcaactgattcggtgtttaccttacattgtttcacttgtcgggcgaaactgttgaggaaacgacagtacgaaccacgactgcttcgtgcaattctcagtttcaggaccggacaacctctccgtggtactagagcaacacttggcgacaaaaccgaacatttcaagagtcccgcagctgccacgacaagaacggcacaaacggagttcgatcgtgtatttctgcttcagtacttacgctcacgtagaggtgtgttcttccccaactcgggtcgcacccagctctgtctggccgttcatcctgaacggtgtagaaatcccaaactcgtgacgtcatttccttgcctcgtcgctggtggagtcaggatgttccacattcatcaaacgattgaccccgcttttagcaaaccacagggaacccgctatcggacacggtcgtagaaccattgaggtagcactgatgctagactccccgtttgcaacttcagtgggatttcgagggttgcggtttggctgaaagcgtcaaagggacaccaagtagaacgtggctgagtttggtgtcgcgatattcacgagttcgcattcaatagagaccccgagcccctctgcggctgtcgaaaccttcgttagttgttcatctgtctggacgctgaaatcagttgttactgggcgacgggcagacagcgcacactcccgggtcaacaaacactcgggtgctttggcataggcgtagccacgccttatctcttgtggtcctgcacgggcatggcaataattctccggttagtaaactttttcgtggagcgtgtgctgcttggtcgggagtatctgcctactcaaaggttgcggattcacgctcgatggatcttcccacgagcgaacaacagctggaggctatagaagcgaacgcagtcgttcgaatggtttcaaagtaacagatttcacagcgaattaatgggtcaggtgaaacaattgcgagacgagtagcaattgtttcgactcagaagcgtggggcgctactggccagtccattccaactctttgagatgtcgcgtttattacacgagactgtagcctattgaaacacgcacggttctggttctggttttgcagtcgctgctgtgtgaagcaatttgtggttttacggacctgacactagggtacatcctcagcacctgggcaacctcccggaccccacagggccatcgctcgggggctgtgcctactcaatagtaggtgtcccagcactttggaaacgcacacaaattctgcggttttcttcctagttcgaaatatggctaacactgacgcggtttgtccccaggcgtggaatgaggaagaaacacacgcttcaatcggaaacgggaatctggcagacgtaaatcaagacgaaagtgtactgcccctcagtgaaagcagcccctcggaaaacggggtcaccaacggtgatgacgtggggttgtctcctggcgaatgtggtggaaacgcgagggaaggagaaagtgtgccctgtaactctggcgaagagcatcgttcttccgtcctacctgctcggggcatagatcccaaaccggcgaatggtggtgggacagaagaaccctttacttcacaagcatttgaagtttcctgtgacaaccagcagactgtcgatccgcgtgcagggcgagaccctgagttagcgcctcgaccacagttgacggacgttgcagacgctgtctgttcatctcccagacgaggacacaggcaggtgtcagagagtgtctccaaagtctcgccattgggtggcgccttgcatggtaatgaaaatgatgaagaacgcagtctggaacaaaggtttgaggaggctctgccctctttcactcaacctccatcgtcacatttcagcatggaaaacgctgacgattcagcaggaggcggtttttcaaccgtcacagagtcgccggatcttccacacagaccgtacgaagtcgaggaaaatcctgtagatgcctttgaagattactctgagcttctagttgaacaaggttgtaagaaccaacacaggacacgtgtcgtgctatcaaagtctgtccgctcttcgctagtggactcaatgcactggtcccggcacgagcggctccttacgcaattccagaaagagttggaaagcgtcggcctcaacacgttcgaagccactcgacatcgccaagctttccctcgcttcttgaaagcttgggctctgaaatggaagccaggtgatgagcttttccctttctggttattcatgaatgctgcaaaactcccaaccgcaattcgagtgaacgggagagactacagatactcggaaaaactctttcgctttcgagatgatctcctcaaagggtttattcaagcacaagagacaaatcatctagtcatctgcagaacgctccatcactcaacgagtcaaacacctgcgcagccattgccaactcgggctatgcaggcaagtggttgcgacgagagcacgtgacgaaaaactttacacctgattatcccacacaagcccacgctcagaagtgtttacgcatttaaatagactacttgttctatggtgatgcgcagttccaacgaatatctttaatatcttccaccgctgtatcacctctcctctccccacaattgacctcacgttaatgcttttggctcgtttacgcgaaccgccacgtagacagcagaagctgggaagacgagtgtttcgtacaaggaggaagagaatcctgagaaacgtcaaacaaatggcgaaaacgaactacttatgtcaatttctagtcgggaattgaatgacccggcgccagttattgaacgcctttctacatttgattggcccttctgtca

SEQ ID NO: 3069 - DNA, 2819 bp, Toxoplasma gondii
  source 1..2819: mol_type = genomic DNA
gcatgtctcggagagatgcctgcctgctatccaccatccgtgagcccacggtgtgcgccttaccagggagtaggttttcaggtggaggtgccgatacgtgaagcatgcaggcttgctggtttccgtcattgcgagtgtgcagttccacttcccttctgctctttcttttgtggatccctttctcgtttgacttttcttcccgatagcctcgtttgcccctgagtcctcaaacggcatgcatcgaagcttcgtcgctcctcttctctccctttccttctttgagttagaaaggcggcaacggttgctcgacaggattgtgctgacgtcccaaatgtatcgaaatatattcataactaggcatataggtgacccggtcaccacggacacatccgcagtcgccgagcgtattccacgggcaagtatttatatgtgaatatttaagcctcaccgtttacgcgctgtacgagaggagacctgcctcaccttggcgtatgaatgcttgcattccttaacgatagacgaacagatgttttcagcaagatatccatttgccacgcgactttctaccttttctatcctctgcctccatttgtttcgtccttctaggccgtaagacccgacatttcgatgcatatttacactctgctttcagacacaacaggttgcagcggcgaggaagattggagcttggaaacggatgtgtacagcgtgcctcaatctccaaatcacaatgacactttctaggacacactactttacagaaactctatgctgaacagtcttagccggtccttcgatttgatctcttcccagatgcgctgttctggattaaagaaagtagcactggcgacccgccgtctgcatcttggtgccggcaggagatcgaggagttcttcgaatcagttgtcatcatgcgctctatgcaagatttcctgcttttgcttccgctgcgcagttctcgcacatcgcgttgttgaggcgttcctttgcttgctgtcggccttctggctttacacttcaggaagtacgtcccccccccctcctgaggtgacttgcgttagggcatcgtttcagttgcttgctttgacctgtatgtcctgccgtggttctctgggggcgcctgcacgcgcagcttcttcgacggactgttctgcaccctcaatgttttttggggcatgcattactctctcactggtggcacgctggaggcaatccacgtgatcgctgaccgtgtgcgcttctctccagttagtgagtaccctcaacttctgtttgtctttgcaaagacgacgcaacacattgcttagaggtcttcgaagcgtctccagtcgccgacttctttgtgctttcggcactcacacacactatacgatcggagaacttacacttttgtcagaccctcgaatctactctcctgttcgctttatccgtacacagacactcctcaaggagcgactacctacgtgtgcatccaacaacatttctgagacacccgtcgaccacgtctgcttgtggcggcatttttgatcccgtcatcgaactatacacatatcttcgttttcaactgcttcggaagcacaagacggtggtcatttactcaaagggaggaaaggctagacggggatgaaatgtgcaagctgacgcatctgcactttctgttttttccgccggtgtggcgaccctgacacaaactgaccttgtgaatatgttgtggtccgtcgcctctccttccttccctggcgcagaaagtacggccgccgcatcgcaatcttctgaccatttccgcatatttcagcttcacacgcctgcaatcgcataaatctatgcacttattctctgggatgattacaatttatctggagagctatcttttctaggtcagtaatgcgtagttggagtgttacttgttctcaagagccgtgtctatacgaatgtggcagtgttaacgtttcgtcacgaactccgtacataataatcaccctcttgagctctctcgccaccgcgccatctgtcctgcacagtggaggcatgattctatcttcttgctctctcctacgtcatacacatgcgtttctgtgatacagagtatccggaacactgcgagtgttccacacatgcgttcattcaaaggtgtactgccccgaaggtcttttcgtcgttttgttcctatttgtcctgacatctctcccaccattcccacgttcggaagctgcgtttttcttgttcgtcttttttgaagtcttggattttcattgcagaggtgcttcccttcgtttgtctttgcgctcgctttctgtatccttcttgttaccttccccttgtactcgtcctttccgtcgcttctgcgttgccttggcctctctcggcaggcgcgtagcttggtgccagcgagaagtgaacgagcaggggaaaccgaagggcctcgtttggcttgttctttgcggtttcagggcaacgtaagaaactcgccttcagaaacagtgtttgggtttacccgtatggagctcgcaaaacaatcaagacatcaggactcgacgtggagacgcaggcagctctgggttttgcttcggcgtccttaggttgttgtgtgtaactgtacacaagactgagatctatttgtccatatgaacgacaatggattgggtgcgggtccggtttcgaattcgtttcggtggcagagagcgacacacgggaatgaaacgagtttgtacgcgaacctacaggaggaagtagggcctagatatcctacgtccaccacagtccccgaccatctgaattcgtgggctcagagacacactccatatgatacaggagacata

SEQ ID NO: 3070 - DNA, 2002 bp, Toxoplasma gondii
  source 1..2002: mol_type = genomic DNA
aaaaacgaatttgtatggtccctcctttgttgacagcttgttactctcacgatgggtttcaggggtatcccttctgtcgatgcttgtggaaacaacgctgagcaacagtgaggtcactgcctatgcatggagccaatgtgtactcaagattatgttttttcaacgaattcagtgccctcgacgccatcggccatgggttctcggtttttggcttggtggatatacagtcaggctagcaagtcataattgagaagatgtggatgttgaagcgcaacaaggcatagttggttttaggctcaccgttggacaaaatacgaatctcaaccccttctgtcgactactcggtcgcggttattctctgttgtccacaaaatatgagacagaatatcgacacgaccgtgccggttcattgaactctacagagctgaagttctttgtctgcagtggtgctgatgtcgccatgtcgctttcagaaagtactttagttagtatcccgtaaatgttctctacttccccaatacatagttacaccttcaaaaagggcaggcgagggtccactgcgcacccggtgtatgtagtacctcagtcactgcttctatggcggcagtaaaggaagaagttgattcctgctttcagtaagcacggcattggtaatgcaattccaaactgaccgtcgctattgcacatccggtaaagtttggttccatcgtaccctgaatggaagggcgacaatatcgataccagctaagacccccactggagtcacacccggtcgaacgtccgtcgtgttttgtgtcgtaaggtggtaagccatagacaaattctaccgtataccaagggagattccgatgccatggtaaacaagagaagcaggaagtctggccctccactgttgtggaggtgatgttcaggcagttagctcacctgaaattctttccgttgacgtcgcctcactcagcaccgttttcgtgtcctgattaccacattttctttttgtaaacgaagcgaccatcgatactgcattttttgtgccccctgcctccgagcatctctactgtagaaagtaaactatacctgctacacgagcttttgttgcaatggttattcaaagatccttagcatccgcttgcccctcttcgtctgtcaagcttaaactgtcgttccgtcagattaccctcgtgaaggcaacgtgatcaaacacggatctacacccctgttgcgaatctcggcagtgggagcgtgtgtgtgtgtgcgtgtgtgaagggtacaccgccaccttgatttactagtgaggcgtttgcacctcgttcgtgacacgtgtggtcgcacctgtttcggggtaagcctgtttagctgccttcgtattgtaaaaagggggttcggagcgaatcacctgatgtttgtctcaaaacctcgtggtacaccgtacttgtttattccttctttcttctccacctccaactgcactcccgttcttctctctacaaccgcgaacgaagtgtgcacgctttgcaaggagctagcttagctgcatcatcactggctgatgatggtgactctccagtcacctggtgcgggaggtactgcccggagcatgcgtccggttccagaaccagcgccggccggtgacaagcgtcgggctgaggcgtacaaataaccagaacttcttgcaacatgctctgcaggggagtgaaactgcggacagggcgtgacgcgatatctgtaccggacgtggtcgatgccggcagagttttgtgcagcgccttccgaaaagggcacagaagacaatctggtggatacaaggagaacgttgtagcgtattccagaaattatactcgtgtgtgtggaacttctgagtaatgaagagacctgaatgtttaacttaaagtcgtgaggagttaaacggcgtcgtgccaaaagttcaggcgtgtcggtggcttttcgtagcaacatacttacgactttctttgcgctgctcggcattcgtacttcacttccacca

SEQ ID NO: 3071 - DNA, 1884 bp, Toxoplasma gondii
  source 1..1884: mol_type = genomic DNA
tccaaaattcacctacactgagcacaaattcgttgaaccattccggcaatgtcaccggttccttgggtcccgcgcgctcgagcaactgaagtctgtactccagtggaagacgaccccgcggcgattcacactcgccccacgttatcaaaacagtcccgtaattcatattatctctgtccaggagactacattttccggttcctgcgctaaactgacaatcgaagggagaagatactgtagcggcctaacgctaacagtgagagggctgtgtgttggtgtacagttgctcatcgagttgtgagcactgatctgcattctgaatatcaagtcccttgactcaccaacgcttggaatttgtactgtgaaaatcttcaaccttagtcgttagtctgtccttcacagtaaggatatgccaaagcccatatcacccactcacgccatcgactcctgggctgatgtttggcggcacccatcgccagcttcgaaaacccttgatgttcaccagcagcgcttcagatgtatcctcgaacaccgattggccaaaaagaagggctcattaaaaacgaaaaaatcatttatatatgcaaggcgtccacctaccagtgatggcattcgttatggatagcatcatgagcgtagttcacctgatagcccaccggacagtggacttgtgtaaggtcatcgatgacggcaggcaagaaatgaggtgacgaccttgctaaactttttcgtcagctgagcttctagcgacaagaggaaatttttttgaggacgacggtaacctggggacatggggcctgttggtttggacaggttattttcttgggaagtgccggctcattactggacatcgaaaccctcgctccggaggcactggttatgagcatcaataaagttcttacatttctcctctccatttagcagaatgcactcgtcgcgagctgctttggtttctgtgcacacacagcagatccgcttgcccgcagcattgacacgtttgctgcaggacgaggtactgcccggctgctcggcaggtaaggttgttgaagcaggtgtagatgcctgcgagcccatggtggatgtagcgaaaaaacgtcacttgcaaatagtaatcttcggatacagtttgtttatgcaaaaagacagcctgcacgcatcggcgtcaacgtgcaggtatagaatgtcggctgcagttgtccgagatgcgaaggggggagcgttgacacctgtctacagtacaagaccgtatttgtaagggaaagtgacctcatacagaactcgcctcagtattcaaatatttgtgtgtcccttagatacctaggaaactgtattaattgccgcagagatgggttactgatgtttgggacggccggcgagttacgttgcatgctgcatgctgggaaatttctcagcgcagcctgatcagagcgacagagtgtgcatctgaaactgatgttgcctcaccgggttttggagaacgacggccttcgttgcgagcaccgtgaaatatacatatgttctcaactcactgcatcctctcaaggtattcgtaaacaactcgtcggtttgcgatacacagcgacggtttctaagccgcaggcagaatcgacgagacgtcgcttcttaatttgcaaagatacagtcgcctgtgtgtttcacactatgacactcagcgaactgtaatacaaattgttacacatgaccactcggaagaagaaataagttgctgttggaaatgtgaagaacggtggcatggtgtcgtctgttgcttcctgttgccacgattggtgacggtaagcttatcgcgcagcatgaactccaagagataatgacgcttttcgctctcaaagcaaggacatcgtctgatctccgcgtttttcatca

SEQ ID NO: 3072 - DNA, 1977 bp, Toxoplasma gondii
  source 1..1977: mol_type = genomic DNA
tgtgtctctatgtctgcatgtctccgtgtaaatacattcatgtctgggtgtggtgcgtcgaaatatttgaatgcctggcgagcagccgctgccaaagtacatgcggcatatgtactccttctatgtggatttttcgcaagtgtacgcactgtctatcactccagaaaaggcgaatcgcgtgacggccagtcggggactgcagtccaccgggcgcctgtctctcgtcaactctttgtaaccgaagttttagcgagtcgcttttccgctgtccacttctctggaactcgactcagtcaggaccgcaaaaggtcctgctgcttctctgcctctctgtggggagattgagttctgtctcacagagactgcgacgactcgtcggacctcggcgagcctgtctgctcggtgaagcctcgagtgatgcaaggcagtgaggagctgagcgacctcgcaacggtctgttgctcgtggagcgccgctcctctccctccgagagacgagaacatccgactcgcgagacttccccggccgctttttcgtcgggtgtgtcggaaagagggctaccgcatgctccattcgttttcacctttcgtattcaccccattctccgaagttcgatcgaagacaactggcatccacagagagaggacgaagacaggcgcctccgctttttttcgactggaaaggtgactcggggactctcaactgtgtcgcggcgcggccgctcgtccgttcgtttcctcaaaagctgtggggtgcgcagctcccctgtcggcggagaggcaaaagcttggcagcctcctgctcatgaacttggttcaaagaacgtacaaagacacggcacaagctggcaggcggaaagcgtccggatcgcgctgcggctccttcgtttatctcactcgcaacttgcgcgtttccgcgatcgagtcgaagccctgtgcacttgaacgaccttatgctggagctccggcgatgcggccgcagaaaaacttcaacagagaacggtctgtcgagatggcacacatgctcgagaagaaagagccagcttttgtcttggcagtgaatgtatgggaagcgcgcgcaccgggcgcgctgaaagaggcagaaaaacctgtgcaggagcgctgaaacgaagccactgtaaacgtcgtgatggcgcgcgcgcggcctctagaggacaaagagctccagcaacctgctgctccgagaaccctctgtgaagccgcggaactgacgagtcgctcctcacctctgcaagcgcgattggagagtccacatgcagcagctgcaactgcgtgtgaacagtcgaaccagacgcgcgtgacggccgctggctccgccgagagtctgcaagtttcgcgaaaaaaaggaaccacctcagtgtgcgcgctttggacttgcttcgctgcttttctcgagctccaaaaagaggaaaaaacctgcagtgcgcgaggaaagttgcccctcctgcgccagtgccgcgagccgcgccttttcctgcccgcctatatgctgagagaggcggtcggcgagggaaaaagaacgcgtcttcgagccattcgcttcgactgtcgctcgacgtctttcgcgccaatctccagttcgctcgcttgcgcagttcctcattctccctcgttttttccatccccgcagaaccgcccccgcggcatctcctcacgcggttccgttccctcgtcgcgccttttgagttaaaaggcctctcaaaatcgatcttttccagagttcgaaaagccatcctgtctcggttcttcttccgcgtctgcttgcctgcgctctccccagctcacgcgagctctgcagcacaacgaggcgacgccaaccttctgaggctgcttcctctctgtttctctccgacgctccacggcttcgtcagaacatctctgccgcagtctctcgttagactcgcgaaacatctcagccgtacttcgctctctggcttcgcttctgctcgagtatata

SEQ ID NO: 3073 - DNA, 2047 bp, Toxoplasma gondii
  source 1..2047: mol_type = genomic DNA
agcggccatggcaaaggtttctccggaaaacgcgttgcgagttccctcgccttctgtgtcggatttctctgtagacaaagagttcgtctcctcacgaagcggcaacttgcacaactgtgttcacgttccccaggttctttgtctcttcccggacttccgcctgataaacgaacatctgcgaattacctttatacgaatatcatcacagttttcgcttccgtagtcccccctgtcggattgccgtcagagcggaattcgtggtttccctcgaaggcttcaccctgcagaggcagtaaaacgcagttccctctcggtcgaaagagggaagaacttctacctgctacacggaaaaggattctaacagtacgcctttgactctgggttttctgccgctttcgcaaaaaagccatcggaagagaaatcctgttttcccgcaggtatctctagggccaccatcacctttgtgcactttcggagcgaaacacaaactctccacaagtccgcattacccgacgaaaatggtgtcaatccagagactcttttataggcaaacatacatttatccatatctatctatatacatatatatacatatatttacatatatatacatatatatatatatatatacatatatatatatatacatatatatatatatacatatatatgtatgtatgacaaaggagataaaagtgggaaaagcgagagtgatgtgtgaaggcattcgatgatgaggtgcatctggagttctttataaaaattaggaaagcgtgcctatgcgaaatttcgactttttttgagattggtcccttcggcgtcccagtgcccttcgcaaacaggacggcggattccttgcgtcttctttccctggagtgtcttcccaacttctctttgaggccagtcgtgttctcttcttcgcttccttctcgtctgtttgatggacttacgcattttatctggctttctacgagcttaaagactgaaagcgcgtctctctcgctctctccccgcgtgtcagcaccctccccccttttctccgcgtttctcgcgttcctgagggaagattcagtctaacatttgctaagagacttgtaagttctcttcctcctgcacaggagccgcgaaaagctctgctgttttcctcccaaagtcccttttccttcttgctccctcacccctcgccgcctctctgcgccgctcgacagcctccagtagtgtcttgacagctcgagagcgtgcttgccagaccggctgtctcacctgttccctcgtcttttctcttcctttttcgtcgcttttctcctcgccttcattcgatggtccagcctcgtcgctgcgtttccatctgcttttccaagcgaaaaaacgcttgtttcttcgagtgaaaaagtaggcttctgcagatgtgagaaaaaagactggggtccgctgcgagcacaattacccattcttctcagttgcacggggacgcccctgctttgagttcgttcgggaagatctcagcgtctgggagacgactccgtttctctcttggatgaattatgggatctgtggatctgagacacgcgcttctccccgatttctccggggcaatgtaaagcctttcccctcgtttcctgacttcgctcttgtcttgacctgcgacagctcgcgcgaacgctcgagctacagcgatcttcaggactagcgttggctgcccttccggtttttctcgtacgcgaataaattaaagttaaatatacgtataaaaataaagatatacatatatgtgtaggtgtatgtggatggagtttcgtttcctctctgagctagccgggcgagaagagctgggatttctcctttcctctgaaaaaaaggaacgcgaaggctcctctcgcgtctccatgcagctctttccttctcccatttttcacccgtctctcctcttcatcaccttcctattccacctgctgtctgtccttatccttcctgtccatctccctccagtccatctcctttcgtcgacttctcttttgaacatccgtttttcgctctgccaatgaaa

SEQ ID NO: 3074 - DNA, 2186 bp, Toxoplasma gondii
  source 1..2186: mol_type = genomic DNA
gactgcagggtctacatcgcatgtggtgaagacacctgaggtgaagatggcagcaggcgaggaacccaagggcgaaagtcgcgggcagagaggcgggcgcgccgacaaaaagcgctggcaccacagaggccgaggcggtgcgagcggcggtcgacgttgaggtggaaaacggagtttttgtggatgaaacaaacacacgaaagtctccaagaacccttgcccgacgaggaaggagggccagggcgaagggagaaacttgaaaaataatttttgcgtggtggagtgcgaactggacgtgtcgtcgtggtttgcgggggtggacatgtttaccattctcggggtgttgacagcagggaaaacgaaacgtatgttgttttttctacacgagaggggttctgttggcgcggtatttccttcagagggaggcttgtactttcttggcgttcacgtgcgatggtttgcgtctggcgccagtggcctagactcatcttttgccgctattccttgtcatctgaacttccttcgcttaattgttttccactcatacttggcagcgtggagggaacacaggcacgacggacgtcaggcacacggaaatcggctgtggtgtgcggctatagccgcttcgctgaaggtcggaatcgattagcacaactgcgcgcctagcgatcaccgtttactggcaacacgctctgtgtcctcactcgtcgctctagaatggtcgggtagcctacaactttgctaaatctttctcggaatggtaaagattctggacagaggcaaaatatttcagcatgccaactcgtctctcaacacggacatagactgcgggacgaggttaagcatccgttgtgcagagaatcgaaaaatgtacgttttttcttctgtgaaaggagcacagacatgtggtagggtagagggtgtcatcgttgcaaacattcaggaaatagcgtcgtcagtgatgtgtccaaaccagaaatcattcacaggcgttagacaccatgagccgaaagtgagactaaagttctggatgtctctgtgtctcagttgttgttccacgatgactgttgatgtcgacacagcgactaaaagtctttatgcctggaatgaagtatgacacacttaggtagtgtcaaaaagattattggtattcttttgtgaaagagaagaggtacacgttcacgacacgtggttttgggggggccctagtcgttacaccatcaggagtatgctggcatcgatgagcatggtgggtacattcgacaagtatgtagtgtgaacaaattctccgctttgtgaacccgaacgtgggcaggatccaggcggattggcgcctctgtcagaaagcagcgccacgcgctgcgccgaagatcgccaaactatactgtgctgaagtgtttcagtgtaaagcctttggttttcctcatctgccgttaacagtctctggtgttcatcaaattcaaacagtcacacaacggtgtaccgaccatactggcatgtattacaggccctgcctttttgaatgagcaaatttcagcacgatggacggtaaatggctgtgcgcgtctcgtgcatttcaccggacgtggttgttcacaagcacagtgcgatactgctgtagactaacagtactagcatcgtgatcatcagcgaagaccaaactagatgcgattctttggtagatatttattcctggagctttaacggagcatgactaatggaactgaagtcatttttggaacagtgcccagaagggagtttcgagaatgaatatcggagatcatttcctctaacgactcagcccaggccgctgctgagacgagcgtgactcgaggcgggcagcggtaactggctagcggaagatgaaggtgcaaccgcgccaatcggcggtcatcctcattagaatcgccattgtcgtccgaaccttaagtaaccgtgtgcattctcacttatcgcacatttgtacatcgttcggaacccgctgaagaaatttgacctaacactttgtttccaagattttctttcttttgtgtggggtcacgttcatcgaagagtcggtcgcgaaagcgttagcctttagttctcgtgtcgatttggtgtgtgtcctgttctcggctagaacgttgcatttacccgttgccccgtataacagaacccttggcgagaggtttgcctgccttgcaaga

SEQ ID NO: 3075 - DNA, 1771 bp, Toxoplasma gondii
  source 1..1771: mol_type = genomic DNA
cgttttctgtgcgtttgggttcttcactctctcagggcctccgagaccgggagaagtcgtctccatcccgtctctccattgaattctcggtttgcttccacttcgcctgtcctgctctctgttcccccgctctcaagagcagcgcaggcgggactgaacaaggatttttaaactttccagcggatttctgcagaggtcctgttttctgcgtgcggtggtggagagaggcgccggctgggcgcgctttcttctctcgcgtgactctgccgttttccgtctgtgggcatctctccgttttgaatggactcgaagagcaagagggaggagactcgagcgctcgtctccactttggaatgtcttccctcttcagagaggcgcaactgttgcgtccgagaaacgtccacgttctacctacatatatatatatatatatacagagagacacgtcggtttaaatatgtaaatgtgcatgcacaaatttgcagggaaggggaagaggcggtggtggctaggctttgctgtgcgagagggaaggcttttttaaggacatgcagaagctcgagcgcacgaggggtcgggcgaatgcacggggatgtataaggatcagagcgccagcgaagaagggaggctggctgcgcaaggtaagcggacggcggatcggtgcagaacgagttgtctgcctgttgatggtcaaaggaccgcagttgcgtcctcaaggaagcacagcttctgttgcttttccgtttacgaggctcctcggagttctcttgtttctcgccagacaactgattcctttctgaaggcgtttcattttcacatccctgccgcgcacaggaacgcctgcagctttttgccgcagtcttgcccggcagcaggatgctcgcgtctacacgctcgatccctagttcgttttcacatgcagagacggcataccgaaccgtagagaaaagaggctgacacttgaacgcgacgatctcacctagatcctgcagaggttgcgcactagtgcagatcttgaaagctggcactgcgaacgcgacggaaagtcgccagcgcatttcacctgcacatcggtagatgtttctgacggtggatagtaggtccccacttttcctcacgtggacactggcagttccgaggctcggcacaaacgaagaaaatcgtgttgtggcctggcggcgaacgcgtcggtgcccgatctcgcagcgtcggacctaaaaggaacttgcgacgaacgcgggatgcagaaagtccagcgggtttccggttgctggcgagtctgccgaacgaagtctgtcggaaacagcaacgcagtgaagaattcgccgccgcttactgtctaccggtgtggcctgtagaggacctgtgcggtagcgggacagtggagacatcagacgattctcccattctacggatagatccgcgaccaggcccttcgccgccagccgccgtcgcatgtgtgtttcctagcaagcgctagcgtaaggtgttggtggaatcgaaagaacggtccgtgaaactgcggcactctcgggcgtctcgacggtcagtcgttttccacgtggaatccgcgacatacggcggttagattcaaaacattggcagcgggtcgaaattgacgtgtgtctctcagacaccgcgcggtctttcccgcgtgtgtgaaagtacctaaaaatgccgggtacacacacgcgtgggttttgagtatcgctgaagcaaagagagcaattcttttagacgacggatcccgggtgatagatttttggacgca

SEQ ID NO: 3076 - DNA, 2375 bp, Toxoplasma gondii
  source 1..2375: mol_type = genomic DNA
gtcgggtggtagagagctctgcagagcgatattgaaatgaaagggggacaattttcgtgacatgaaaagaaaggatgcgcgccagttgctaggtctcttcaatgttgagcactagagaccgctcttgtcaagaggaaacgcgccgagtccgcattcctgtagcagtgtctgttgctgggatgcgcgctaggggaggtcttaccactaaacggaacggctgtgtctgtgcagtgttcttgcgttgggctcttgggcacctgtcggtcgtcgtagtcaagtcatgcttcgcacgaaagccccctcgaaatctcttacttgttcccttcctctcaactacattacgatgctgtggacaactgtgtctcctgtctgtcctttgcatgaatcgtcgcacttgcaattcctacaagcgaaagcatcgttgggagccttcctacagcggaaaaatgtgctgaaaccacgggaccacaaagtcgtggacgtagttttaccacggtatgctgcgtcctcacacgcagaactctacgcagtcagcagtggtgttttggattttgtttacctaaagtccaattatgatttgtattcagatgcgatccagagttctccgccgggacttcacactgcactgcaatacagtctgatcattcctcgcacttcaccacaagtagcacgattcccgtggctctaacggattcgcggggaaagctccgagttcggcaatcactgcacaactcaccactccccgtttgacagttttgcagcatgaatcagttcaatcgcggaacatcgactcagatacccgaaaagccattacgagttttgtccgcgcggcgttaaatagtggagtgctttccccgatatgtctgacgagaattgcaggtgacgttaacttcagtatagcagcatgtacatgtccagcgattgaacataaccatctaaacactccttcaagggtcagcaaaacaagtgtagagatgaggcgcatcactaaatggtgtcaagagcctcgaagggacgacccagtggttgctctgttgtcacggcgctgtgcacaggggcactattcattaccaaaattataaattcaccgataccaaagtggatttgcaactccggcgaaagtacgaattcatcgccaagattgcgtattcatcatcgcggcacatttcccgtgtgaaatacggtggaatccggcccaagctcaagcgataatggaagaggcacattcaaagcaaaggtaccgtggggactgtgtttcaaacacttctaccatccgaggttcctttttattattgtcagtctatgctccgacaactgctgctggtagctccgcacgcctgttacagaacagaacgctggtcgtaccgatctagaactggtctttactcgtcggcatggctcactatttcgattcccgctacactgaagtactcccagtgtttctgtactttcacttgcagcatcatttttttgcgcttgtgggttgccgctggtccacatggcaaaagcaagcgtaaacagtgtgcgcttatctttttctaggtctcgcatagcgacttccagcaatcccgattggccaagaataactcaacgcgtttgtaactgttttctactgttgttcgctgcctcaattgccctttgagtcttcaccgaggtccttgacggacttcggatatcgcgatttcgcactccgaaacatctcccagtttctttgttcattgactggaaagcaactatccgccggtgtggctcttgttcagtgcaagcccccagctacacacatctacgtctaaatgcctgtgtaaaagagcaataaagaagtgaaaggggtcaccgaaagcaaaagcagatgcgtaaactacagagcgagggtgataatgttttacttcatcgaagaataatatcatcgaagaagggtgttaatgacttatctcgtctacactaatcaggagagagcatatgcgcacgcacacgtatctcggcggccatcatccagcagtgatacaagagaacgggggtctttacgtccttgcactccagctctccctcttacacgcaagacggtcgcgttttcctattgggcttttgccgcttcaatgacgtttattgtcatgcgtttcctcaaatttggagagtttcggcgttcggatctctagatttcgagggtgcctgcgcacgcctgcgaagagtcgttctagttcgtctcgaaaaacagtcctggcgtctcgagttgaaacccttcaaatagcgactttttctcgtccgataaactccttgttcgcagttcaagactcgtctcaatttcttccacacccttatcacttttgtcggcatctgcttctgccttttctcgtctttttctgccataggaccta

SEQ ID NO: 3077 - DNA, 4809 bp, Toxoplasma gondii
  source 1..4809: mol_type = genomic DNA
atatatgctgccaaaggaggcctggaagcagaactcaccggctgaggtcgcgtctcggctggatgtttccaccaacacggaagcttctcggcgtcttagcgaagatcggagacttctggaccttcttgccagacttgccggccaagggcgccgctggcagcttcttcttccctccgctgctacccttggcggcagccgatcccttcttcatggacgcctgaagacgaaggtgcacagagacgtatcacgggtacatacagcgcgatcgccgcctgccacagttcgcatgcccagcgtgacacacacgcttcccgacttgtgtaaccctgcacgtcaccgtgaagctgaggtggacacaagccaaggactccgaagactacacagcccacgaaacagtgtatcatgcaccttccgcaaaacaaatcaggtttcccctcccagtctgcgagagcaccgcaccccgcattgccccacttgaacattttgggcggatgcagccgctacctgttgtaaacacgcacacggataacggtcactctactccctcctcagcagttctgagcacaacaaacatgtcacctaagtggagaaacaatacgatgatccagtgtcaagagagcacagatcccggggaaccggctgcatgtgtcaatgtgacgcatgctcttgaaactgcagagacgtgtgattctttgcgtataacatgcgcggcagttttgcggtaagtgcctaaacaagaaaacggatatcgtgaatccccagtatatctgcaagctccgctttcaccaagatctggccgtgtagccgcagcccacgacttcgggagactgtgccggccagtcgctgagggtctctccacctcgccccccacgccgacaaaaacaacggacatgcaaaatcaccaaacaagctttttaaagcatgttaaacgctcccataaccattggagtaggcccatcaaaacaagtgtttctcccttatcaaaaacggagcgaaacacgtgggggattccagtgttggagacaacatgcgcgaacccggaagccacaactgcagcaaaaaccggcccagaaaagagatatcaaggcaggcattgactgctccactgttgtcttaatttctctgccggcataactgccaatcaaacgggctttctccagcgcaacgacacagttacacagtcagcatgtgaggggaaaaacggcagaatgtggtgcccccggagcgcgtaccattttgatgaagtctctcttcctgcgttccctctctggtttgagtggagaaaaactggcggcctgcgaccgccggaacaagacgcacaagaagggaagggacctccagaaagggaaaggagaacgcgttaaatggggattttatcaacgcggctgaacagcgcagccgcaccagtccgatggtctccctgccgcagtctccccccccacagaacccccgcgttttcggcgcagcccctcagcggaaaatactctgttgcatgtgcagccgtcgagaattatttcgtccgagtagggcttaggcgcaaaggcgtctcgatttactttgcgtcacgattggctgcatgcgcctttcctctgagaattttcgggagcggggaaaccctcaggcgggctatttactgttctcttgaaatgatacagcagcggagagggcgcccctgtgtttaaaaatctcaactagcagggaaaccttataacgaggaaagaccggagatgttgaaagctcctgtctaaaaaactgaacagaaggacaccattctaggaaaaaagaccgaaaatattatatatgcagcgaaacacagacgctttgtgttaggtctctccactagggcagacaaaccaccgaggctcgacatgctggtatatgagctaactagaaacaaccatttagagtgttcggtagacttctgcgtcccatattccacaggagccgcccctcaagacccatttgtagagtagtgctgtctaaattattaactcctgattcgctacactcaacagtatgagagagagagggattagtgaggccagctgtcacccggatagagcatcctagaaggtggcatgtgcgggtgatgaagaaaggcttttctgcgtcacaagcatcgcttttaatccagttgttaccaactgcaaataccagtgggcgtgctatcttgatatcgacgttggtattgcagcgaacggctgaggagcatctgcgtgttcttcgctgtagtgaatacctcacattttccttcctctcagactgggaaaagtgggaacccggtccgatatatactcattgtgtcaaacaggctgttgcgtacaaccggacccgaggagaaacgtgccaccttgagtatgaagttggccgccattccaagagttcttcatgcgggtctataaggttgtccgtgcaaatttatcgatacttcgtatattttcacctgtttttcgtgcccgactcatgagcaaagcagcagcagagttctggggcagcgcctattctcataacggtcctcaaaatgacactgggaccgtttttggatatgtccaggcttcttgccaaagagcaccccaacttagtggagagccttatgattccgtgagcgttggtggcctgttgggcatcacataggtcatgcatgtggtggaacccattttctacatggtgacaaacgttgaaacggcttacgaacggcgtcgactctgttagggatatccacgaggtaggttatcgtttcctagctttgtaaccatgcgaagcatcacaatcagtgatgaagcgcacatcgcactatcaggggcgcgtgtgcctttgagcggaagtcgttctggaaccgcaccacacttcgttcgaactaaaggtgtacgatgtaacattgccccattattgccccttcctgccgccgatgtcccggctctaccgcatgggaagcttctgcgccagaacgcagcaacgtcgttcaagacaggcctgtctccttttttctgaaaagttggcacattgcggcactgtctccagtgggtaggtgggccgaagacaggaacacccacctttcagagatgacaaacagtgcagctttcttggctgatcgagttcggttgcacccgcctcacgagcagtcagctaccctgttcttgcttttaaaaaatatcgaaccgcaactccctttgcgttaaacatttgtacatttgccgtgtcatacttctcctttgctgtattatagtgttagagactcgccaccttcggcagccagcatgagcacattttagctttcctatcttcttacaggttggacctcgacttctaatcagtaaaccattctgaaactcctgcttcccatctggctgcgactccgagtcgacccagtagacgccagggaactaccagatgagtgcgacagatagccgatcagaggatcgaaagatacattgtgtgaactacacttctttctctgtccaaacaccatacgtgggtaggaacgagcagtatctgtggaactgaacgtcccgttttccaagctgggcgacgcccccgaagtggacacagagccgacctgaggaggatagcttgagccgacatttcgtttgagcaggagcacgattttccttcgtacagagtagctgaacgctttgaacaaggatagctttacggaatggcaaaagccgcgtacttgccttaacacttttctgtgtcatggcactcatccgggaattcttagggtgctgtagttcgaatgtcgtggcgttcgcgtcacaggttacgccatctctcatccagcgaagttgttgacctgcggtgcacatcggctggaatcatccggcaaatgctttccaacgaaacgaatgacgcacatgcagctgtcacagacgcgatgtgccctcactgcgtgacaatgaaacgaccctgttcctgatttagggaggacaacgtggcactcatcggattgccttcagtgtgtcttcaaaattcagagttctcgcgcatgcccacgggtgcaaatttgggttgcggcctctggctgtgcatacgatcaaacaagaactaagggtgaactgatgaaatcgagttggctaccgtcaaaccagtttgcattataactgtctgggaccctatagtgaagtatttctatgccccaactgcctgcacaacacaccttcgccaattttccccaggaaccactgtcaacccatcctcacatgacgcaaatgactgttggagtcaacgtcagatgatgactctcggcgaactcttcgccactctcaacgtttgccgcccaaaatcagcgacaattcaactgcacacaccgctcaacatttgcgattgctgtgccgtgcttcagtttcgtcggaagagaagcctcgggaacgggcatcctccctatgcacttcgtaagacagcggtatcgaaagacgcggaactcggtacaccggatttgtctctctttgctcaaaactgcagaaacgttgatagtttcgagggcacttgccgtacttatcaagcgacgcccacaagtgtgcattctggcgtaacacgcgggtcgcttcttttttcccacccctccaaaccagggtcgatttccagacacaaccaccggtggctccaccgccaggtcgcggccaacgttcccgatcgtgtagaaggcgaaatcagtgcagcttcaaatattctctttcagagctgagtccgagtgcgttctcgaattcgagatccaataccaccagagacgcgaatttttcgcacaactgcgagttttctcgtgtgtacactcaaatttcacccggtgtgtccagttccacgcaatcaaaa

SEQ ID NO: 3078 - DNA, 1707 bp, Toxoplasma gondii
  source 1..1707: mol_type = genomic DNA
aggcaaatgtgtgcagactcatctacatacgtagatctatctatcatgtggagtattgatatctgtttgtaaaatacgtctgtgacatggtttttacaaagatatcaggtccacatcttggtacatctcgttctagaaatgtaccagcctatctgcatatgtatacacacatatgtatatatatatatatatatgtatatatgtatatatgtatatatgtatataatatgtgacgacgaatgtagtatatacctctagatgtgagtgtcaattcgtttgatggcgggggccgtctcttgtgaaaaagagaagtcgtttttacatgttcgggcagccctgtgcgtctgcgttctgccatatcttcctcgccgcgttcgcttttcaagtcttgtgactgtcggaagggcagggggaggccgagcgccgttgactggcgaaaacaagacgcctgacagccggagctgcatttgtttctctcgtctgctgcagcgtttctctgttcggacaaggcctgtggcttcctccacctctctcgcttttttcccaagtgtgcatttatggaactttctgtaactctttgattcgaaagaaaaagagtttccttctcctcgccccgttcctcgtcgcctcctgcgccgctctgaggctgcgtccgaagtctctttctttttcttgcccgcgacgcttgaagaacaaatgcggccagacaatacacactggccttcatttctccgtcgcaaaagacaacggtaacgggtgatgcattggtataattatcgtccaagcactcagagctagttatcgagagatgctcacgagctgaaaaaaaggttttcatcaggtcctccctgaactcgttttcggatagccagaaagaaagtgacgatgggagggggacaggaagaaacgaaatgaagagactctttccctctcttgtggccttttttccagcttgcttggccgtgtctgctgcgtattttgtctcgaattttccttgcatgcgcacatgcagcgcgacgctcgacgcttttctctccgatgaggaaggccttcttctacgaaatggcgcctttttcagaagtacaggagccagtgactgctccgaaagattcatcgcatccagctgtgtcgaggggaaggagaccctaggccctttgctctcctgtctcctcgcgccgagactctttcatgtggggtccggaattctcgctttttttcgcgttgcatctcctttttcttgcctcttttgctgttctttctcttttcctcgctcatccttttctccagttctccgctgccaaggaaaggactcttttcgcctccaaagtccacgcgcttctgcctctccgtcggccatgctggcctcctctctcctcttgtgccttcctgcctctcgagttcctcaaagaaaagccatgtcgatctctcctctttttcctcttcctctgccgtacatcgtctcgtctctccacttcttctagagaagcggtcgtctcggcgcgcgccccggtgtctcttctctctcctcgccacacccagcgcgaagccgcctcctcgtcctttcttcctctcggaagagtcgcagattcttctcgcgctttcgctcgacgctctctaggctagctctgaagccttccgcggaaaaacgagcttccttcctggttttctccttcgcttttctgtgtgccaggcaagcatctcctaaaa

SEQ ID NO: 3079 - DNA, 1799 bp, Toxoplasma gondii
  source 1..1799: mol_type = genomic DNA
tggtgaacgcggttagtactaactaataacgaatcagttaggccgtgagtactttgtcagttgtaccgccgcgaatagagaaattgggtgacaggttaataaggtttgatggtccagcgaggtggtgtgtatggtaatgccaaccacgatattccgaggtttccgagttttgcatcatcgtgttgctccctcttctcacattcatttcacctacattcgtcctcgactttggtggagttgtactgaaatagattgtgacatcggagtacggaagggccctctctagacgcaaaacaagtagaacttcagggtcgtcatgttacggaggtgaacggatgaaccgtatgctgacacgacgtcagatgcgtttgagatttgtagacatatattcggagctgtcacacaagtacctcagttgaaacttattacgcggaagcatgttgtttcgtgcgtaagatcggcgaaggtatgaacgggtggcacagaccattcggatcccagtgcatcctcatcagcagggaattgagataccggcgttcgcacacaacatcctatacaatctcctgtcaggtgaagccaggaagaacgatcttgcaagtgaacagaaaggctgttgagcaaagcaagagcagaacatgggcgaaggccgtgaccacaccaagaacctacggttacccacagcattccttgcacgtcagtcgcgactgaaacgacgtgtagagtgtgtcgagccacgggatcggataatctaggagagagtgtttccatactctcgacgtgccgtctctcctcgtcttcactaatgttcctagtcgtaatttgattttcccacggggctgaatacaatccttttattgggaaattcacttgtttggtcaggtaatacccgtgactgaaacaaacaccgcgttgccagagatgtggtcactactcgtacctccccttatggaccgccagtacctcatagccataaggaaacggatagtccggaagggatattattgagaaaggtattacaggaatggcgatgctggaaatacggtactgttctacagtttgtgcaaatctcggtgtcgagccgctttgattcgggctgaagaatcaggacgagtgatctacttggaaaacgatgtatggtccagtattcgtgtccacttaaatatactgtctttctctttgacaccaccttctactcgtttaccctgttaggtcctgcggaaatggttgtaccatacttcggtcggcgcatgctgaacgcatgcacatgttggaaagagaaccaccttctgcgaaatatcggacgatcggcttttctctagttctttgctaaagtgtggcgtgagggtggccgaaacagccgttagacaaacgaacctgtttaatgatggctgctttcttatagtttcctcgtgtttgtgacggcccttctgctagcggcccgagtcatccctgaggcgggagtcactaacttacggatgaaagttggcaaatctcttcgacccagcagtgcttttccattttatcatccgattcagattctttgttgtgaaagggaaacttttttcggctgaccatatccgtgacatacattctgctggggttactggcgttctgcaggagtcgccgtcgccagagagggcgcagtctactcctaagcctcctgggaaaggtaactttcggttttccctcttattttgtgcatcttgctgtctgtctatcttcagttgcctgcctacagccacaccgtgggactcgtggcactctaaggaaaagtttttctctgttcgcaccgaggaaaa

SEQ ID NO: 3080 - DNA, 1469 bp, Toxoplasma gondii
  source 1..1469: mol_type = genomic DNA
tttacacacgagcttctgcgatgcttgaggcttcatgcgcctatgtcctcatgccggacctgcctacatcaccaagtccccttgcgggatcggctcctgccgaacaaatacctacgctggtcggctgtgtgctgccaggtaaatccaggatccctccacagcgccgggtcaacaggggtgcgtaacggatcgtcggggcacagcgttcgatacaacctggaaaaagagaacgcacatgtcacatcttcgaattgaaaatgccatcgacacctcacggaggtactggggttttctcatgtcctcgccgacaccacccatcccacctacccataaaggtcttggagtgtcgggttctcgcgaagaactttttcgtctatactttgaaaaaacgctcgaaccgcatcgcgcttcttccagcactgttccatcgtggcggacaacgttgtcagcgacacatgagcaggacgaggagcaaatcgcatggcctgcacagaggcaacaagttgagaccaggagcagaagcaaacttgacatgtctatatatgcttcgatcataggttggctgtgggaaagatgctagacatacatcgcaggccctttgcgtccgggagagaccgtcacgggttgtgttcctcggtgaacagaaagtgagctgactgcgtcgacaacatgcgcgactccatgtagaggactgcatgtgcatgatcagccttgcgctgatgtaccagcaaaatggattgagtggaaattgcgcgcatgagtgctgcgagactgcgagctcaacgatagatgcatgcaatcgactcacctgcatctgaaaatattgagccatctgcacatcctggagcatatacttggatggccagtaccacttcatcatttgacggccttgcagtggcctcacccactgctcttcccctggcataccgcacgcatatccaaaaatcttttttctggcatcagctacggcactttttcgcatcgagtgcggtgtctgcccctcttgtaggcgccggagggacggagatgccagcctcctcatcatagcaggcgaggttacgtgagattaacagaaaacgcctcacactgcatacacgaacacgccaaactcataaacccgtgcttctcctgctctacagtgaaattaaaaaaaaacagaacgcagcgtgcagacaaagcatgtaagatattaactaagagactcgggtcattgtagcaacctagcgggtttcttaagaaatatgggcagcacactctctcctttatcacagttgtggaaaaacagaaaaaggcgccattttagtggaatcgacgactcagacactgggaacgaacattctcaagtcaccatttggccaaaactgagaccaactaacagagccaggatttttgttcattcatgcatgcactggagggtctgcaaggagcgggtcagcgctttccccctacctgaaaaatcaaggcactcc

SEQ ID NO: 3081 - DNA, 1608 bp, Toxoplasma gondii
  source 1..1608: mol_type = genomic DNA
agaaagagacgaacgagaagaaagccgtaggcaggaggaaggagagaaacaaggggaagggagaccacgagagaaggacttctcaggagacgcaaaagaaggcaaatcgcgcgatgcgatgagagagagaagacggcagtggcgcggcacctccacatgtctctcgagtcttaacgccttcagtggggagttaacttcgcgtcctccccatctccatcgttttttcctctttcctcgttttctctcggcctgtctcggtcgaggcgccctcctctgcggagttctcctgtgcgcttccctcatagcggacggaccgtcggcgcgggaagcgaggcgagcaggcgagagaagaggagagcgaagagacagacgagagcgagggggaaggctgtccatgcccatgcggcgtaaaagcagaggagctgaacgtctctcttctgcctcttctctccttcaggtcgaagagaagcgtgagaagaagagaaccaagcggagacagagtgcaacggagactgaggagagggcaccggttcgcctctttctctccactcagtttcggtgcaagcaaagtctccggttcaagcgccgcttcagtgagagggatgcatacacgccgtcacgagcgagccggtccgacaagccgtcgggagaggcaaggaactcaagccacagcgcgaagctgatactgcgtttcgtcgcccgctccgtcgcatgctttcccctcgagcaaagaagaaaaaagggaaccgagaggagagcaggaagagaaaagagacaagtacaagaccgtgtgcatacccccttctgctgagtcgactcgcggggctttgtccggagcgtctgtatgtacgaaaatcggcgctggatcggccttctttttgcaggaggaaaggttcgtgttcaagaagactggccaccaacgaggaagcggagttctcggatttcgttccagttgtcttgtcccatttttcaattctcgacgcgtgactgtggagggcgcgcgacattgccccgagaatcttttctcagttttctgcatgcgcccggaggttcccaggcaacaaactggaaactgcctgtggcagactttcctgtcgcttctgcgtttgaaagcgacagaaaacaagaaacgagagcagcgcttcgtttcaggggagagacagccttctcaccttcctttcttcgtggggaagggagagccgcacggcgcggaagcaacgttttttttgtggctcgcgcttgcttcgctctcttctctaaaatgaaacaatagcagatacactccgacagcaggtggcgctctttcgcgcctttctctacgaagaagacggggagaggacagacgcgagaaccgcggagaagtcgacttcctccgggatcctctcgtaggcaattgtgtctctctcttcctgggaaggaggcacagcgtgcctagagagacggtctgcttttccttgtctgcttttcatcttcaacggccgctttctcttgccgcgtctgtttcttcctcttctgctcccccaccttctctacttcctgtgctatcttctctcccatgtacacaccttctcccttctttctttctcgtcttttctcggcgctccgcga

SEQ ID NO: 3082 - DNA, 3597 bp, Toxoplasma gondii
  source 1..3597: mol_type = genomic DNA
atatccatgggcaccaaaaatcgagattaagtccttcatgaatgcagccgagggatccttcatgccatgcttctggcatgctgcagcagcaccgcaggtgtacgcagcgccggatgatgagaacactctaccggttttcagacagcggacacgagagtgcacgcgtaaaggaagacgcaaacgtgctgaacccccaacatgtgtgcgaagaagctaccacatccgtgagaagttgggatcattatgcactaccagagatactggcagttggcagttatatgttgggctgctgcatacggtgcgaagaagaaacacgctaacacactgggaacagctgcattgaaaacaaacaacttccggtattgtgtgtaaacaaagagaagtacctccagcctaccgggaaagccgaggctgagacacgtcctcttcaaatgatgaatatccgatgtacgcagaagcatacccggctgtcaagccgccgacttacctagagtaatatcccgcgcgatggaacccacctcggcgttcatgtgatccactgaatattttgggtcgtattctggatggttcgccagcaggttgcgcaaaagagcctcatctgcactcaaagaggaggcaagagctaactgtatctggggcaagtctcgcctccgctcttcctttgaacagaagccactgtgccggcagaacaggatggggcataaaccaggaaaatgtgaacgctcatactcgagtgcattgtctttaagtatacatcacactgcaaggaagaacgccatcttgcagtcatcaactaggagaccgaccatgcatgaaccataaaagctgaaagttgactcattgaagtccggttagcacataccttcttttttgaagtacacagtctcttctcctgaacgcttctggtccatgaatttgacactgctgaagtttcgaattttcgtcaccatgccggctgacggtaggctcatttgctgtgtacccgtgaaaaagggagaaacatctgttgatttgctgtctacctggcgtcgcccactctccagtgtagttctggcgacacgccggatggcaacgcagcagggcgacgacattttctcagctttttctcttgtgagctttcctcaaaagctaatgcagttgtttggccgtagacacacacaaattttgcgcacggaaacgtgcggggaacgcactggcaacggggactctgtccggaaaaacagggaggcttaagacgcagaaacacgggcaactgacgacaaagaccgcctcaccagctgaatcatacggtcgaaatactgcttgatgtcaacaatgaacacgccgttatttgtggacacaacaccagcaattaggagggaatagaggtagtcctaacgacgacaaaaaagagtgcgcatgctgagcggtgctgtacatgcagtggaaggatgtatctgttaccgatgcatctcgaaattttgcaggaaaaaggttgtgttctactgttttggggggggatttttcatgtcggttagctacctcggccagtacctgaacgattttagcacggcaggccaggtgccaccggaagaaattctgcacgcgcgccggccaatctgcgagtatcagtttagaacacttctggcgtctcgcagtacaatcgtgcgagagcacgcacagccaacacactgtactggccacttagtcagaagtcaaagcctgcatggcgcatttcccaccgaatagaaaagaaatacttgtcagcgaatgttaggaagtttgtgactgccgccaaccatcctcggcaatagcattgttgagtctcacagaaagacggcaagggacgttcagccatcgttgctgtaacggtatgacttctcatagcaccagccggcaactgctcctcgtaatccctctgctccaactcagcctactcttttatgttacatttgcatgttcatgtgaaaatcagcaaggaggagtaagcgaatgcactgtgtattcaaagagactgctcggatagctgcagctactccctaagcgcaccgctacccaaattgtgctccgccgccgagggctgagttgtatgttttggcctgtgcaacgctcgtgtactgtgttagaccagccctaagagaacatttaccgtgttggcgatataagcgcagttctgtgagggaaaaatccgaggagggtagcacacgtctgaaaacttccgggatgctgcctagcactctactgcccacaaatgcagtattacagcgacgctcccaagtcacgtgcacacactagtctctgcggtaatgcaaagaaaaaatctgttttcacgaaggcgactctgtccttgcgcgcccagctaaacgaatccaatgccgaatgcctcagcgggtatccgtaatgtcaccggctgcgccacgctcaagccctgtagtctgtaccgaagttttttcggggccacacgattcggatactcttcctgtttaaaacttctgacatcgggggcatcgtcaggcctgggacaggattcgatagcagaagaggagaacagtccgaagaaaccaacaaatagtagacaatatcgctgggcgaaggcgaaacctctgctccactgcacgccgtcgagcatgtggcaacccgaaacagcgataaaaattgataactctatgccgaaatacggaattggcgagaatatgatggttgcttgtgcacgatggattcaactgcaaacccgacaatattttttgttctctatcccatgtacttgctccgtcaccagcctgccatacactttcctggcggctggtgtgttcagtagcactgcagggagcgttatagggcgtagctagccgaggtcccgttgtctgaaaaaatcacacagcgagacacttcttactgcctaacagtgaacgtctcgagctctgcgggagcttgcaagagaaagaatgagcacaacgcttaaatggacgcgcgcagtggacccctaattcaactacagaagcacttccatagtcgtttggatattaatgtatgccccacagagcagcggttgaggagcgacgtgcttaaccgcgaatgccacaatctgcaaatgctaaattgagggcagacaggacaacacgtcagccttcgtcgcatgcggatccagcggctatatggaaggcatcgtatagtccgacgggccttctacacggcactacagagataagagacgcggcgggcagtatgctcgaggaagaggcactaaaaatggctcagtttgcgaaaagttttacctccagtgcttcgtcgctgaccgattgttgactgcttagtccattgtttgtgtaattcatcttcgtgatgcagtctcgcaagtacactgtgaagagtctagtctgccactgacggcctgtttctgtttctgcgctgcgcgcattcaccgtagaactctgatccgagacggcaatcgcctccgatcaacatgaaaacctaaagcggatttcggtgctgtcgtctgcggggtaaaaccaactgggtagtatgaacgaccggatgataaatcgtgcggctccaagatacaccccgcctctcccagagtaacgatttcccatttctgttatccggtacgttcgacga

SEQ ID NO: 3083 - DNA, 4010 bp, Toxoplasma gondii
  source 1..4010: mol_type = genomic DNA
tagcaaaggagaacattacggcaccgcattctcgtggccaaagccgtggaaggcgacttgccgtacggcagagcagtctgcccttgtcgcaccgaaggggctgcatgcgtcgagggagcctcacctgcagcaggggtcctttctgcggtcctcggtgaagtcagttcctgctcaggggaaatgtccttggattccgccgcgcgttgttgcggcttctcgcggttctcaaaagccttagacggtccagaaaaagagctgttgtcgacatgtaccgccagacgaattttacccgagagatccacgtcggtctccgcacagggtggcttctcgcatctggagcgctcgcattcctctccgcttgattctccagccccagtcccgtcatgcgaaacgaaagaagctgccgggtcgaatttgaagctcggtcgtagaatcgggggacgcaccggctcttctctgagaacctgcttcgttgccaggtgtagagcgaggtcaggatggtagcctccatcgtgtgataaggggtaaaggggatttaatggcaaccgcacgtcgccggcagaagacaagccacttgaagtatttgagagtcggcacccgcccagtgacggtgttgacatctgtgctgctctgttcgagtcacctgcagtcctggagtcctcgggagaaaaccttttcgcggtgcgtgaggaaaacgaagagtgaggtccaccaggacctaaatgggaagagagaggcatttttcgcattgctggtcgccttatgggttcttggaaacaggtgagatgagtcacggaccgacgacggcgacacctcgctgtcgcgtgccgtgctcgcgaacgggggcaaaccgaggtgagtagacacgagtggttgcagcggcaaaaggcaagtgagtgaaagtaaagttgatccgacagcgaaacggtcgaagtctagctgcttggatgcaagtttaggtttcagtggtgagagtggagagagacgagtcagaaaaaagagtttgccatcgatcacaaaaaagggaggaaccaacatgtaaaaaccgggaagagcgacgcaggtccttcgtaactaatgcgagggccgggagtggaggccggaacgcgtaccccttagtataggtgaagacactgagtgactgagcgtttaatgaggaaagactgttttgctggtagatggtagcgaggacaccgcgtttactcctcaaaaagtaagcgtgcccacaagaggacccggttggttttcaccggacgtgaaggctaaatgttggtcaaaccagctcggcctctgaagagagctttcgggaaagtcagtgctggttcatgaagtccactttcactgtgcgctggaaagcagtggtctgcgaagaaccaccgcaggactgtttaagaaagactccgttcaccggttcaaatgcagaggaaggggcccaaccgacaggaagatagtagattggcccgaatcctttggtccacagaaaataacgccggagtacatggacagactcaaaaagcgaaaaataaccgagttgcgagacaaaagaaaaagccgtaatctgttcaatccggcactctctttgtcttgtcgcatccgcgtgcggttgccaactacccagcggcagctgaggcggtcccagccatacaaacggaataccgatacaagcgggattcgttttcagcccgtttttcgatggatgctattccgtagagccaaagaatggtgggaaagcatcgagctttcgggctatgcttgcgtcacgatctgatcccgtgggcttcatcggaaatcgagtggctgccagcgccctggacggttgacgcactgcgcaaaaagccagacacatgcagccgaaatctgcaagacaacttacctaggcagctagacctcgactggcgttcggggtacatcccactggagcacgacgcattatacaagggatcgctcgcagttgtcaagatgccctggagtcagtgccatttaaaaaagtcaaaatacccaattctaattcgtcaaccgtggaagcatggccaggtgcaacaatggggtcctgtcggcggcccctactgcgtcccggggaaagagtcggcgtcactcgttttgctaggctttctggggcagctgttgttttctgaaagccaactcttggctgtactggagaaggtaactatgctgttttattacgggtgtgtcggagatgaccaatgcatgaaagagatgtcagactgggagggtttgtcttccccacgttctacggatgtgcagcaggtcctgtcgacgggggagggtccgatcaaaacaggatgttgttgccgaaagcaggattcccatcgtcaatgtggcagaagctaggccacaaactaggagagcggaaccacagttgaaacacacgaccgtagggagatcggatgccgcacgccggtctcgtgaacgcacagatgtatgtatgattcgttgctccttcttctttgcagcttttgttcaactctcgcacctgttttggtggctgtcaactgatttaactggtcatgcaagtggggacgtaacactgtggctctggcacgaacgatgtggatgtcgttgccaacgtgagtatttattccggtttgttgctacctgtggtagtgaaacaacgacactaaacacatttagaacaaactgtgatgcttgattagtggtgatagcatacccatcttcaccaacaggaatatcactttttgtgtggcaacgtggcaagagttgactctgttaactcatatgatgtcatcggcatgagaccgtagcgaagcgcattcactcatgtggtgccattctgctgtgcacgaaagagatgtcacctggggtcctttagacgcagtctccttgctttatcgttgagacagaatgtcgtcaacgtgagatcgtagcgaaacgcattcattcatgtgatacgatacgtgcaaagtgtaccaatgatgtgccagctgtaattcaatgaatacagccatctttctttgtctgtttccaggtccccctgttaagcattccgttcgagtgtgttaccaccggaactggcgctcaattcctaaaaaaagaccctctgaagttttttccttgttctactaagaaagaaacgtatacatttataaggcagactctgttcgtggagcccgaggacagaaatgtgttcgacaggctagtttccggcgatgattcctgtggcaacatcgcgggcggtttttgtgagtgatctgcgtgttataaagtagagcgccctgcaacactgaagttcctgttacaggtacgggattcgtaggaacagaatgggaacgagggttgccgtcaccagaggtgaggattttatggctgacaagatttcttgacagagcgtatatcgcaactttgtggctacagtagctcagttccctgtgagaatttgattggaggattccgctttcaggtttgatgaaaaaacccaaacaactagacaggtggcctgaatttcgttggagcacacctcttgctctttcatcatcttagtcgggagagccaacgcccttcaggtttcccatccctcgcgactgttcacgctaagcctcgcgtgactagcgctgctgctacgcccgttgaagcagagcgtgagacttctttgccctctctgcttgataacattctgttcaatccgcctttccgcaatttctctctcttctctctcctcgtgccgacgtagtccgtcgctcatcatgagagaggaacgccttactcgcttgaaggctgtgacgcggttctgttgcatcgtagtggacgaagtcggagcccactggatcgccagtgggtttgcgcatgactttttgcgagtctgttgcgctcccgatataaaagttcccattttctcgttcttccagcctatgcacacatcgacgcagatgtatgagggtcttgcgacaaaaaaggcgcaactggaaacaaagcaatgacagtatagggcattaattctgtgtcacctgtcggcttgctcgtggctgcgggta

SEQ ID NO: 3084 - DNA, 2243 bp, Toxoplasma gondii
  source 1..2243: mol_type = genomic DNA
tactctacgccactgcgaacgatttccgtggcgtatgctttagaaatcagttccatggcctgtccgttgccgaacatgccggcgttgaagaagaaggggctagtacggccactttttagtttgaattcgccgaacttgagcgcgccatggttgtacgcaagacgaagcagcgccttttgcagctcgtccaactgacgcccctgatattcgtctgtttctccaggcgggccggccaggacttttctcaacgtgcgggatctggaaactgacaagtttccgctcgacattgtggcgttttgtccactgactccacaaaatttcgctgcagttcaagttaattctcgcgcgtctgcgagagtcgacctaaacacacacgaaccacatgcccatagaaacgagctgcacatacagaagggcgtacatcttgatgcatggtgagacagccgacgaggttgacacgcaaacacgaaacaacggctctctgtcccacaaaatcaagacgataaagtttaccagtgacacgcaggaactgctcttacagtgagctgttttcttcaaacagtcctccaagaaaataacggcagcgctgccgaacggaaaagtcgctgcactcggtaccgtaacgactactgcggaggccgccgagcaacccagaagatacggaaacaagagacgtttgcataaacgagaaaaacaatcgaagcaagattagaaggacggcgagacagacacaaaacaagaaaccagggagtccactatgggagcgacagtaacgtgggcccgcgaggcagacaacacgaagctgaagacacgggagaaccggacgaaaagacaaggcataattacgacatatgaacggatagagaggcagaagaaagggtacagaacgtgtggggaggtcggcgagaaagtgcagggaagggggggatagagagacgagttaaggggcacacagcctacgaaggaacaggtctcatagctttttatgcatttcctacatacccgccccgtcaaccgtgggttctgaaagagagaccagacttcctgctcttcaaaaaagcgtgaatttcggggaaaatctcgcctcgcatgatcttttgaatggaacaacaaacgtggctgatgccagctgctagagagtggcagacgcttgagtcgatgaaacgtctccttgattcgaacacctaagggtgaacgaaccctcgataagaagtcctctctactcaatttacagattccttctgagggtagaatcgcggagacttcgacgccgtttcacgcgttccggcagaatcaaagcatcgctcgctggatgcttgcctcgatgtgacttttcccatgccgcgaacggttcctacctcacgtatgagaaaaacagaggcgcagcatctatcgagcatgcaccagacaaaattgcctttgttcttttagttgctgtccattcatcactagcgacgatctttggttgttctcaagcgaagcacaccagctccgtgctcctttcccttgcgtgttccagccttgtcgcctgttcgtgtcttcttcctggcatgtttcgcgattcttcaccctgccctggcattggctgcagcgtgaaagggttatctcctgttggaaacacgacttgagagcgtttgcaggtgattcctgaagcgatacgtactcttcgctctcctcggattcgtcgctgtccctgcgggagacgagaaggtcgcagcgcctcgacttcctgtgtggggcagactgtggcaaaagagaaaccgtccctttacattcatttttgcctgttgatgaacagttctcagccttcttcaacgggacgcaaccgaattcaaggatccgacgaaagcctcgaactcagacctgactcggcagctaggatttccccagaagctacccactttcttccactcgcttgaatagccagcaggtccgcttgctttacaccactttccaggcctctcaaaaaacgtccatcatttcgctcagagcgaaaagccgttttcgagggttcatttacatgccgttctccagccagcgttgggtggttcccagacccgagctaatcctggtcaccttcgcatctttttctctgagccaacaagcggccggcaggtaaaaccgtctaatttgtgtgtctgtgcatgcttgtcccggttttttcctgcggcgctctaaaactctaggtcagcaggcgggcgcccttcattgcctatgcccctctccctactggtactctgaaa

SEQ ID NO: 3085 - DNA, 2971 bp, Toxoplasma gondii
  source 1..2971: mol_type = genomic DNA
aacagtgtcccacctgtctcgcactttctcgctcagcagatgattcctctgaaagggtcagctgacccccgttgtttgtcgtgagggcgccaagacgctctgcttccttcaagagccttcgcgtcgaccaccgtcgagtctccctctcctgtttcttcacccactggccaccgcaggggccctcgtgtccctgtgggggaggcggagttgaggcagaagcagaagacttcgaagacgaggatgtcggaagagaagaggggagactcgcagaagctgggcgtgcgtttccctccttgacacatctatccgtatcgccgtccgattcttcttcgtcgctaccctccgaagaaaatccagatgcccggatccagtcggggaccattggagcctcgcctcgttgcaggcaaatggccgcatgcgcaccaaggagttctggattcagcgcactgagcaaatggtcacagttgaaggaaacgaagggaggcagattcggtggcaagggaagagcggcggagtgcatgtcacttgcgtcagcactctctcgtctccttttgcccaccacgaagacgtagcctgccgtcgctctctgctgtgtctctgcatgcgcgacagcaggagcctcgctgacagacgaagagggcctctctcctgggaggccaatcgaggagcgacaagtcaacggagatcctgcaaggagagaagaaggcgaacacgaaggcggggacacggcgccagtactcaacgacgaagaggcgcgagaccacgcagagaccgtggaactcggagagggcgacttgagggcatcgcccgacttcacgtctgcgggctgcttctgacacccagcagaaggactctctggccccactcgacttgccattatccagacgaagaaaaggagatgcgcgagagaaacggcggactgggagaagcgctggtcaccgacggctgcacggagaaggaaaggatttgtgacgtactgagaacgaaaggggatcgagaaaacaaacgtatcttcgttttgcgccagagagagatagagagcctatctggagactgcaggactgaaaagcttttgttgccgcaatttgtcgttattcccgttgacggcaaacccttctccggctcgggggtcaaatgacgaaggaaacgttactcgtatcgtctgccgtgaatctgagaataccaccgtacctatttttgaaaccttccctctccctgtgcgtgcgaagaaagcacgatatctgtagaggcgttttccgttctgtttgccccgacttctacatcggtcagaggcggcaacgacctgggcggaccgggaccgcagctggaactcgacgcccctccgcgttttttttcggaggaactggaagcaaccgaaaaatcagaccgaggggaatttccttcggctcttgcttctctgctgtcgcttctcgccctttctccgtcacgttttcaaactcttccgctgcgaaatgagaaccacagctgttcctgctcggcgtcagaagcttagaaacaagatcccgacacagacgggcaacagagagtatccagagagcctgacagagaagaatgagtgatcattcaaacaaatcagaaggcgtgatggatgacagctgtcccaagccctgtaaactggcgtaaaagtgcgatgagagggttgaagtataacggacttgcggattgtgtcgaggcgctgtcgtcagctcgaggtgtacagacagctgaaaactccctccatttccagcacagatatgcaccgggacacacatttagctggatttgctggcgtcgggcgccactttcgcgtccttttctctgtcgtcgcggcttctcgactggtcgaccattggtcatcgtcgcggcggagttgcttctttgcgactttcgcgccggcgaaaggcttcctgcatctccgcaggccgccctcctccgttcgtccagtgttccgcaaaacctttctggcgtttttccgtggtttccgaaggcgtccaaggcaaaccggagttcgagcgtgacagcggcactacggtccagatgcatagactagttgttttttccgaaaatccagttcgtgcatgtgtgcccgccgtctcttcgcgtccgcgtttcgctggcattgacagcacaggcaagagctgtggcacacacatgtgaaacgagtcttgcgagctggcgatttgcgggactggctttggggcgccgccttcgaacgatcgcgttgattcacggaagaagactcgcggagaaaagggcgtccttcgatctcattttcgccgaattccctgcagcaaggtcaggcgactccgatttttttctcatgtctctgcaactcgccacttctcgcgcagcctcgccgcgaaaaagagtcagcgcgtttttttctcttgccggcccggttgtccccacgccgttctctgctctgtttccggcgttttcttgcggatcatggggcacgctttcggtggcgaccctctccggtttctttggcacatctttcctcgcttggttcgcggtcaatgctcgcttcctaactcatttctgtgtgattgagcgcctttcttttttttcgctttttgtggggtcgacaagccccgtatactgcatgccctttctctctctgcgcgtatttgattctctcgcgtttcctagggtcagcgcctttgtatcctgcgttttccttttttctacgtgttccttcctgctaaagtgaagttccggagttttttctcgtgcacgccgttagaaatcttcgtcccgttccaccctatttctccacgacacggccactcaagtagaggccgatttttcgcacttgcttttgcctgtcacacactgccgctcttcgagagggcgcgagagcgcctcctttcgctctcttccctctctcgttcgcccccgccgtttaccgcggcgtctgcaggcgagacgaaaagggggaccaactcttcctcttgcgcgtcgcccgcga

SEQ ID NO: 3086 - DNA, 2261 bp, Toxoplasma gondii
  source 1..2261: mol_type = genomic DNA
gtgtactgaacggcttctttgcgcgtttcatcgctgctcgacttctctcttttttctggattcgcgccccgaggacgcgcagcctctccatcgcctgcctctcgtcttctcttgggcggcgcgcaaggccaccgcgatttcgtctgtgtcgagtctcccgactgcttgccgccgccaaacgacgatgtatggcgcagcgcggctgcccttgtccgggcgcgcactgccgatctgatgagtccgacgcggagaaagatcgaattggaagcgcgatgcacaagacgaacaccgaacgccgatctcgctgtagaggtcagcgaaaacgcagacattttgagagcggggagtttccctggattcgacgcagaagcgcgacacacggaacagagctgcccgtcagaggaaagctcgccgattcctgagagcgcgagtcctcagcacatcagctggcggtgcagaggttgaatgcgttcccggccgcaggggggtccgaaaatgtgaccgagagatccctcgcgttttaggactgtgcccagagtcagttggacgaatcgtttcgttcggcagttcgagaacagtgtagaagaaagagagctctttctctgccgctttagcttgctacgttgtccccgcttctccgcgtcgtgtcgactcttgtcagccgctgccgggaagtagccgtggaggcaccgcggtgaattcttgtgtccggcaggggagctctgcagaggtgctcgttcattcgggctccgcgctcgtcgaagcatcttctttgtaaagaaagcggcgcgagtttgttgcttgttgactgccgtcgaaagacatccgttctctcgtcgctgcaattccgttgttcaccggcatacaaggtggacaggaggaaaggttttctccgtagtaaatggcgtgtgttcggtgatctggcgcgccagaagccggggactgtggcagatcgcggaaaaaaagacacccgactgtcctgtaggaaggggcttgcatcttactgtttgtgcctcctgcgcagaacactagaagctggtgggaaaaacggctttgtcgggtgtgaaaaaagccacgagttggaacgtctggggtatgcggccgaagtgttgagagagtgtgtgtgtggagtgtattggagaaggagagaaacctgttccccaaacgctttcaacatccatttggaaagcgcgtcgctgtgttaaggtgccgcttcagtgtctgtgtcaaacacacgtctcactttggaagcacgccgttctcccggctctggcgactccctagaaacttaccgttcggttttcgggcatttcttcgaaacgcgagtttacccgcaacatatgtcgggctcagaggccaagatgctaatcaggcagaggaaacgcggcttctgcccgcaaaccgagctgcttttcggcacgtatttccgttgttgagcacacacatggtcgccggcgggacacctagggtctcttcccagttctcacatgaggaagtcgtctcaccataactccaacgatcacgatgaaggcttcacagtgcctatcacgatgtgcagcttctaaatgtttaatcgtaccgcttcaccccgaacaggtggacgctcacaagccctgaaggaagcttacaggatcaatttcgactacggaagctgtctgtccgttagtaaagcatagagatcaagtaccattatggaaatggtctgtcggttagtaagtcattcggatcaatttcggttatggacttgattgtccgtcactgagagcacagaaccggatggtgcacaattttgactagttgctgtctgcaacggcctaagcttctctgagttttctcattttggcattcgtcttgggtcctgtagacaatcacttaatttgttccgccgccaattcgccattagcagccgtgttttcacgctgcgccatctccacggcgtccactccggagaacttcgatcccgagaggaaagctccgagaaacaagtagccaaccgactgcgctataggcccgtcacgccgctgtgaaattgacggcggccacgaaattacactgaaatacagttttcgcaattgctcttactagccctttgtagtttttttcaacgcgccgtaatccaagggaaccgcaagttgtggaggtcacttgcaggatccggctgcccttgctattcaggttgggaaacgctagattgtcacctgcggcggttcgcgcgtggccgcgcttaagagcggggttttctcttcatttctgcttgggaa

SEQ ID NO: 3087 - DNA, 1402 bp, Toxoplasma gondii
  source 1..1402: mol_type = genomic DNA
ctttcctgacaaacttcggagattgggaggctgaaatccaagttgaagaagacagagtcatcaaactctttcaagttccgctttgccagcagtcatatatatatatatatatatatatatatatatatatatatggagagaaagagagattttatttctgcatttacattgcgaatcttcagagaaacgcgtttcacattttgtttccaagatataaacatgtgcatgtacatatatatatatatagttgtacgcgtacatgtgctttcgttgatgggtagtcgaaagtgctggttaaaattggagagcgcgaggtacgaggacttcaacggcctccttcaacttttcgacacagatttacacttgaaaaaaggatagcttacgtaaatctgtgtacatctagacagaatgcagttttctgcaggacgtttcaaccttttccttgggcgaaagcatctacatccagctttcccccgacatttctccatagatagagacacaaggatgcgtgcttctcgtctgccgttgatttcaggcatccaaaggaattctttcgcgacgtcttcgcagatgtatacgaatctggctcttccgatcgcaggcagcctgtgtcccggaacaggcgcaccctgcgggcagagcagcgcatgggagaggagcgttttccctctcccgctgtttgtctatctctagttctttcttcgttgcccggcggaaaggggaagaaggcctagcaccctttggagaggcgcccacgaacgggagaaaaatcgtttgcttctcggatttgtgaaaaattaagatgtctagtaaaaacagacacgcccttcattcgaattgtattgcgggtgtgaagaatccggtaagacaggtcactaagctgtgcctgtgtctcatctttcaataaaggcgtttcctccaccaattctcgggctttctcccttctcagaacgataggtggcctgggtagagagtgcagcttctcacaaactgtacaacggtcaattatgtccatctgtgcatctacgactttgatactcggtgtcttccagacaattccgttgttctgtacacgacgacgccaggaatgactgcccacaatcattcaggacagcggcaacgcctggacaacttcctagaccgccagagatccccggcaaactgcaccttttcgagagagacgggaaaattccgcctcaccacctcgccgttttgacaaaagtgtgcatgcacaaaacctgctggaccgtgagcattgcacagaaaacctgcgacaaactgcccgcctgttctccagcctcgtctatcgcgtcgcagtagggaatcgccttatattcggagactcagccggggaccttcccgtcctgcgtggcgggcgcatgcaggtgctgactgttcggca

SEQ ID NO: 3088 - DNA, 2598 bp, Toxoplasma gondii
  source 1..2598: mol_type = genomic DNA
ccaaagtcgacacaccagaggatcctcctccttctctcttggtttcttgcagtatcttccttgtcttctcctctgtcgtccagccttctcttctctgactcatcgttgccgcttctcttcattctcccttgctctgctctttgtagcgtccccagagttcctgactctttcttcctctctctgcgtttgcaaagcttgcctgcttaaatcgatcctcaacatgcgaagccgaagctctccaggcacctgcaagggcgtcggccctctctgcggaagtccgttcgtcggaaacagctgcggctccgtcaggcttgggaagcgcggctgcctttttccagggggagacacttgcgagcggcgccaaggtcgccagagacagctggcgagagaaagaccaggggaaaacgggagctgagaggcgggaggttggggaaaagcacagagaaggcggctgagctggcggaaggctcagagaaaaagaaggcggagtacgcataggagaagaggacgagagagacaaagaggaggaacgaggacagctgattccagagccggagtggagagcaggcgcgagatgccctgcagcctcgaggggcaagacgagaggagggagacacctgcgacgaggagagagagtgaagggtgaagaggagcgagagggagaaggtagagaggagggaaaagactttacgtaggagaaaaagcggtacttctggatgcacgagcgacgagacaaggaaaacgcgaagagcgagtgactgtgccgagctcggcaagacacgagagacaccgcatccaccattttgcgggattcggagcttgcctgtgcaccttcttcctccttcaacctcttagaagaaaaactcgagcagagggaaaagagagacctcccctcccagaagaaagccgcggtaaacctgcggcgaaaaggcttgtgtgcacacaaaaggacaacccctacacgttgctgctggtggttgccgtcgagaatcaaggtgcagagaaatggcagcagaagaagagagcttctctgtgcaagggaatgaaaaggatttcagaggagacggaaacacagccgctccatttttgcaattatggacggtggccgccgggtaaatcacgagaggcgcgcgctcgacggcgacgtacacgagagaatgagcgagttcttccgagtttctctctgcgacgcattggaagggagaagctcgagcgaaaacagcgaaaagccaccggaaaaaacggccagggcgaaggaaaactccaaaggacagccgtatccatgcatgcagtgccacaacaccttctgctgccgtggcaatccccggaaaaagttctccagaaacatgcagaggcggaggactgatgttttggcgaactgagtgtctcgaaaaacgaaagtttgatactctgggaggagacagaaagcgaggacgaagtgcgtcttcaattctggcagaaatgggacgtagactctccgagaggattcacgcaggtaaacataaggcttcaaaacacacagaagcggatcgtttttacaccagcgccgtccggttctctcctgtttttcctaccccggttcgctgcgaacttttccgctgcagactcggcaagaatcgcgagggttggtggaggcgccaacacggaagtcgagacccgttctattttggatttagagcgagaatcgcactcgtgacgatggatcgacaaatgcatcaagtgccacgcacacatgcaagtcaagtatacagaacttttctgcggggtactttatgcggaagaaaaacgtatggaggttctgtaaattgagttgcgtgagaagcgttggcacaggtagctccatctgaaaatcacttccgtgtgtccctgagagagtgcgatctgaaacacctagtgttccacgaggtcgagaagaaagctgtctcggttcttagtgcttcggaactgtcagggacatggcgaccgggcaatccaaaagcctcagcgagttcctctgaggattcactcgcgtcctgctatgatgggtgcagcaactctcccacgcagcatgctttatttgctgtacacagggtgtttgtacgctgtttcaagtacgacaggaagagtctagcttttttgggtgttttctgagcggtgttgcatatcccaggcgtaatggatgaattcctgttaccacacacgagggcttaggttcgcgccaacagggaactctttagggagggaaacacctcgcgggaatcacagatcgagaggtgggaacaagcgactggcccgcgaatcctcgggtaggaaaagagttttgacgccgcacgaatcggctgagatcaaaatccgtagctttttagaggtggggaacccagcgttctatggagcttcagccgaaaaacctgcaatccctctccattgatacagagggtgcgtttgctggcgaaaatacggagactcaggcgcctgtctcgttttcagaggtgcaggaaaggagtctgttaaacagggacgtagaaatactggaaaagtaacgttccctgacgcatattgagttctcttagcaggcgcctagggaagtgacactgtcaagagactgagagtgactcccag

SEQ ID NO: 3089 - DNA, 2392 bp, Toxoplasma gondii
  source 1..2392: mol_type = genomic DNA
tacacgtgcagatgggcgtgtaaattctgcgtttgtagtgtctgtatctcataactgaagtcatattcaatatcgtatctctgggtacacagtatatacatatatataagcgtacatggcatgactgtgtcctgtaaagcttcactcgactgtatggttgcacggggcacctgtgtgatcctgtggcgtttgttattcgcatccataagggttagcggatacagccctacggaggcatgctttttgatttttacttttccgttgcggcgagtgtctctcgcaagtacgtcaacgtttccttaggttacctcgaagcttgcaggatcccgttggcaacgttctgttgaatatgtgcatctcaaccatgaagtaatctttagcgtcctagcgaatcttctgagattgtgttgtacgactgtaagggagtgctgaagacatcaccaaaggttgcggtggaataaattgattgaaaaactcaccgtaaatcccttggggaaagcaggcaccacatccacgaataactaaaagggtgttcaatcctgacgcgtaactgagtcaggtagtcttagacagaggagatgtaggcgtgcacctagcgaccccagtgggcaagagcagagaacaggcgatacacacgcaaaaacatacgctaccgcaaacgggaaaatttacgaaaacgtttatttatgtatacataaacacatgcgtgtgtacacccgagacagtgtatgaccggaggtggcagcaggtaactacaggcaaatcctgaacatcacgcacggggcgacaggagacagcaaatcgagtaccatctggtgctgaatattctcaaagcaccagaccctgtcaacacttgagaatgagtcttccaagagtgtggccactactgactgccgctggattgtagaccgggggcatggctgtatgcacccttgtcggaaatacgagccccccacttccagcatcactatggaaactttggagggaacatatcgcttcgttacgcagccgtagcaaacatgcatcaagcgagacttcacaaacgctatgtgttgaatgctcagctacattaaagagacagcacgtcaatgaaggaaaatcgagtaaaacagagcccaaaaataccacattgttggcttcattaccactgtcgcaccacattaaaagagggtcccgagagggacttgccgtaaaacacggcaagctgaaggtcacctgcaggggtaaaatggtatccgtgtgtgacctttccgatacacatgatagtaatcgcagttttgttcggcaggctttgttcttggatacacacacgaacatattttttgctggaacgagggaaaattttgcgactagtgtatgcggagtttgcgaacacaccattagagaagaagtgtccctcattttgaaactgctttgaagcgtattttgacaagcagacactcttaccgtgaccactgtccgccaatcatgggggaaggaaccagggtcacccgccctaatgctgacaaaagggtgaaggtttgtttacatttcaagacagttaaaaaactcagaggttttcttaattcaaactgctttcaggcaactcacaccgtgcataactgcagacaatgggggaaataaactagacatcgttgtattcatcgtccgtattagttaccacacggggctgctacattgcgcgatggaacataatgacgtgggggattaaatatttagcgattgtgttcggttagaggctttgacgttctccgatgttgtttcaccgaccagcaaacgagcgcctctgtcgcaaggcaacgaaaagagggtaaaagtatcacagtttctagtcgcctcaacgggtacccgatcgggatgcacaccctccaacagcttgcagcggggcctcccacaattgacaggtgtgagcggctcgacagacgcgcaacaacgcgcatgcggtcttcctggttcggtagtcaccgtacccttgtgtgtatcgggcagtggcacattcaagtatgacatattctcagactttccaaccttcgctctgaggaagactagctctctgacgaatatattaggggatcattctcctcatatttccgtattcctctgtttttccatcgaaccagaggagtgtcagaagggcctccgacggtactcttcttgttacagtgaacttctaacgtcagtaaccgcgtcttcacaaactgttaaataaaagcttttctggaacccgtctggtctttccctatcaacaggtactcatgagagtcacagtcgacctctgcgcggacgctgcacacaggtggtcactttgtggcacacacttcttcagatatcttatgcgaagtccagattccatcattgatctctccttcgtgctcttatccatctcaaacca

SEQ ID NO: 3090 - DNA, 3502 bp, Toxoplasma gondii
  source 1..3502: mol_type = genomic DNA
gaagcagggcttgcagtataaagacgcaaaaagtacctgtctttcggctctgtgccggtctttacggggtccaagttgccatgtagacttactctgtgaatgacagaaacacctttggtgagatgccgctccataaatgagcacggtgatctccccgcgcgaagacagcggcaaacccgcttgatcaggctgtctgtcgtttttttattctaactcacggaactgtgcctgccgtggtcagtcgaaaaggctgagatgcttctggagtcgtttttcctcgacttgcagtactcttttgcaccgtctgtcgtgaaaccgatacctgcaggttccgcgaaattgcgcagctggttgagtttttgtacctcgtaacccacattcatattccacccacggcatgtgaattttttctggaaattctttttttgcatgcatgagttcgaatctcatcattggattgttttgctgtactacatggtcgttttctgagtaactaaatctaaagcattgtttctgattcgaggttagggcggcccaaatggttgtaaataattcattctttgcaaatagattctggtgggtgctgctctgatggtctttatgagcaaagggtctcacttcgcagctgctgaactcccacgttttccagactgaactcgtccacctaggcagattttgctacccgttatgttgcgtatacccatagggaaacacaacagaccataaaccacgatacgagtctaacggaaacattaaaagatgtcgagttgttatgaacacaactagatggttagctcagaagcagccttctttagaaggcgccaaaagcttaccttttgtgttgaattagaactgggttcttttacgaatatagaataaatgaaagtgaagccatgaaacgtctagtggcacgaaggagccgaggctgggaggtaaggctgaagagtcaggaacgccaccagtttggatggaatgagttttaccactgcagctggtccaccgtgtaagttgtgtgtactttgtggaatggcactacctattataatcactgactgtaactccagttgttagaaacaggcaaacaaggctctcacagtagctcgaaccggcggcggagctggaagcagttttgatgtgtgcattacgcgcccctacctgtatccggtgcagaaattcacactcgtcgctcatcgacgtatgaaatgggaccgtgacagggtgcgtctcatatggggcgcaggcggtcaccacctttttctggtacaccaaaggatggtagcggagaaaaagaagtaacaggaggtacagttatgataaagagaaccaacgtttccagcgaaagtttcaaataatagccctgtattcctacgtatctaaaaagaactacaacatttctccttatcaagaaatgcggtcgaacagtgaacacagatcggtggagaaaacgttcccacatcaaaatgaaacgaggctataaacgcttgtgagaaaaccagaacggagagtgctagttgttttcatttgcatacacccagaagtggagattaagagggaaatttgattgttgttttaacgtgccttccagagatgggaacaatagactagcacggcgtagaagggtgacaacacagttctttccgctgatttctccgttcagctcgcctttgggtctgaagaggttgcaaaggaagatatgaaaataaaagtacgcctttttcagcagcgtgacttccctgtactcagtccgctgtgctgtgtgaatctcacctcacgggagcgggagggaggcttccagtcttgctacagcactcggaactcgaagttgagattctctgccctgttacaggttcctgacttctcttttctccgagtatgaggcgctacaccgaagcaagggaaactttgagtcctcgatgtccaaagaacgagagtacgtgttggtatcattcactaccaccagagtgcaagcagtcttgtatttccgtatcttcgtgtaaatctgaggaaaccataacttctacagttcttaataaacgtccaggctacacggaagagagccgtgggattcaatttagcagacaaacttctccttcgagcgtcgtgtgcttgctgctcatctaccacttctcgtttccttgttcgcgtcgttcgtttagaatatacacaaagaggccctgtttcccacttgccgctgcgcctccctctatcgaggtccttcaccgttccttggtgtcggaaaagtgtccgtttggtggccaggagagaacggttttgctcgtggtatgtgtggctctatgtgtggacagtgtgctggatgagagacttctacagctgagccgctactgctgggattgcgtatattctatgctcccactagtagaggattcctaacaagccccatttctcagaaataagcaagacgcaggacaaaataccgatatttctgtaaatgctggtcctcagaaaactgaattgcatgaggagcgagtcgcccggtcaaccgagcatgcacgcgaaaagctggggaccgggggctgcggcggagacccccaaagcgatgcaactgccgctgtggagtatgccgctttactttttcaagtccgacttgtgaacgtgagggatctgcttgtgttttgcaacatcgcaatacgccaagtctgagagcactacggatttgggtggccacacgtgcaatctgaaagtcaggagccggcacggcccccaggtcacccgagcccgaacaagttgacaggcttttttctgtttcccctttatttgcgttttgtcagcccggtaaactcttcctggtgttttagtggtttcgcgccttcaaatcaaaggtcttttccttcgatactgccatggctgccacgccgccacaccggtggggagtcgccgcccggcatctacagacattccttccatcgacaaaggcagcgatccgcctaaaagcagtctcagtgtgaacattgtgactgtttggcttcggttttcgtggcgatcgcggttttttgcctgactatgccactagaatatggctgagaagaggcggccctacggtgtgacggtccaagctctccgtcggggagacgcagcttcctcctgtatcaataaccaattcatctggcgagtcactaattgtttccttccgcgagtatcatcactggaacccgcagactggtgaatacctgcgccgcctcagggtttctctgcgtcgtgtcggcggtcgcaaacgtaagaggccgtggaacactgccgcggctgttaaggactacgggttcgttttctgttctgttaccccactttgtttgttgtggaagttcattttccttccctagacatctcggtctgttccgatccagtttgagtgcctctgtgcgcgagcgatgaactcctgaaaagttcgcctgcgctcccgctgcagtcgtctccgccccgttcactaaagagaggagaagcagcggctgttccaaaagacaagcgaccttttatggcggtgaaa

SEQ ID NO: 3091 - DNA, 2173 bp, Toxoplasma gondii
  source 1..2173: mol_type = genomic DNA
tttcgcgttgatgtcgtctctgggtaaacggaaagcagacgtctcgatcgcagccgtcgtcggccctgggaggaaaggaagcgcggaagcctttttgtttcgctcatgtcgagaaaacgacacactgctttaccaggactttccgtaaaagatgtgcggcaccgagttgcgtcgcacatctctagttagccagtgcttgcactgttgcgacaagaaagtgcagaaataaggttgtgtcttacccgatcttccatactgtttctttccatttacgaggaaattactttctcgcgttcttgtcctttgaggtcccgtggacggcgagaagagtgtcaaggagaaggagtgttcatctgagaagcgagcatctgcagaatgaaatcgagacgcacttcagttcacaaatacacaaaacggttccgaccagacatcccccagtacgcagaaacctggcgagacacaccaaacaggagaagcctttctcgagatcaacaaaggcgctaaggctgtagatcaagaggggaaacacactttcttcaagcagatcgaggccactgagaaaagctgacctcgcagaggcggaagtttccacgccagtcgcacgcatattggtcaaatatacaaaagagaggtttcccccctgccggcatgcgacctgaagatgcatgcccactgtctcctctcgtccctgttctctttcttccccagtgtgtctcctctctgcatcgacccaagcaaacattactcgcctccttccccttcttctcaccttccttcgtgggtgccgactgtcttccgagacattctctccactgagatgtgaaaaacagtttgctccctaatccaccactgaacgtgtgtcaccgtacaaagaggaactccactgtacacactggtagatgtactgtcctctctgactcttctctctggcgttggcatagcaaggttgagccgagcattgttcatcacttttaaacaaccttcttcggcgaaaagagggacagctgttccgcgtcaaaagagctcgcagggtctctgtgccctttcctccctgtcctaggtgtgtcggactgtctctgaaaagcggtaaacagactgggatgcgatgcaggttatctctgcgcaggcgcagcttgttccttcttcgtcacggaaatccaaagttccgtcgagtctttcttgttcggttcgccttttaacagctttttgcgtcgatacacaggaagagtgtgtatacacacaccgtggtaggactcttccgttttgactcctcgctttccgtcattgtgcgttcagccatttgagtcgctgtcacagtctctccccgcgtcgtcttcattttgtagagaaggaaggcgtcacgcttcgccgagaggagagttgtctctcgcctctctctcttctctccgctcctcgtctgcctcgcttctactctttccttccctgtggttcgtcttccccggcctgattccccgttctttccccctctcttccgaagacattttttctgccttcctcttttccttgtccgtctcgcgtccgtcgctgtgactcgctcggtcgttccttcgccgacaggacagagcaaaatagtttgagagcagacttctgttgaactgcgcgagaagagatttctcagaggtctctctcttccaaatcccaagcaaatactgaagccgactcaaggccgtgaaggtcgattcagtgcatgcatgcagtctgttctcgccgctcactagcagttttcttctccgcatttgtagggaaagagagagtgttctctctgccagagagttggcctccaggcgcgaaaatccgaggagcagttgttccactggctccctgtcccctgtgtctcctcgtctctcttctggctgcggccgtttttctcgcgctagctgtctctggccgcagccccacaaaggctaaaatcacacagatttgccggttcgccgcggagagacacaccttcgtctaccttccggagtcctcacaagtttgtcgatttctttctctcggcttctgcttccctcactctctcgtctgtccctggagagagcgacggcgctggtcggccgatcagagggcacagtctcttcttttttctcatccgttttcgtgacgttcttccgcgtttctgccggatcctctttcctttcgactgctctcccca

SEQ ID NO: 3092 - DNA, 4555 bp, Toxoplasma gondii
  source 1..4555: mol_type = genomic DNA
aatcccagatgtttacagggatttctccgtcggctacagaaacagcgacaaaggcgcaccgcaagcaaaaggcttgacttcccgtttccccccccaagtgcctctggagctggaacatccaagtcgcagagcctagagtaggagcacttttcgaatatactgtggttaccgctacgctcgatgcagtcaacatggtggtctcaagtgggcggcatacatgacgccagacaccttgatttctggatgactggacggtatgcgccacgcctattgaagtgtaaaggcaaggagaatctaaacgtttcaaacgacttacggcccgtgagtttgactctgtagtcgccgctttggttcgcaatagccactctttcttcgctagccatttcctccaggagatccacggccgctacagatttcgacgaaagagagtgtcttaggctttcagagcgaaacatctccgatggcatcgaggcgagagtcgcccgcctcacaggagtttctggtgtgacttctggtgccattacgaacgaaccttcaggggaaaataaacgcgctagcgaaagttgtggcaccccagtgctctctagagtctgagagcgctctaggcctgcagtgacctgttgctctgctccatcagcagattgtatgccagtttgcgaagacatttttgcagtttctgccctggaaaggctatgccggagatgagaactatcaacaagaacaacgggacctaccagagtagatcattacacacctttcgggagtaacaagcacaagctgcagagcttcttagtgtcgctgtcactgatcaaaacactggatattccgacggtcaacagaaagcggaactattgccaaacatcggtggtgaaatgccaacggaacaaagtgttgaaatcaggcctcacgttaggttcctcctgcagcaggtaagcgccggtgtccttctcacaaaaaagtcgcaacagtcagggcgttgttttcccagaaactgatgtggtttcacaaaacaaacgagagagtgtgaaaaaggcaggggtgtcacggcggggcaaaagttggcgagagccgctggaattttgtgacggcgaggagggccagcttaggagcggagtcaatcaattcgcgcactacaaagcacgagattcgcaaagagagcacgatatacgccactgtctgtatcgcagcagctctaacgcgaaaatgtggtcaaatacaactggaaaatttcggccggttctgtagagagtaatgccacgcgcgctgacgggagtaccggccgcgagtctctctcctggcgaggttctagacgaagaaaaggcaaatgaaaacgacggctagtgtgttccacatgtaccaccgatgtgaacacaggggaaaaaggaaatgaccttctaatggggtagcaaaaaactggaggcagaggcaaacactgtggagatgttctcgatttcgccacacggggattcatcactcaaaaccagagaccgcagttgtcgcagccgtaaaaaaccagccgtcccgatgctcggcgtccacggtgtgactcgacagccagcatcggcaagtcatcgcgcggtgagttcgcaacatcgaccagcgagcaagacataggacttcagttctgtgccttttttgtgtgtgcgcctgtttttctttttcggactgaagcagcggcaaagaaaatcataagctgtgggtaagcggcgtgtcataccactgggaagggcgcggtcgagaagaaagcctctatgcatttattcgacgtagaacagacacaattctggggcacgtacggcaactatgatgctgccggctggcactggggaccgatttttgacgtctctcttgtcgataagggggacgcaaagactcatacaggtgacattgttagatgattttgaacttctgagcctacagttgattcactgcaggtctcaaaggctggggcaacggattagttcactggatggtaaccgttggttttacaactatatgcaggatgcgagggctgagccgcacacagggaaccacattcatcatgcggtatagagaaatggaatgaaagaaaacttgcagttcgcatcagcaactggtgaagattacggaatctcacttagcacccgcatctgtaggtcgtgcgaaagaggactgctctcacgcagtttttttcgcgtcagagttggattgcctccttgtagttgcagtaaaatgcgaacagtggtgaccgtcctccaattcagacctcctgattcagccagcatggcatggaaaatcttgcaccaccattcgtgggtctttgctactagagttaacgtaacaactggctagcaacacacatcgacaacctggcacttcacgctgttccggcttgtagtgatgcaatcaccgattctaaatgcttctggcgcacatgtcagtagactgtggcaggatatctatccgactcctgtggacgagttctctgtaaaaagccgtgagtctgtcgtcatggcgttctgtacccacattcccttccgtaccacgcagtcgctcccttgtgttttctttctcagaacccctctgctgcactaggttttttcaagcttgatacgcacttaacacgtacgctaaagtggagaaaagactttaaactatgacttgccagccatggcggcggtgtatattggtgcgcgtcaagtgccgtaactcacagacctagtggataaatcgaattgcttttctaagtatgcaaattgagtagccttgagacgccccataggatggttaaaattaccctcgattgtggcgaaacgcacacaagccgattcgacgaacggttctaaaaacgactaactggcgtatttgcttccgtctgagaggtgacggtgaggagcgcgacacacctgacatttcgcttataataggcatcggtgcatcaccctctggtggactcgcagttttggcgagtaggaataaaggtaatgactcagtttattcgatctgagttctccgcgcccgtccagctcagctgtggcacaagagaagcaaacgcttacctttgtgaatttcttgccgcgagaaatctcatgccgcagagcgatttcccgtgttggcgcgctgtctcttgatgctcgagagagccacaagcctgtgtggatgagcgacggctgtgactttttgtgcgaatagtatcgtccaagctaccttcgacttcacttcacaccaaacctccgttttgccggttttatacgcatggctcgagcttctttctctggtagttgagttggcctttccaatgttgtatcacctttttcccgtaccctgtgcaggacgcgaactggcggaccattccggggactcgttcccttcgagtcgatactttgaaaccactggaggccagtctggaggagacacacgtggattgaaatgttaggcgtttttctcaatgacacttgggcgcctggatctatttttggagttcataagccgtgtcgttgtctgcgtcgatgccaacgcgttaaactcgacggcgaacccggggtgttcaacgctgcagcgacagaagccgttgactgcagttaagcacgctgggagcagacgacccaacagtttttgacaacacagagaaatcccacttgttgcttttttcgcacgccagtcctacctgagaacactgaaatcttctggcggatgtggctttgtgctaatccgacaccttcggtttcaccctgaattagtgtgctcggcactcgagtgagcttctaccaggtagccggcgtttgtgccctgttctttttgttcttttgcgttcgcaggtctgcgtctattcttcttttcaactctgtaactgttttgaagcaaacggttttcctttaggtcgccgaaactggagatccaggcttgtcatctgtcagtcgtacctcctctgggcacgcgctactgctcttcgccacaaatggcttgacttacggcgttctgtgttcatttctagttctgtgcggcttccggtgcttcttttctgatgcttgtaaccacatttaaagctgccgacgtgtctttttcgttgattgcccatagttcgcgccttcgttccctttttaatttccgtacctttagtcgtgtgcttcactgcccttcctttctcctcagctttcttgctcttcgttttgtgcctcactgccgttcctccttaatttccgcgctctgaatccttcgcttcgctgctatcttctcgatttttgtgggttcctctccttcgcttcactgcccgtttcttgtcaatttccgtgctctgagtcttgcgtttcccggtagcatattctcaactcgctcttcctggtaaaccgcgaccgcgcaaggcctcacttttcacgcgtgtttcgagacttgtctttcgcgctttcgcgcctcctcaacatacagcttttcgcgtccgcgcgggacagccgcggtgggcactgacagcactttccctggtttgtttcgcaggcgttcacggcggtatttcagcggatttccattcctctcagaaaggaagtccgttaaaagactctcaatggaggagctttgagaa

SEQ ID NO: 3093 - DNA, 4410 bp, Toxoplasma gondii
  source 1..4410: mol_type = genomic DNA
accacactttcccgcgactgcgcagatccacagtgataccacgacttggacatgtacgtatacagctgtttacatacacacatatacatatatacacatatgaatttatgtgtatatatacatatacatatatatacatatacatatatatacatatataagtatgtaagtatgtgcttatagacagatagatattcatacatttttcgacggaggcatgcgcactgagatgcgatgaggcgagcgcctggctgcgaaaaataaaaaattggagctgcggcgttccccagacgccttctttccttctgtgcgttttgcgtccgcttcacgtcgaggcgtggattcgagtgtcgtggaagaaagtggaagcctttctgttttccactgtctctacccagtcgcttacctcgcatttcatccatggttgctctcgtcgaaaatagaaaacagagcctaagagacaccgaaactctggcaaaccgcctgaatggtcctcgcctcgctttgcgcttcctcttgctctcgctcgtgtcttgtgcgtcctgttgttatcgctcgtgttcttcctctcgttctccgcgagccgcgtggaaaacaggcgaggcaagctgagagagtgaaacgctggcgagacgcccgatacttctgtacgtggggtgtatgtccactggagtgtgtgtaccccacagaaagggcagggaggaggaggcgactcggggaagacggagagttgcgcaagtcgaggaaaaacgaaaagttgggagacaaggctccaccagacgttgaaaatactcacggagaacagctgaccggaacagcgtgcgtacacgactgcagaaaggcgagtgcagggtcgcggagacaaacggtcctgcccttggcttccctcctgcagacagtcgtgctcgactcggagtgtggaagaaagcgacgacgaaatcgcgcatgcagatctttgcacgtagtgccccagctgtcacccttccgtgaactggccgaggcaaaggaagatcgccggcgacctgctctctgccgtggaaggccttcttctcggactgcaggcgtcaaaaagcaaaccgctcgaaagacaagcaagtcgtttctgaagagtggaggagcacgcagtgcaggggcggagaacgaaccgagagaagagaaggcgcgcagagacggaggaatcccagtctgcggtctgcgtcttttcgcgcaactctgcgtcttcaggcaatttctgggtgccttctcggcctccccaactctgcgcttgccaaggcaagaactgccgcggagaaaaaaaaagagacaacggagacgatggtgcgcgcgagtcgacgaaaaatcacgagtgtacagagccgtcgagatggaggtggaagcggcgaaatccggactctttccacgaaggaaaacggagaatctgtgaagtcaacgcggaaagaaaccgcaggtttccccggatgaaaggcggaaaagagccgcacagggagcaacgagaagtggaaccgtacctggccgcctgtgcttcttgccccctacatccacgcctgttcagtccagctgagttgggagagacaccgagtctctggagcagagtttgcgcagagaaatcgagcgtgaaaatcaattcaaagtcctgtttcgaaaaaagtttgccgcgacgtctgccgagaggatgtacactgcgctacgaccgctcgccccgcgactggcagctgtggcgacttcgcggggagagagagacgacagaaaaagcttctttctctgtataagcgcgcggccgccaggacagcggccgaggctgttcgtcggcgaggtgactctgccggaaaaacgtcggcacacaggcaaaactccgcagtttagtggaggagtggagggaagaaaacggtgtgctcgtcacgcgttctctgccgacccccctctctcggtttcgctggcgcttctctcgtccctcgtctgtttccaaattgcctcactcttgcgcaggacgcgttgtcgatcgcagcggagaaggaagcgcgaggcttcctcgagaaccggagaaaaatcgacagagaggctcttaaacctccgaacagcagcgggagaatcgcgcgcgaccgagagacagaaggacgcagaggggaccgcgaggctgctcaaagtctcaggagaaaaccgcgaaaagtgtatgcacaactggagagaagaggtagagcaagaagcgatggaagaaacgactgaatctgactgcgttctggaagagagagacgtgtggacgatggccctctaaaaagcgaagagaaagtgacccgggggaggaaatggagacagaacagagcacggggaggacaggtctggcagtacctttctgcgaatctcagtccactgtcgaaaacgtattctacgaagatcgaatgcagaggagacagagggaacgcgccttgaaaggtttctttttcatccgaggaaagcagtagctattgtcagtagatatgaaactaaggcagacgtacacgcggtagttaaaaatctgtaactccagttagataatcctcgagtcatgtgaattgaactacacaagaataccagagaggcttttgtgtagcatgcaacatcctaacttcctgacctgctgctacttctcgaacaaaatgttgaacgctaccaaatgcacaagatactcctgaggtatgtctaaacgctagagtgatacctgtaattatgtggagtacaaagttcattgcaactcagaagccaaaactgtaaaatgaatttcgatttagaacacaccggtaaaaggacaaggtgtgctcggagcatctgtcattaacatatgaggataaaaggcaaccttaagcgcggtatcaatgccgaatacctgcaggagtgctagaaccatttaaatgtagggaggagacctgtaaaactattacaagacaacgtataaaaggcaagataaaacctattacaaagaatcgccttcgtgttgcatcagatacgtagtatccttcaagtaccaaatatggtattagagaaaggaggtttgtggtgactgtatcaccccagaaactcatttgttcgccaagtttttatgacagctaccccactggactgttttagacagctaaaagctgttggatttcaacatcgtacgacattaggttattccatatcggtgatgctctacgcgtatcctgttttttatttacggtatgtaaatgcgctcaaggtttaaccgtcgggccatatcgatcgtcaaattcaaagataatcctatttttaaaagttcttgatctttcccggagcttctcgagtctctcatatcacgcgagacttgctacctcctcggagttttccggcgtctcgccctcagcgtctgcgccgtgtgtacggcccttcgcgttccgtcgcggggggacttttctctcgcgcattcgtttcgagttctcccctgcaaatctctgcattctcaaaggaaagatctcactttcggagagacaagcagcgacgaacgagaaggacttttttctcttgttctctcgcggtccgcccagcacaccacagcgcttgtccgcggctgcaggggcgctgtctctttcaccggttcttttcatatctgcattttttttctatttttctgctctttcgacgagtacgtatttcttggacttgtgtgtctgctgtctcgcccctttcctttttttgcgcgcctcttctccctggttcaagttctactcgatctcccggtgtgctcagtttcttgacttccgtatagttctagtccttcatgtttcttcctcgcgaaaaagaatttatttccgccatccacttgcgctgactctcgatttccggaatccgtcgctggtagaaaagtctccatcaaggccatctcaagttttttttcttctctctcgcaagcgccgtgagttctccctgttgggaatctcttgtctccgtctgtcccggtgtacatacaccgcagggaaggtccgtccctcctcacacaaagccccatacgcgttcagcgtctgatccgcgaggttcgctttttcactcgatgctccaaagaaagccagaacgctgcgttctcgcgcgacttgtgcctttctcctctcttctttctgtaggctcgaagcctcgcttttctgttcctgtgctcatcacaccccaacaactcgctcgcgctctccgtcgtcgactccctctctcatttcttcactcatccagaagccgactcccctctgtctgcgtcgccgtccccggttcgtctctcttcccccgaggctctctgcagcttcttactgtcctcttcttcttcttctcctttgccggcgacctcgcgcctttgcgtcgtgtgtctctgaagcaagagagagcattttttgttctccgtttcttcaaaagaagtcaccgacgcccgccacacaa

SEQ ID NO: 3094 - DNA, 1839 bp, Toxoplasma gondii
  source 1..1839: mol_type = genomic DNA
atccagttcaaaatagactgctccattcctggagagcttgcgtgatagtatgccctaagcaatatgatgtcacgatgcccttcttacacaaatagtacagtgctggccaagctccttgtatccacttaactcgcttcgtaattttcattagagcaaacgatctaaagcaagaaaacctcctcatgcaacaagatgaaagtcgaggactgtgtcttgtctttctttaacaccaactttcacgacacgattacacgcaattgggagggattacacactctacaaagagcgcccgttttcgaagcacaaatgccattgcaacaaaacggcaaaatacacatatatacacccgcagccaccccaagacagcaatcgcagcacctgtcgaattctaccaagccacacgtacttcagaagctttgaagaatgatttaaatgcattctgtggtgattcatcgggctttccacgagtcttgggacgagcaaaacgtgcatacgtcggcaaaaggtatgcgagacttccattctagcggtagaacacagcgcttcttccgagagtccacgctttctcggactcgactcgtctgtatgaaaacaaatgcgggcttctaggtcccctctttgtccactgacttttggaaggcgagatggtcaccttcacatctatcgctgctgcccacacaggcggcgacaggaatccacgtaacacataaacatacttagatacatatataaatatttatacatctattacgtgtagaagatcgccgctctcgagtgtgggatactacacacaactacctgtatgttgacctagtgcagtggggggcatgagcagttctttgaaagggaatagatggtgatttatttacacggggaaaactggaagtcgctcccgagcctaattaatctctgttttacttgtggtgttgaggaattcccgctctttccacggcagaaacatcacgttttgcatgccctggagagacgcgtcttcttcgccaggcggctgatgcgccattcagagttgtgtgactcctatcaaagaaaacagagctaattgccagccttccgagatgtatttatcgtcctgctggacagaaacctccaggtgaaagtgttcttagcagaccaccaggcgtaaaaacgcattcgctccgagcggagagcgcatgcacgcagcttgttttgcgtctggttgtctttacactgtcttgtctccggcaaagtgaagacccttcgactttcctccaaagccaagcggcatggcagcatgaagccgtctgctgcctggcaggcaatgtcgaggtaagtcggatttgcagttgttcttttgcctctctctttgtccgtcagcgtctccatctcacgcccgccgcctgcgtgtggaccttcgcttttcctgaggccggacttctcttcggtcctgaactgtcgactctttcctccttctttcagcttgttgtgcaagttgttcagctctttctccccgagagttgccctgcttcacgcaccctctctcgcagccacaccgaagccggaaacgatttctcagtttaccggggccgctccagactgagacgctttgcttgactgagcatggcaggcactttcgattgcgtagatttctttggggctcttcccgcacaaatttttcctctgaactccggctgcggcgtctcgagtctttacaaaaatgacaaggaaaatctcctctgagaaaagaatgcgtggatggtgcggaggtaaacccacatatgcgcgtgtgtctgagaggacaaggtttcgtttcatgaactgacagacgctgctctgaagccgggactcgccggactgtaaaga

SEQ ID NO: 3095 - DNA, 1794 bp, Toxoplasma gondii
  source 1..1794: mol_type = genomic DNA
aagaaagctctcgacagtacgaggccagggtcagcgtggttagcatccgcagtttcctcaaaaggaccggcggcagagcagggaaatggctggcaccatcttcgagagacgagctttctccgacggaggaagcatctgatctcagaccttgtcgccgcctatgtcgcccttctcggtagtcttcgacggtccccgtgctgaacagttgcagggtagccagaagttcagtgagggttagagagacagcggaggaaagagcgaaagatacagaaggcgcgtcggatgcctgccgaaggagtgctactttcgggtgattgagcaactctgcaaaaaaacagagtgaaggatgcaaaagagcttcaaccagaattgcccctacagctcgaggctcgtcgtcgacctcatcgagtcggcgacagaagatttccacgcagaagtcggaggaagaaccgaacgccgaagcagaggttgaacacggaagcggggggcacggtggcaatggcattttccacagctgcacgactacacagtcttcaacagtgcaaatggtcgctacgtttctctcttatccgcagcttccaccgcctcaccggcttctctccgacaagggagaacacagagttaattcttcaccaaggacaggggtacgtagtggatgtcaaaagacctaaaaaggtgggataagtgtgtcttcagcctaacactcacaacgagaaaatgatgacgcaacagaaggaagtatgtgtcaacagagggtatgtttagccgggaagttaacgtctaacaaatgcaaccgcgtatcagcttgagtcctccgtctcagcaggactttagagagtcataaatttaatgctcacacgcactttgtccacagaagaggtaacaccaacggcaaaggaactccggacgaagggtgaaaagcggagtagtggaattttggattccagagaagatttgggcatactgtgagcaacgactcacacactggggcacccgtcgacactagagtggcggaaatacagccttttcagctgtaggatcttccgtccgagagtgaagcgcttttctcttggaaaaagggaaagggcacatgatctaggatttcgtacgcggcactgaacagcagattcgatgatgccgacgactctgtgacgagacagcactgtatcaggcagtaccgcggggtcgcctgtgtcccaaggaaaatcaaaatctgccttaattacagatacgccgaagcacatgtagacgactggtaaacggttcatggggaaatgaaccccccccggaaaactcgcgacatcaccgaaacccgcgtagctcgcaaacggccggcacacggcaatgtgcatgcgagcttcgcaggctgccttttcattgaagtcgtttcctctgtacaaaaggcgccggacaaacagttgaatgtgttcccgaagaagaaacatttttcttcaaacgccgtttggcggcagtccgccgttacacggggaaaaagcgaatcttttcccgtgacgaacaagcgctggcggttgcaactgcatgtgtagaccaggacctcagtgttcggcagcagctttctacggaaaaaacaagcgttcctctcggctgccgattcgcctcagttgctgtcttccctcaacacggcaaaccaggctttatgccaccatacaaggctattaatgttgggtcttcacgtgtgggcttggcctcaagcgtgtgctcacgacctagcgaggaaagaacggtccttccccagtgtacgatagcaagcgaaattgcagaaaactgacaaga

SEQ ID NO: 3096 - DNA, 1902 bp, Toxoplasma gondii
  source 1..1902: mol_type = genomic DNA
tgtattacgctgtcaactcaagctatggtgggcagccggtgtgggttctcctcgcggcttgtctgtgccaagcaagggggtttcctttgcacaggtgtccgttctggaagtcaatccgacatacgcagcactccagtacgttgcccacaatctccagtggtgtgctgtagacatcgaagtgttagaaggatgcttttgttcgaccgtagaagccgttgggtacaggtggcacagtgctacggggaagcgccgcgggaaggtccacagctgttggggtgaacaaattcacaacctgagagaaaaaccggtctttcgtcagacctcagacgtgagtgctggttctagcatactttgatcgacgaaattgagttctggttagcggaagaacctcctgcgtcgctactctgcccgacatcatcgttctgttgctgtgccgttggcgccaagtggtccttgtcaatgggccctgaccatttatagatgattatctgtattatccatgggcactgacatttcctaccgttctgtgtttgtcgaaagcgcattcgaggagtacagtcgagaccgcctgctgcacctttggatttattcggaacggtcactgccactccaaatgcactggtggtcgggtgaaatgcttttttagcggcaattgttctggatgtcagggttgcctgatcgcagcagtaggtcgctccaagtaaaatatctacgaaagcatggcttacattgaggttggcaatttcgttgaggattgctttgtcttctggaacgcaaagtatgtgatttcagacgtacccagtacaaaactgctatcacacgcactgctttgttctaaagtgtgtcggcccatttcggttatttcgtcctgaaggtcccgtatgatcgcagtcttctttagatcctccccggagagagctcaccgaaactgcctccgccattttcgctgcctgcacctgaaacgaagaggctcaaacctcaactccgcacaacgttacacaacccaccgtctgtgctacttgtcttgcttcctcgagcatcgctgcctcgtgttcgccatccttcgaacatgggaagctggagcataaagaccgtggaatagagtggggaactgattactcacatatatgcgaagctttatcgggttcttgcggaacggttgtgttatgtacattcctcggctgcgagtgagctctcatagacagtgtcattctgtttcatcgcctggtaaaccgcttgccttagttcttggtcattcactggagtcctagccgctgactgtgcgccttgttcgacctgagtgaaacggctccctgccggccgccggggaccttgaagaacttcatcgaagactttctgtgactcatcgaatgcagccgtaaaattctatttcaccgcttttctatagctgatatctagcagttaatatcggatgtgttaccattctcgctctttcagcttccttcgtcgtttcccaaagctcgcgagcgacggtgacatcgccctccggtatttcccggaagtctgggaccagagtcgtaaagttgtctatattatccatattgagaccttccgcctgaagcaaggtggttataatcaatgctgaaatgaagcatagcgccatgatttttatggtcaataaaaaccgtcgagacgagccaatcgttgcgctattaagaaaaagtgggggtttcgtcgtccgtgcgaaatccatgcggatcaccggtgtagagacacagccaccgcaaagtcgcaatctaccaaactgtcgcgctttcctgcttacaagttcgtgagagcctcttcggatctcacgtgtgaaacaattagtcaaatttgtgattttccatggaaccgcgtacttgttgtatcgccgcctgtccgttcatgtcctgagcacca

SEQ ID NO: 3097 - DNA, 1893 bp, Toxoplasma gondii
  source 1..1893: mol_type = genomic DNA
agaacagccattgcgtcctccgtgagaatgagataccactctgcttccctctccttcaccgtgtcttctcctcccctcacctctgcttctcccggtgttttttcctctccttctttcacctctgcgtctccatcgttcgctttctccccgctttctctcatctctgcttcggcttctcccgtcgcctttgcttccacggcctgcgctccagacgcgtccggggcttgggtgggagggtcggaggcgaccgcggcagccgcttcgctcttcgaggacacagagggaatagacgaatttgaagaaacaacgaggctcgaaggttgttcactctgctccttaggagaagatctttgcagtgtcgaccgccttctccctctggaggagacgggagacgacggagagggcgaaggaggcgaagcgttctcggtctccggagtggcagaagtccgagcattctttgcggtccgcgcacttcttcgaaccatggtgaacttgctggaaaacaaagctccaaacaaatctagaaatccaagaaagtcctctccaccctcggcgaagccttcttcattccctctccttcgttccgatgttcggcactcctttctcggcttttgcttgtctcttctctccctttcctctgtctcgcttcccccttcagggccgccggcttctgtctccacgaatgccttctcttctctcgaaatacggggagaccaaccacaggataccgagtccagagagccgtgaaaaacgcagctgtggcttcacgcgtggattgacacgtgagagaggtcggcgacgaagggcaattccgacagaggcttctttcgggagacttcggggactttgttacgtttatcttctgacgtcgaacggaaaatccgagcagccgcgccggcggttgagaagacaccgaacggacggcgacgcagacccgccacacacggcctgcaggagagaagacgcattcgctggaggaaaaactttgtccagaagttgtgttttgatgtcgctgcttccgggcgccttcccgctgctcaccacgacggggtgcatggacaactgagacgcctcggagaagcttctgccgccgtggagagagtcgaagacactcgccggcggagaacgaaatgcggggaaacggagaaagggaacgagcgaacacctggtgaacgagggcgggacctcgagaaaaccgagtgagttttctcacgacaaaaaaccagagaaccacgcacaggttcccccgtgttcaccctttttctcttcgactcatgcgtcagcagacatctgcacagagagcatgccctgggcgcgccaacggcgagtcgacatggaaacgcgaatcgccttctcctgctcacgctgtttccaggaagatgttgacgcgtttgctcagaaggaaagaagaaggtgtcttccgtctagaaatttatcttttctcttcctgcgtctcgcaactgtctgcaatcgatagcgcgccgcacatgtacgcgctgcgaaaggtgtacatacacccggggacagctgtggcgtgtgacacgcggacaagaagcgcacaaacgcaaatgcgaagctgagaggtcaagtcgtacacagagaaagcagagccgagtctctttctctggagttcttttctgccttcctttcttctctctcgtctcctgtctctgtctccttgaattcgcctcgcgcctctcccgtcttttctccccgtgcttcgcttctgctcggctcgatgctcgctgcggttgaccctttcgctctcctcgttcccttttcctgcgcgacttccgctcccggttgcttcgcctctctgtccttcttctctgacattctcgctcgtcttcacctcgactccgctctctccaacttcctctccgcttctgtcca

SEQ ID NO: 3098 - DNA, 2758 bp, Toxoplasma gondii
  source 1..2758: mol_type = genomic DNA
aagaaagttcgaaggctgcgaacgggagttgggctttgtcatttgttggcgtcgtggagaatactgtttttccaaagattttttcgaacgaaaatgggacccttgtcgaccgaaagtctcacggatttcagattcccgtcaccagctggtactgaccctctggtggaaacacagccggtttctgtcgtttctactgtctgtcgaaaacctgtagggttcagagggttggtcgcaaaactgtggcacttctgagggctgcaccactgtcgcgcatgtgtcgccttttctgtggtaaggcggctgctgtcagtccaggggtagcacgccacttgtcttgtaccgaccttaacgaaatttcctttgttttccaaaacgctttccacgcttacatacacataattggagtcacactcagcatccaagaccagcattcttctgaatattcgacttgagttttacagctctaggtcgcgtaccattatttgcacagacaccgaaactacatcttccttggaaaattcaagtccacggttccgatcagctctatgtgttcgcgtaatgccgtctttgtacggaggacagcgtaacttgcgtgttccatcccgatggagagactgggtgtcgggctccccagaacgcacgcgctgtgtatttcctaggacaaacgtgtttgatgtcagttacctacaaaatctgttcagaattcactcgtactgatatgtagagcacctcggagacaccgcagttccgtgtgacattttttcttcctcaaacacgctgtgtaatccacaacttcagttgcgttgcgtagtttcttggacctcacgcaattcgccttaccacttgaacacaacatggaagatatgccgttctggtaccttcttcgaaggtgttcctgaaaaacgccttcttgtacggcggttcgtccatcggttgcgctttttcacaagccttttaatggattctgctgagtttttaagccctcatacctataggtctgcttgaactcaaaggtcaaccaggtgccaacgtacactaattcatgatgctgacttttgtgtgcagctaagatgattctcggttttgcttccggaagtttagactgctgaagttcgtgtagtggtagcgaggatcacctttccccgtttccgatgtttacccgtataaaacgcttccgtgttcctcgctgtcaccccagtggacggcttgatacagctaaatgtgttgaatttcaacatccgacggcattaaggttgctccagaacagtcgtgttccaggcgtaacttacgaatttctgtggcacagtagaacctggatccggcaaagaagacctgcaagaccaatgctcccactggtagtattaacacgtaccgatcggactgtgttcctcaccccctgccacatcgacgatttgaacgaaagtagcggaacttgggtccggaggtaaagacagtcaagacctaaacaaacggtccacttcgcagtaactactccttggttaacgttaacctgactgaagaattgtgagcctgtggaggccggtccgttccctaggcacgactgtcttgccccgagaaacaggggcgtctgcgcacttgaaaaacacgaggtgacacctgaaccctaaatcctaattgggcaccctgtggatctccttggtttgagttgaattatctccgcggagaaggaagtgatcgtcagttcccaatggtcgaggcctgcctcgcttgcagccatcgcgaaaacctgctactatgcgtgcatgcaccgcagtgcaaagagcgtgtcttctcaggcgccaaagccgatggattgaacgaatttcttcatatcgcttttctctccatgaaatcgacagtcactcactttcaggaaatgaaacatcatctcgctgagtcgttcgggagttcgcaaggcgtggcctctctgttgcatgctgcaattttctcgcgcgagatttaggcaatcccgatgatcgactgttgcattcctgtgtctggatctttctgaggcgcagtcagttcctattctcatgcatctctccaatctgtttccagattgtcttaaaaggcacgaactgaactgaagtcggacccataggcctgcgagaggagtgtcccgttcaaaagagcgccggaaaacaagtgactcgtatcctttttgctggtcgttttcacgcacaggaaaatgaatttttaacttggtagtagcttcttgtttcttcgacttgtctcgccacaacctgcgagtgctggatccagaggtgcagcgaggcagagcagctaccggttggacgtcgacggagtacaatgtgcgtggaggctcgcatgcttggacttctttcgcggtttccggttccttctttaatctattcgtccgtatactcggtgccttccgaccagttttccgaggaactctaaaatggcagtctgtgtagcacgtttgcacctcagttgttgacgtctctcggactttctccgcacccagcgctccggttcgagcgccgagttgcagctcccgtgtccgaagcagttccctcttcgctggaaaatcggcttcttggacaaggcaccttctgcagactggcgtcaccgtgaggaacaggcgcaagagcgggggttgcctgtggggttagaatctggaggcagcgcgtggaagcttcgtaccaagagaacgatgcgaagatagggtgtctgcagaagccggagacgcgaagacagaacgaacttcttcgctgccacacggcctttcacagga

SEQ ID NO: 3099 - DNA, 2452 bp, Toxoplasma gondii
  source 1..2452: mol_type = genomic DNA
cgttctcccgacttcttcgagagaagcactcggaagtccttctcaccctcagtcccggagacgaggcgcctgtacacgtccccccctcccgctgcgccgtctccggaggcctctgcagaaggcgccttctcagctgccttcgttccgtccgcagcgccgagagaagactccgacctcgagctcgcgaaaaaccggaaaaggtttctccgcggtcccccgcaactcggaagcagcggggagacgaccgagtccccagaagctgcgccgacagaagaagccagaggcgcagactgcatggagacagagcgagaagaaggagagaagagagcagaggaacagagagacgagagaggagagagaggagagactggaggagagagaggagagaccggaggagagagaggagagaccggaggagagcagaaagcgagaccggcgggagagggagacggggaggaagagcgcgagggagaagaacaaggtcgggggagaagagcagggcaagctgcaaggctcgacactgaggagagagaacgaagagaggaggtgaaaacagcgggtatagccgcacaggtgaacatggcgaagagcagagagcgacgagggagcacagcaagccgagaaaaacgagaaaacggaccagccatagtcgtctcgaagtcgcttcgaactcgacacggccggaaagcaaacagggagaaagaggagagacggcgaaaaaaaacgcggaggaggaagtttaaaaacgggcagacagagagagaacaaacggagaaagagagcagaaaagaatacgacggaaacaggaagaaagggagaaaggaaggaggagaaggagaagaaaagaaagatcagaaaactttctcgaagaagagtctccttgggcagcacctgcaagaggcacggcccctcggaggctggtgagagagatggaggaagtcttcttcgagagataattatttgtgaaatatatatatatatatatatatatatatacagatagagatgtttagatatagatattgtattatatatatgtatggagatagactttgcgtgcgtattttttgtgcacccgcctatggagagacacccacagtctggcagcaaagacagaaagagagaagagagacacagagggacatggcgatagacagagacagagagacagagagacagagagagacagagacagagagacagagagagacagagacagagacagagacagagacagatagacagagagagaagcgagaccgcaaggagagaagccccccgcacacagagaggctcaagaagcggtgacggagagaagggtgaggaaaagagagagcggcgaggcgttgaaaatggtccttcctgaattcttgagtagaaaggctctcggtttgccggaatccctgcggcgccgacgttctcgcggaaaacggaagggagacgagagagagttttcacgaaaagcgtaaaagagcttcgaaaagaaaggtcttttgggaggtagaagacgaggcaagacgcgaaaataccgcgaaggactgttctccgagaaagccaagcagccctgccgcggaaaaccatgagtgaagttgcagacgttgtttggtgagcttgtctcttcagaattgagtggagtttttcaacttaaagaaaaggcagcgtgtgactcttctctctcgacagacaacatccggcttcttccaggaaagtgacttctgacagttgcgcgcaaatctcccagcagaggcgctgtctccgcgtcccttataaagggagggggtggggctttctagacttgcgtttgaatttctcctcttctttccgtccttttcataaaaaacaaaacactgtagcatgagaactctgccggctatttgcgactttgggctggcgacagacacaacacagcctctggaggcggtcctctttttcctgtgttccgctgtcctctcgcctgtctcctttctctcgctttctcgcttctcttggtctttctcttttcctctttcttgtcatgtttgtcgggtgtaggcgagatgctttcgacggaaagatgcgcctgtctccgagtcgcaaaaccaacgcaacaaagggccagcaggagacagcgaagagactcagttgtggctctccgaagggaagaaagttcttcgtgaccgcagtttgcctcttctgactctttcattttttccaaggttttttgactcttcttgtctctttcgttcttcgccaagcatgtaaacctcctcgacaaacggacttctcgtcgacgacttgaaacgcgcttctcgcgtttccttctctcctgaactttcctcgcctccttcgtcttctccctcgtctcgcctcttctcttctctcaagtgtcttctttctctcctccctgtcctctcttttctctctttctttcctcgtctctcccttttttcgtcgcctcctcctgctcgcagga

SEQ ID NO: 3100 - DNA, 4770 bp, Toxoplasma gondii
  source 1..4770: mol_type = genomic DNA
tcttctcgcagcagcttcgtttctctctggcgcttctgtccctttgcgctctccgccctcgtcagcgtcgcctgccctctctccggttctcgctcgccttcgcctgtcggctgcgactcgccgcccccgcttccgtcgttgccttgcagagtagcagccctgcgaatcgacgcgctcgcagcgcgactgccggacggttcgccggctgcgtcgcaggctgcggagtttcgcagcatactcgcggtggcagagagccgcggagagtcgcagctgccaggcgaaggcgaggacgtcggaggcatcgacgcggcggccgcggccggacgggcaggtggactcccgtcaggagacgcgagtgtggggggcaagaccgaggaagagaaggcgcgtcggagccagcggccgagcgacgaggacgtcatgactggaggagccaagcctgcaaccgcagcagacgagcgagagagcgaagccgaagcggctgaaggcgaaacgagcgcggacaagggagcgaggggagaggggagagagaggagagagagaggcggagaagaagagtgaaagacgggcgatggaggggcgcaccgaggacgagaagagcagcgaagcgaggcagacgcgagagagcacgcgagagtggttgagagaacactagagggcggtggagggaagagaagtccagactcgcaaaagggagaaatgtccgaagcgagagaaaaagagtctctccgatactgcgccgccggactgctcagcggcgtcgcagcagagactcgcaaaagcggtggagcagcggggaagccgcggagcagcgcggaggctggccgacccacagctcgggtgtatcggcacgccgcgccagaccggacgaggggcggcggcgacgcagcggcgagcgagcagcctcgagaaaggcaagcgagcagtggcgccgcgaaggggaagcgaacgaaacacaaaagcggaggaagaaggaccttgctgcaactcgaacagcgcagaaaggctggccaccacgccatccttacgcgacactcagaagccgggtccgacgcccagacggagaggaaacgaaggccgccgggaagaaggaaaacgagaagcagagaagagagaagaagaggagacagaagccaagacgcatgcaacggactcggcgttcggtcgagagggaagaagcggcgagagaaaaaagagaaagaaaccgataaggttcatcggctctcgaataggcaagaacgccatcacgaggaagaatggtgaaggccaacgtcgcgtggtaatcttcaaagtgtggagacatcgactttttgtggactcggagatgacgaggggaagcgaaagggcgccgaatcgacagaaagaaggacgaaaaagacccggcagaggcaggtttccctggcaggtgtgccgacgcctctgaagacatctgagacgcgaacgcgcgcctaaaatattcgaactgcagaagagacttcgtggacgaagacgcggaagaaaggcgagacagagaattgccaactgctagagagcacatttgcttgctgacttcgagcgcggccgagtgaagaaagtctgtggtggaaccaataaaaaaaggaggggaacgaggggaccagcgcgttctcagccgagcgtgattccggtgttgcccgagacgtacacgaagctggcgagcggtgaacgagagagcagaaaaatcccttcggaaaacgcgttccagtgaacgcttggagagagtaaatcgtgctgaaaccggcagagtggagtgcaaactcctgcaaaaggagaaacgaagagaaaacctcggagaggctgcggccacgctctcgcttcccgtctccgctgtccatacgccggaaactcggagcgagctcgcgcgaaatccaggagttttcacaaggcaaacccgccagttttctgcactattcagcgaacctgcacgcgcatccacgtctgcaggccctgcgagcaaagaagcggctggaggtattgctcaggaactctgcaaagaaaaggccgggaactggagaggcggcccgcggtacgggaaacagctgttctttttttcggtgcagctggccagatggtcgaaaaaaacgcagaaaacgcaaggcaacggaacacagggaaccggtgaaacagcggcatgcgtttcagacagagagaggggaatggcgggacaccgaaaggcaatcaagagcttcagaacgtttttcgcctgcttggctctgaggactgcgagagctcgtcgccaccaaggtcacgcaagccatccagacggacatgcggaggggaagactgcggatgaaacgccggatgtttcgcaggatcgacgtcgcgggacaagcttcggtcgcttggagcttcttcagatcatttccgtggactctcgtcgccgcgaaacaccgcttttctgcatcgcgttcggccgagaagcaagccgccgaaaaactgtgggttcctgcgctcctcacgcagtgcaattccacagagtcgcgacgaggacgaacaaggaaaaggtttttgcggaactccaggcgtttttccactctttttctggaaaggttttcgcgagaagtcgcgagggagccggcaaagtcgcaggagctcgacgcgacggcggccgggacatgtgagcacggagaatgtgcaaaagtccggcataattctccttgtcgcaggctacatcagtcgtcccgagggagacacagggagagtggaccccgacaaagaaactcacgaagagagaaagatgccggggaaaatcggcgagggcgccgcgtcggcgaaggcaagacgccggacgagagttccttcgcctctccgtcggcctcacagcccccggacaggcaatcagctgctctcgcctcggacgcgaatctccaggtgctaaatgctagattcgtccttggcagaaacgcgccagccagtcaacacacccaggccgagaaccggatgacggcttctcgtagcccacggcgcccaggcgttcttgtccgtcgctcagtggcctcccttcaagacgtccaattttccactgaacactgtggaacctctgcttcagaatcgaaggagaaaggcaaaaagactcgcgcggatggcgagcgcgacagagagcagcatgtctgggtccgcttgccgttttccccatgcgctccctcgctgcggtatctccgagaggccgaccgcggatgaggctgagacacgcacacacccctctcactcagctttcgcgaatgcggatgccatttccgcgagaaagcgaagagcactgaaccgcgagcgcgaaacgaaacagccggtcctctcctcagacacgcagcatcgcaaatgcaaaaacacagaaaccgtagcttgacgatacgtaggtgtgacgatgtttcagctccaaatgcgcggagcccgcgcaggagaacaacgcgtaggaggcgcacagccactaggagagtcgccttcgcggaggaggcggtcgagctgatagcagactagaatagtcttgtgagagtcacagttctaggcaagcgaaaacgaaagagatgaggacaacaacttagaacggatctgtcgattgagaacgagcagcaatgagggtcggcacacactcatgcctaggcgggagacaacacagaggtccatccagattccgcacgaatgctcggaatctgtctggactcggctctccagttttcacggccaccgaagccgttacgcaggactgatctgtgaaacgtccctctgtggctttttcctttttcgagaactcaagtgtctgcaagaccttttcggcgacctgccttcgcccactgtgaggcgaggagggcgacgtactgtaattccacatgcggccgacgcctcgaacagactcggtgctctattttttctttctttagaaggaaaattcgttcccagaaagggcgaaagcccggcaactgcctgtcgaggagcttcgagtgcctgtggatagtccgaaggtgtttgaagttcgtcttccccctttcgatttgcttctctactcgtcctccacatctacacgcctgtttctttgccatctgtgcccttccgtcatttctttcgcctctctctttccccgctaatgtgcagagtacaaccgcgcgtccaggtccgttcctgcggtgcaggtacaccgcccgcggaggctggggcttgggcgcgggccgcgcgaggcgcgcgcggggagagttttcttttttttgccgacccagacgacttgagaaagagaaaactggtttttgcttttccgactgggcggtttccttctccttttccgcggtcgcagagtgtcagagaaccccaggccgcgagtcttccgaccgcgcgcagtgcgcgcaaagacgcactctccaggagacaccaggcggggacttgttttgtcttcgtccattaaccggcggggcgttttaggcaggctcagtcgggacttccactcgggggagaaaagagcgacgagcggcgggtttcctccctctttctccagagcgacgcatgtgcaggtgttccgtcggtcgtggtcggcgtttctgctcggcttttctccacttttcgtctccctttgtcttcttccttttctttcctccatcttcgccctctctccgcgtttgttcaggagagagacaggagacttttcccgtctgcttcgtggtgtgtggcacccctctctgcctccgtctctccggcgcctccgcccagaccggtggcacccgtttctgcatttcctgcgatttccctcgattttcctcggcttcacaa

SEQ ID NO: 3101 - DNA, 3613 bp, Toxoplasma gondii
  source 1..3613: mol_type = genomic DNA
ggggtaggaaacatttctgttttgcaccgtttctccggtacccttggctgctagaccgtcacgaattcagtgatcctatatcgaaatatgtttactggtgacagggatttcttttggcagcggtgacgattgcacttaattcaaattcgtgatgaaaatggttttctgtcaaaccagcatactgcaagccttcattggtgttgacttgctttttgagctgggaaggcggtcgcgaacagagggacagtttcatagtcccgaaactcgctcctttgcatgttgcaaccaacatccgggtagccctcatggtaggggtcatgcgctgcgggacctaaatcagggaaccggctgcagttatttttgtgtagctggacgataaaacgcccagaaaaaacgtgacgagtgaactgagaagcaaccctgataaaggagcgagaagatgcttctcttggagcaactacatcgtttcagttttatggatcttcaccgacacctctgcagctagaacatcgtggcgaatgccgacgagagggtgggagaaacgaagatcaaccttcgtgtcgctggctgtcactcaatttgtgtttttgagccgtgcgttacgataatcatctggaggccaccgaaagaaacgacactgccgaagctttcccgcacacttggagctggtactgaagacagtttcagcagagtcagaagtgaacctgtggattttgtacgccgggtcggggaggggtgcgataggaggggtccagactagtttagtgagggtatttttcttccttttaaatagcgggcttttgccgggtggcttaacgttcaagttgagaccttttggaagaaagcaactgcacagctgagacaagctatctttttatgcttgaataagaaatgtagttcttgctgcggggtgctgccggaccccttgttaaaagtagtgtgctggtgcatccagtttgttcgtatgtttgacccccttgaagtttttcctcctgcgaaacacgtgtcgtgcgtgtactggtttctagaaacctctgtgcgagtgcaacttcactgcgtgtcgcgcacaactggaatcccacgcattcgttccagtttctactcttctttatatcacgtttaacggcgtgagagcccactagcggggtagtagcatgctccgctgagtttgcggatccgatatcgatattcctaaataagattcgacatagtggagatggtgttagtgtcttccgttctcactgtgtagaacctgcagggtaaaattaactgtgtctttttgttaattgtccaaaagggggaagaggccgaacctctgccatgttcgggggcttacaagtttcatcggagtgtcatactgatcagaattgccatttatttctttagaaagttctcttttcgtcttgatcgtactggaatcaagtatgatgcagaatttatgcgtgcgctcttctctatctaatcgggttagatgcatatttacgccgttatattggtgttcgtttcaatttttcccgtggatcaggtaatgagaaagaagaaacgaagcataaggcatgcgaaggcacgggagcttgattttcttggtgccattaccggttgtcacttctgagtacatgtatccgtgtgcatctgaatggtttgcgtttaacgcttagatgctgtggcgagactgatgctcacacagggagcggaaatatgttccgaataacacttttgttgccatcgttcgaccacagcggacactacagaatcggctatgcagtcaagctgggccaatcggtggacgcagtttacctggcgtgggcaacgcacaccctctgtgtgcagttccactcaagttgcccgttcgatcgattaattcgtatcgtacacggtgcaatctgttcagtgctgcgtagaatatccaaaagttaacgcctgctagaaggcaaaagttacatcactcgtttccaatctccgcaggcccatcactctcagcagctacaaacattggggcgctgcaattagcagtcactcgatgcggaaccatgctgcctcaggtgggaagatcccttgtgtactgtatttaaaaacaacacacctagaaatctggcacctggccgagcagtttgaggatgaccaccagctttgccaccaaggacgaaacccccagcagaactgttggctcaacgcatgtggaactgtgtgaatcctgtcgcagggatgttagtcccagccttgtacctggacaagagtcgcgccagtggtgttatttagtgatttcctttctctctgattctatgcctgctccttctccgtggcatcaggtgcttcgcttggatgcacgttgctgcagcgctagcgattgctgagcatcagtctcaaaactcttacacaaaatctttcagtatagtgtctgctttcctcgtccagagactttgcagacgtaagggtgcgaagtattcggaagcagctgtgagtttcatcccagagcggtgccagaggtttcatggtcgttaacagatgtccttgcgatatctaggtggatacccggaacaatgtgcgaaagccaatgagtggacacgagtggcgttgttcttgccgacaacagggagtgtccaggcagttttgctgggtggcaaacacgtttacgaatcccaacgttaaattccttttcagaacttctaaacctcctggccgacgtcaactgcatctccccctgttgggagaataacagagacgggaacagacaagaagtggaacgtcagaccagtagtcgaagtcgcgtaatggcctttcgcaagcggaactgcatgctgaggggcccacaagtgaagctggattaaaggaatcatcatgaagattgtgttgtcagaacgccgatggatgcttttgaacaacactcgtcagacagaagggctggggccattgcagcatgtgagaaatactgacgcgcagaaagagatgatggactgtgtcttgccatcatatgtctccttccagcttcgcttctgtacaaaaagatgcgcaccctgggaaacaagaaacacaaaattaaacgacatcgacaatcggaaaggtcgaaaacgacctgcagtaccgctgatcgttggttttcatgcgtgctgtgtttgtttctgctttgacacgcgattttgtacatttggagattcaagccatgaaccacttcgcgaggacgatttcggtttctatctgtgatgcacacggaattctctgtcactttctgacacatttcatgcccatattaaaacaaagtgagacccaacaatcggtggatcttcatacaaagcttggatccgccgatctatcttttgtccggtgtacgggaattgcgcgacctgtggagcagtgcttcctcagtttccatgggaagagtctgtgcatgtctgaagacagatccgtattgcagtaatccgcagattcttctgcaaccaagaagacaaatcaagacactgacaaacacataagccagagggggaagaaatgtcggagtacctcaggaactacctggccaaagacggacacaggtaaagattctaagtgtgtatccacgcgacgctctcgagattgtgcgcacggtgccggggttgccggcgtggtttccttcgga

SEQ ID NO: 3102 - DNA, 3422 bp, Toxoplasma gondii
  source 1..3422: mol_type = genomic DNA
ataaggagttcgggaaacgagaaagacgaagagaggtagcgtgaaaaggaaaacgaaacggatgtctttaggcccatgtaaatatacagagcaaaaacgtgtcagataggacttgtaggcgctccggtggttgtcgtttctccatctcaaagacggacgcgacttcgttgcagcacaaaacgtctggcaggctgcctgtctcaggtgtctacatacgtggatatatatgtttggtgcatattatgtttcaagacgtaaatacaaatatatatgaatcacgggggtgtgacgatatcttatctgcgtatcaaagatagagatcgtgcgcaacgaggcggaaacggaaaaaacaaacgggtgccgggtgttatctcgaacattggttttgacagttttcaataattacgagacaacaaaaacaaacgcactgcctccatgatggagcatcagtcctttctggaaaaagatgatactcaaaggcatctccgtaccatcttgaatgcctctctttatcggaacgaagtccgggcacatgctttaattaccccgtgtgcccgaaatagactcggtgtccaattcaccgcctctgctagaacagagcaacgataccgtcgcgtattacgataggaaggcgtaagggtgggaggttgttcaggaaatcttcagtgtggagaatatgaactgaggagagatagcttcctcaggaagcgtcacggagtagtgagactttgcttcaccttcgtttcttcagaaccacttggtgagtggcgtctcttcgcaactgctgtagtgatcaatttcatattttcatctcaagaccacgaaggcctgtgtgtgtctagctgtgtgaagcaacttagactgaaacactgtttctatgttcactttcgcaaaagaattagtcgcatcacaggcattaacaaacgtacagttcaaatagcgatactggattgtgtacgggaaaatctgacactgtcatggttttatttgaatgagtcagatctggcgcgactcctttatcggatggaaagtggaacacagagcatttcacacatggaagcttcttacgagtgaatcctccggtatcaacgggtggcagcacttccggctgaagttgggtaagggggcaatatttgcggtgcgttaaatataaggcggaaataaacgaaattgtccttctagaagcagatctgaacgttgtttctatctccactttgactttatatcggagcttcatctcgtgaaccaggtcgcctacatgtggccttcaccgagacgatatttcttgtccgtcaacgatttcaccttgacaatcatgccgacaggtcggtcagttctggcggcaacacttttactgatcaaacgtggtctgtcgccagccagaggacaaggcagcttgtgaatttagaagcttccattctgaagtcaaaaggaaagcttggcttgactgcctgcgtgaatgctgagcatcccaatcggcgatgccgacgacactgccaaggaaggaggaagtctggccgagttcggtggcagtctaaatttccactctgtgtctgtgatgacgaggcagtgtggacagcgcaagccaataaagcaacgactcccaatcagctccggtcacgctagttttttttcacgtgcctgcctcggcctctaagtacgtcaggatgtgttgagtgtgcacagttgtggatggccggactttgcttctagtagctgagccagtccacggtatacgcacaagatggcatctttcatgtgacgaaagctagctttaaggcgattgtttccatcagaaatgtccagaaagggccgcatgtggagcggagaccaacaaattggtactgttcctctcactgacgttcacccttggacctgggaacaccacaggttttttgtgagatggttaaattcagttaaaactaaaaaactgagcaaccgatagtctcctcgagaatcacaggtaagcgcctaacaagttggtaatctctgaaggcagctaacgtcgagccgcagccagcctcaaccacacactcccgagttttcaactacgcttggatcaacagctgcattcccgatcgcagttcgactctagaaaagtgggcataaagttgcttcgcttaaccagttcaaaaacagagttcttgtctataacaaaagatctcagcctgtgcgccgcggtacgtggaaggttctttacgattgtaagcacatcggtcacgcagatgttctgggctgctgtggctagccctggttgtctttacgtgaataatagaaatttcgcagtgcttgtggacaggtgctcccgtctcagtgataattattaacataagtcacataggcagatcatgttttccttggtgttgacaccttccggtcgagaatcgtggaggcatgaccgcgaaattcgaactgcagccttgcggaggcaaaatagcctgcttttcaatacaagacctgtgttttccaggcaaataatgaaggaagggaacctctttcccagcactgattgcgaacagaaatttcgtgttggctcatcccgtagtttgggatccagcctgtaggtgtggcaactgccaacaacctaatgcaagatagcaccgtcaagaaaagtacatccactaactactactactcttactgctagtgtttctcttgctcttcctctcactgttactctgaatactattggtacctctgatagtagtagtcgggagctcgaccgaaaaaggaagctgatatcggatatggcacgaaaactgagtacacatcgacagagagacaccaatgaacggcatacctttgcgtgacctacccaatgcgtcgtgtcggagagttcactcggggttcccggtggaagaggtggttgtttgtcgttgatgccttccttggcaagctgctctgtttagtgtgtcgtgcagaccggagggcacgcggcgaacatccatttctcctctagaaaccgctgccctacgctgcaaaatccctcaacaatgtccaatcacagtgatttcacgaagtcaaccgaatcgcgggtttattttaggttcttctggtttcgctgatctcaagatggctcatgtcacactcgaatcagcacccaggtagccacccgcctctccgtccctcaacatccctgcccgccgcctgctgtcgggctcagtcgcacacgtgacgacgatgtcttgaggctgggtaagacttctgttttctgcatgtggcagaaaatgacgagcaacgttgggtcaacacaccgataagggccgatggattcacttttacaactcaacaaatctagggaagtgcctgtagcgtttgaaattacctcagtgcatgtcatcaaatagtccgatttatagacgccatggcggggtagatatttcgggtcgcgtgtctaaccctgttccacggcctcgtcctga

SEQ ID NO: 3103 - DNA, 3012 bp, Toxoplasma gondii
  source 1..3012: mol_type = genomic DNA
ttggccctcgtggagcactgctaaaaaggtttcaaaacacagactgcatgcgattctccctttttcttccaagggtagggtgctgtccaaagggcgtaggcaacgcgcgtggttcgaccgtcaagttgttgctccttctgtccccgcttctccttttcttggctgtccatgttctacctccgcgcaggcatactttttacacatttatatgcacttccacaaatacgtggatctctgtacagatttatgctcatacatacatataaatatatgcttatatatgtatatatatgtatatatatgtatattaattatgtccgtatgtaaatctgtgtattcctatgcacatgcacctctgtttagctctctttggagggcctcacgtaggtcctttcaactgcatctcgctgcggccgactatccctctacagccagcaatgcctgtggaggtgcctctgccctttggaaaataacactgtgggcgcgtcttctgtaagtttctgtatcaacctggagacgtatcgactctccgaacatcgtgaatcgatttaacagcaacagggcgactaaggaaacggctgctgtccatcctacaggacagagaagagcaaaacgaactgcagttcacacaaaaaccgacacaggcctctctcccgctcatgtagaacgatggctcgccattttctgggggacggagccactgaagtttccgagttggaggcggcagctgggtcgaccttttctctctctccactcttctttatcctttcctcctctcgtgccccttgcttctcttctcctttctctctcctggagacttctctcttaccgttaaactaaaaaaagtaactatgaaactccacatttcgttttcaaatcaaaggcactatatctcatttcatagacatactttcaaagtggatggaaaccataagtacatgtctcttctctgctacaactcgtccattaatctctcttgaaacaaaacttttctttcttctcctctcgttttcttctctttctctccgctcttgctccttatcgactctttttctctcctatattttctcgtcctctttctgtcctttcttccgctttctctcctttcttattcttcctatgctttcgatcttctcctttcgttcgccgctccttccttcttgctctctcctgttcgcctttcttttcgctcccctctttgctggcctcttccatcgatcgatccttggctgctgcgcttccatctccctttcggttcttcaagcaaagcaatgcggaacctcgaggaagacgcggcactggagagaagaagccgcccagcgaaagtcagagtggagagcgcgagcagcgaggcattttctctgtctgcaggacgagaaaagggtgccacgagaggagagagggaagaagagaaggcggagggggagtaaagaagaagggaaaccaaagaggagacgcgctggaaagaccgcgaggagcagaggaagaacggtcgaggcagagacagggagacagtgaagggagaggaggacagtggtacagagaaaaggcgcgagaagcttgagagcgagagagaagagaggaagctttgcaaagcaagccagaaggcgagagagctacacccaatccgcaggtctcggcggtgtctggtattatacctgggggaggggagcaagacacacggaggccgcgaggacgcagaaaagagcaagtggaagagaaaacggacaaggcgaggcgaaaagaagaaagaagaaagggggagaaagacacgaggagagataaagcggggagtggggggagctctcacgtttctcccagcctttgctgcggggccgtatacagccagctgcttcaccgacacacacctattcgtccgtttgagggatatcggggaagcgtttgctgtctctgcgggagttacttttgttgttttttggaactccgagctccaaactcgtctcggcctttctgggcctccgtggaggaaaactccgaaacaccacagaaaaccaacggaggctttcgagcgcttctgcccgctctcgcggcttccgaccagcgcgcgcctgcaccctctggagttctttctctctttcttgacttttcgcagacaaagaactcccctcgctgggattctgactcgttttctgctcttctcctcctctcttccccccagtctcttgccttcctcttcttctctggaggctctccgacgagctctgcgctctgaggtggatttgcacctgaccgctcgacggctatataaaagagtcgcgagctcggcgctctgaggggtgcggctttgagcgggaggagagacgccggcgacgtttctttaccgccagctttttgagttttctgcgaatttccatttccagggatcgaagcgagaaacgaaatccggtgcaaaaagaaaacgccgcaaaaaggttccccttcctccgccagtcggtcgtggttcccgtgaggacaccgcgtccttctcaaattctcgccgagtcaaactccgcgaaatagttttccttccttctctacacacgagaggacgcaacgcgctctctttgcctttctcgttttctgcttgtttccctcctgcgcctcctctttttttctcgatccgttcgcttccctcgttgcccccgccgaggcttctcctccgtgctccttgttttttcctccagcttcgtcgtttttttctcgtcttcctcacacacgggagaactgctctctctctctcccctcacgggtcaccctgttacctcgacccttttttctttcttttttgcctctctttcttctttcttctggcacgcctcctttgcgcctcgccttcctggataacactgccgccgagggatccgtcttcaccttttttctggtcctcggttcctcgttctgtttttctcgcctggctcgcgcgcatccttctctcgacgtcgttcctcgttttctctgtttcttttcatttctcctccctcgtctcttttctcctctccactgacgacacca

SEQ ID NO: 3104 - DNA, 3444 bp, Toxoplasma gondii
  source 1..3444: mol_type = genomic DNA
tgtgcaaccactcttcaaagtctttgggagtttctagacgcatcgggctcgctgtgacttgttcatccacaggaaacaggtgcggggtctcagtttccgggtgaacagaagcgataggggacgactccgacgagaccgcgaagccttcggtgaggtttgccgcgagccctgggctaggattcttgtcgaggcagtcgtcctccctctcagattcctcgtcgctggacgcaaagtcgattttgtgggcacccggcttatagtcggggttatggagctgttcgacgcgctccatgtcttccgcgcggatgtcccggcgcttcaccaggctcttcactttctcctgcaaagacttgcgggtctgctggcccgccgggcacgggagagggggttcgcgggagcgcgagcggagcgaaagtcgccgtcgcaaggaagagctctccttcttgtcttctccgtcgttggagcaaacgctgccctcgcggctagctcgggaggcgcgcgaagacagggagagacgacgcttcagcttcgcggcagtgctctcctgggcaccttctccatcttcttcgttagcagactttcgcgagctgacagacaggcgtctcagcaagcgacgaccgcggccctccttctccacctcggaggatgcgccttcttccgcttgctcatccgactccttctccttcttggatatcgacagtctgcgtctcagtcgggacaagcggccttccttgggttcgccctcgcgctccgagtcggagttgcgtttctcatcgcgggatgagatggacagacgacgcagaaagcgtttggtactgctttcttcatcggctgcggggctcttgggcatgttctctcccttctcgcttctttccacggagcagtcgcgcgagagcgagagacggcgtctccacttgtctctgcgggattccgacttctcgttcgtaggtgaaactgtctggctcttggcttcagacacttgcatcgtcggcgcgggttcgttctctgcttcttctttcaccgctgaaacatccgcaggcgtttcttgcgagttagccgcctcatcctgcttctcggactgttcgccttcgttcgcctttcccttttcggcctctgcgacgtgtgactggcgccggctccggtcaccgtccttcgacagcgagagtcttctcttcagacggcccaaacgagactcaggcgtgtcgttctgcggggacgcaggctccgaccctaggcccttgacgccggcagttccttcctcgttggcagtgagaccgcgctcgacagagcgatcgcgcgacagagacagacggcgtctccacttatctgtgcgcgactctgccttcggactcgtagcgagttcctcggtcttctcgcttgcctcagcagccgccgacgtgctgtcgacctcgtcgtcgttgacggacttggagtcgcccttcgtggcctttcccagcagcgccttggctttgtttgcgaagctgttgcggcgactctgtcggggctcctcggcgttgtccgcctcgttgccctgttcggtgcgcttttttttcagactcaagaaggacgggcgccggctgcctgcctttggactgtcttcggccttaggagcagtctcggtgcgtccagctgctgaagacggggaagcgggaaaggaagagccgcgagaaaccgccgcaaccggagaagctggaagggaatcttccctgggtttcccggccgcaggcgaggtcacagtgtcgctggccagcggcgacggcggagccgtgatgttgagcgccatgggtattttgcgaaagaaacggaacaaattgaagaaacgcgaaggaaatcacggagtcttgaggtgattccgacaaaaaatggtgaggagtggcgtacccttcgatggaacaaagaaatcgacgtacaagagcacagagcgcggtgccgcggccacaggacacgtcttgcgcaagacgagctgcaagaccgcgagcaagctagagcggtagaaaggagtgcccggcgtaggaaaagccgcgcgacagcgtcagtgttgatccgcaaatcgatctgaaaaaccacgatacgctgtggtgggtcaaggaatccttcaaagaggatgcataagaaaagttacgaaagtgtcaccccacggttgacccgtccacgccaggcagcctgcgagccagtcgccgcaagccaccctctctgctcgcggaagaaggcttcagcaacagtttcgacgttgacgctccgctctctgaaccgtggtcgcgagtcgatctcgggtgtggccctgagaagaagcacgcgacggcatggagtctgtaataaagcaagtttccaaaacgagaaatgacgcagccccgaacagtcgtgggaaaagaggaaaaatcgcgtggagtgcaaagtcccgtgagaatgagcttaatgaatggaccatgccttcttctgtggcgtctcagatcgaccgtggcgtttaaagaggaggaaagggtgtccggcgaaagtatcacaaaagcctgctgcgcgcgaacagctggttccactgctgcctaagctaacagtataccagcagtaaacaacggctgctttaaatatcttgttttccgggaacatcgtcccaattttcgtgtagcaagggacgtgtcaacggaagcaatggcgagccgcagaaatatcgcgtgctacaaactcgaaacagagggcgcaatcacagaacacatgaggtcagaggagtcttttttatgaaggcgaaccctaaaatggcgatgtctcgtcctgcagttccccttcagcttcgctattcccgagtcagccactgaagctctctacgaaagtcctgtcggcgtttttcaatgtagcgcgaggcagtttgccgagcggcgacgtcgagcctgtggacagccattgtcactgctgcagcaactgctgggggcgtattgccagcacatgctgcattataatgtaaatcactggttaaccaccaagcacggtgacacagagagctcgtttccacagactctgttgttcgacacgaaactcacatctgagtttcacgtagtaggggttacggtaaacgctctagcgacgaggttcctgtctagctgtgatacgtgaagaggggaccgtacagtggcctactcgacccaggaggtcactgaagcctgttttagaaggtgatgccataacgatattggtaggagtttccacacagtccggtgcacttcattctgttaatgcaaactggaggtcaaagaatctaacgattctttcgaaggcaaaacgcctaatgacagcatgaggaggtcccactaatactgcgcaacgttcgattagtaatgtagtcagcatgaccccttacacaacaggaccacgccatttgtttagagacgccacactactaaaagccacttcgatgcctttttggtttttatattcatcacagcaatatctgaa

SEQ ID NO: 3105 - DNA, 2031 bp, Toxoplasma gondii
  source 1..2031: mol_type = genomic DNA
gatacgcactgcggtacgtcgtgaccacgtgctacgttcaacacttcgtgtttggtgtctctaatcgctcctgcttacacatgccaccattatcagcaccaggattagctgtgaaacgaaacgcctcgaagatttgtaggggactcgctggcaacgaaaatggtgctacccgatgacttgaaatctgtctccgaaagtttgctttccactgctactcatactcaagcgaagcaacggccacagattgaacacgtccagctggagagatagagttgtcacacacttgccgggaggcgagattcacacaggaacggacccgttcacagttcaccacgggactcgagaggacgatgaatctgacgcttccaacactcgccaagttttttcagccttgtcttcagttgatgcgtaggcacgcacatgcgggcacacggaatgatgcattgataccgacatacgaatgcttggatacgcacagcactggacctgacggctggcgccgcaaaggtttgactgcctcaactcatttcttggcggaggtagatcctgtcttggttggggctgcgtcttgaagaagggggttctttgggagggcgtaggcatatcgggggtggccgaccattttaaagttggttgcaaagaggtgcttcatccgccagacagccccatggatttttccttcgtgcccaagcatggcgagatatgcaagacccaaggcaaacatgaagatgctctgaccgtactcgttctcgaagaagcgttccgtacagtagccgagcgcgttgcctgccataaaaatcaactcgctcttcggagacgcggtgttgtcgtagtctgtaaacaacattggagatgctgccagcatgcatcctgtcccggcgcccaccgcagcacggaaaccccgtcgccctccgctttctgtactttgttccttcttccccgattggcggccatgtgctttaacagacctcagcgtctgcgatttagcgagattgtgtgctctctctgccggacgctgtgacggaaaggggcgcaaggcaacccgatgctgaggaaacccactcgcgctacttcgagcaaaaaacgacacggccactcgtctggctgctgcagcagccggtgtcaagaagaaggtattcattttcgttgacacgtggacgatgaatatacagatttgccactttaacacacacggcggagacttttcggcccgatgggccgcgaatatctgaagctgagaaagagcacacgtcaccaacggaacactccttgagacgaaagttgcgagtcgtagttttcgagaaacttcaacaaaacgtttttccaccaggcgccgcttccgttgtcgtcgaaaaggaatcacacaggccctcaggtgctccccagcggccagaatcccctagacaaaagtccgagctagtcccccctcagcacacgaatctttcctcaactttgtagagatgtttcttgctgcctcgttgactcgttcccaacaaagcccatccacaggtacactgccgccctctgggcatgtgcttgtctctttgggcagagcgtgatggtcctgttttgcgtagtcacttcagcagtcttggcccgcctgactccggtcccttcttttcgcagggcgccaacgcaatttgcgccaagttgcacagcgcaccgtcagctgaatctattaccccgctccgttgcttgatccggcgcgggtcaaaggcctacaacaagggacgacaagcgctgctatgcaaacatgacctcctcgatttatccagcaggaagcgatgaagatcagctcttgtggagcctgtagcgtgaaactcgtgtccttacacattctacaggagttatttttcctcctcaaagacgtcgtggggttcttagaagcaaagcctctcgtcgagagcgtcacaagtccgcactcagccgaggtagcgcccgcccgggtaaatcccttttctacagtcttcggtgcaacttggctctatcctggaagaagacccttgtaaatttaaagcgacattgccaaca

SEQ ID NO: 3106 - DNA, 1644 bp, Toxoplasma gondii
  source 1..1644: mol_type = genomic DNA
cgattctttgtatcttctcgacacttcgtctgttgcagagggtctcacgtggacagagtcaggtaacgcactaagaacgcaggcgtggtgaaaggcagtacgatgttcctaaaacattcagttcagggggtcaattgttctttagcccaggttttttgtgacaacggtggtcaccccttcatttgatacgtttggcatcccctgaaacttctgacggtttcccatataggtcgctgtgtggagattgccggattttgatcggaataaccccggacatgttgatgtgctggatgaccatgtctctccagaattccagaatttcttccgtggcaaattcgacatccgacttcattctgagcctctggtgtgaacggaaaaacccgacgcggttgaccaaagatttagtaagggaagcttcggaccgacacgctaatccgctaacgattgccgtactacagggttaaccacgaatccgctgtcctgtctacgcagtttttacctacgacttcccaaaagtgctggggaagattgcaggaactttccgtgtgttctgtactctttcccttcaatggcctctccttcggggctgtttcccactgccagaagaagtgtgctgatcagtctcagttgcaactacataaaccgcttcgtaatgcctgccctcccttcccacacatactcaaaaaacaatggagaccactgaccaacgctcttgtcactcaatgacaatacagacgggcggcgcctgtagattggtggtaccgagcacatgctccccttcctctggctaggattcaaatacacactcggttagggaaactgcaagaaccatacactgctgccggatggaaagacagtcgatacgtaccaactgtttatcggggaaacattcacgatccaacaacaaaacaccctggactgcgggttcattcttcacacttgtactggtgtggcgcagtttgtgtctgaacgtggatgcgtgtgcacctggggggcatcgcatgcgttgtctcatgcgttgtctgaacaaccgactgagacagtaccaccctgctctattggcttcgcttgcctggacataataaacatgtccgatcctcttttgtaccacttacggacagagaaagaacacagctgcaggcacacggaacggagaaacggagtctgcaaaaagaaaggcgcgctgcgttttccgatcgtcgcttttgtgtacattggttctgcgagtttcgaccgttcttctgtgtgtatctcagtgtcccatgccatgttgaaatttcgcatttcgtctggaggaatcgactgtcccgggaggaatttttggaaagatacagttttgatgtttttacgtggtttctcaagtgcaaaattgcacccacaagggtgggacagcgtactgggaggagctagccaccttttagaggcttgctgacctacttgggaaacatttcgtgttgaatccgttgacacgccgatgtgcaacatcgccgtttgtgcacctggtgccgggacgaaagagtgggtgatggtcgcgtgcgggggtggtcactagaatcacattctagttttcgatcccgaaagcacgcatttgtgacctttttctccccaatcgtttacgtcgcattcctgcattttctacgaaaa

SEQ ID NO: 3107 - DNA, 2161 bp, Toxoplasma gondii
  source 1..2161: mol_type = genomic DNA
ccgtatgcgcgcatgtgagtctgagtcatgattcaggtcttttctcgcctctgaggttgttggcaagcttaccctttgcagacagtccgtccaggaggttcgagagttgctctttgattcctcggatgatctcgtgagtggtaggagtgaagacgacgtcgattccgaatttgtttcggatcgcggcgccgagcgccttgtcgctgacggcgagctgggcactcgcgtcggtctgcagcaaatgttttttcaggaatttcttcaaactcttgcccactttgctttcgcgcagcgcgaggacctcgtccagcgcatgcttggtgtccttgaacttcgcgaaggcctccaggtggacgctcttctgcgcgacttcggcagaggcgaagaacgaagtcaagtcgtttgcatcttccacctccaacagcttcttgttcttcacacggaagaggccgtagcccgcaggcgtctccacgagaaccagcatctcggggaaagagcagacaaagcggccggagaacggaagacaggcggcctctcagcctccacttctcagtgcagagtcgacctggaccgggagagtcgttccggcggacgcaccacgccgctgggcagcgcgaaggaggaagtcagagggacaagagcgaatcgattctcctttttagaaaggcaaaactcggcagagatctcgatccgtggactgacgaggtggaggagagactctgcgagaccagtcgtcaacaaagactgttcagacggaggactgcgcgaaaaaaagcggcgcatgctgttgcggacggcgatgtgttagagtccgcccaagaggcgagagcgctgccaaacgagaaaagaaagtggagagtgaggagatgcgcgcctgatttactgtgttaagacgcccccgcgctggctgggcagctctcgtcggcgaaacgcgacagcacagaacgcgggcagattcctgcgggagagagcccgcgacggccgtatatgcgcgggagcgagaaattcgctccgtcgagacccaaaatccacgaagtttcaacgcggtgaacctgcgcccgagcgcgtcgggaggaatgatccgcggaaaagaggatttctcttcgctggaaaacgctccctgttttcgaggttcgcgggcagcgcagactcgcggggctgcagcggacagggcgggtgaagtgctcggcaaagcaattgacgaagagatcgcttcggtcgaagaaaggacttttcctcgacaagaagaaattgggaactggggaagtcgccggcgcgaggcgaacagaaatcgaggccgcgcgaaaaaacctagacaacaaaagggtagaggctcgcgtactgcgccgtcgacagggccgagcgtgcgacaaggaaggcggaggctttctacgcgtgatgatggaagaaacttcctttcactttttctgtcaaaatgacgctgccaaaacaaagagtccatctgcatttgttccaccggcgcctctcccgcggcctcgcagagagagctcgcgcgaccggtcacatgcggcctctctgtggggtgcctggcgctcaggccgcggcgcctgcatgcgcggcgagcaagttgctgggaggtgatgtgtagagctaaaggttcttttcttttcgccgctttccgaggctctccggcctccgttgagtgcgtttctggcgattcgagacgcccagatctgctgcgcttcccgacgagaacgacgcgcggcgctcgacttcgcagaaggcgacagtgtctcgcaggcgaaaccggagacggactactgggtgtcgagcggccagcgagaaccaatgcgttttctgcggcgcaaacaggcttcactcactcgctgcttcgaagactgaaggtctctgcgtcggtatcgtatgcactctctggaggcgcgcaacgaacaaggatagaaggacgacaggtcgctgccaggcagcaactcctctctcgaggaaaaagagccaggggaacgccgttccttctccggagtctggactgcgagagaaaacgctctgcaggcgtcttttctccggcacccgcagctttcgctctctccctctgactccgtctcggcaccctctttcgacttctctgcgttccaggtttctctcgcgttctcgcccttccttacgcagatcctgctggcctcca

SEQ ID NO: 3108 - DNA, 2358 bp, Toxoplasma gondii
  source 1..2358: mol_type = genomic DNA
cctcttgctgaaatggtttagcacatcttcatacctaccgactttaagcgaggccgttgaaagagatggagagaaattttctacacatctggtgcaacttgcagccacagtctaccgaaaagtcccgactataagacttgaacgtaaaatggggctttacagatttcataacagaaagaacagctggctgctcgagtttgtgtgccctagcatcgccaccctggttttacggttgaagaaaagcatattgtgggcaagcggcagtcatgaatacctcttgtacagtccattcagttttgtagagtcctgttgtctaggttaaatcggtacatgcaactccgaaaggaaggattcagtacgaatatgacaaactcaaattgaagcacgagaagtgactgacatttactcattatatcagttgaagttttccttcgcggtatagcggcagtctcactcgaccacgggagatcagcggatgtggttttctaggttgcatgcttatatagtgaaatacagacgcaaaatgcagcggcaaaactctatcatatctatgaaggacgaaggggatgaaactccttcccgtgtccagagggctaatggtgcgttgttttttgtgacaacccccagaggtctatctaacaaggacgttgggcgatacacacagaacaacgcatcgagaacaggagccgagcaaggaaattcgtgacattttcacgcgaccgttaattggaaatgcagtcactggagttatgtgctaattctgttgcgaaggaaaaggcttttttatctggaataatgtgaccgcggggggcggagaaggggggggcgcgcggatgttaaactatgtcgggcatactgagctgactcacagagagcaacaatgaatagcaaactcgtaggcgaaagacatttatggatgcaaaagttgagagcttttaaaggacagaaaagcaagtgtcatttaaccccatgtgctacgtctagcaggtgcatggggacatcaaggatccaagggaggcagagcaccggtgtccctgtgcggacaccgaattgtaattttgcggaagaaaggacgtgagactttcactcttcctggtctccaacatggaggccatggcggttgcaggggaatagaacccgccaaggcgaacttttttttccctctctaacgccgttggccgaaacccgatgaggcctcttagctacagcgtcctcatacggaactcactagtcgcctcggctctccgctgattttaacctgttttgtgaatctctggggagaagaatctccaattgcattggacaggctccacggcctcctaatgacgaagagcgcaccttttctcgttagttaactgtggatggagctgctacgagctctcgagacacgcggacccgcctgcttttctcaaggagcgcgttgtcttgttccggctttccggaaccgcatcaagaagcccctaccttcgaaagtcaattgcagtagctgttttatttttccaaaggagctcttttttccaccctggatccccgttgttacacttccagttcccgtgccacaaacacgagtcccagtgggaatgactactagcccagtgtcgagtagacagggcaacatttccgaatccactgcattaccccggcagttttttcgctctttcagtcgacttctacgttcaagagaggtttaactcagtgccaatgacacagaggagtgtagacgaaaaagtgctgtccgtcacactgaggctacccatttgaacccgtgttcccggcgtcgtctggttataggtaaatcgggacagttgaaagtcgagcgatgacgtttttgcaagagccgttccctgttttcttcgatttgcttgcacagctcgcgaaacgttggcgaaaatgatttacatccacactaaaatagcagacgatctcagtttttttagtcgttcgagctttttaatcgtcggtgctgccccgagtgacagactgatgaatcagcgcgactctctttaggggaccgcgaagcatatgcctatacgtcttcacttttttcgcattatgttctgcgccttttactgtttaaggcgcgtgcttgtgtccgaatgcgtgctgtgcattgcgaaatctgcgggttctttacacttatcttttcccgcccgaatttgtgtctaaactttaaatcgacggagctcacgaggcagtcatgacacggtcgcggatggacgacaaacagatcacaactgagaagggaaataagagacagagcctgcaggcttctttggaagcaaactgtgagtcctctcgtcacatcaacttctgaaaattgtgttcgtggaatgcagaggagtgtaaaaatttgaaaaa

SEQ ID NO: 3109 - DNA, 2171 bp, Toxoplasma gondii
  source 1..2171: mol_type = genomic DNA
tacgtccactcagccacgcatatacacattccgaaagtaaacgtccatatatatatatatatatatatatatatattggacaatacgaaatgcagttacatatttgtatacgttcttcttgcgtatctatctatatcgtatatggcgtgctatggggtgtgtcagtggaaagcaaatgcagacgacatgtggttttagaggcatttttcgctgctcgtctccatcataggcgagaaggggatcgtctcggtgttcccgtctcacgctttgttctcttatagaaagttgcgtagaaggtctgacgtgtacggcgcgtatgagtcctccgattcaccactgagtggagttctttgtggctatttgagttaccttttaaaagtgcagttcctttcaggagttgcggtcgcgttttctgctttagacagtctgcgagcagagcaggtagactacatgggcgtgcgatttgaaggtaaggaaatgcattttttgacgcatcttgtgtcggcccggagaaaattttcaggctgcggttatcctcgacctcagcgcatgaaggaaacgctggagcttcgagcctcttccgcacagaacgaaacggctgctttactgaaacgacaggcgctgtgtagagtgccaagagcaaaacctggagcgggggaggagacagacgcgctcgagcatttgtcgcttttgtgcttttttgctcgagcaaggcccgggaagcacccgcacaggctgtgatggcatctcgctgaacaccagatccaagttggattgtgctagcacagttgagatgatacttatgggtaattgcagatatcgagcagattcatctcttccgtcatttcctgttggactcaaacgccgtgactctcgggagggagtctcgaaagacactttcactacgtcttttcagaaaactggcttcaactgcccccggcctacatgagtcgcctgtcctggccaggccttccttcggaagcctctcgcgtcagacaaagaacgagaggctgctccgaattccagaggagaagaagagaaagcaaatcgtggggacaccggagagagacgcgcagacaaagctggacatcgaaagagcagcaagaacagcccaccgcccatcgatgaagacgagacagcagacgcagagagaaaaagaaagaagagagaaagacacagagagaagaagagagagaaagagaatgtaaggaggcgtaagaaagcaaggatcatttgatttcctcactttgtcacgatgcgctagttacggggtagagcagtgtgacttgcagggaccttgctccacagagaaaaaaacctttttccaccgtagcaagaaatcctttttcttgaaagagaggtcgcgcttctctcgttcgacggcagcgagatgaaacagatctgcgtcctgctggtggcacccgcttcccgtcgattctcctcgcaaggtttttcgttggtctccttgccccacacatttcttcgcacagagttgagagacatgcgaaggcgagtgtcacttgaggagaaggcgaaacattcctgtcctcacctttccagcgtttcccctgcttttctgcttcttttctgaactcggcttgcctcactggacttgtggtctcctcctctcaacctcactccaggtgccgcgcctgtgaatcgtcaaacgaggcccaatccgcgttctgcaggaactgcatgcgcgccgtttccccaaagctcttttctgaggagctatcttaacgcggaaaagccagtctcttcgttggacattttttcttccagtttctttctgcttccagactccttccctccgccttccgcctttcctcaccagtctctgttgggcctgctgagacagctgtctcctcctgacgaggttgagcgacttgtttttctgaaggcttctgcgtttttcttcgtcgttcagaaggcgtttgactctgtctcttctctcgttttgcggtatcgcttctcgtctttctagtcccagtttaacctctctgcttctccccagtgttctgtccacgaccttttcagtatcgcggcaactgctttgtttcctgtctgcttgtcgtgagttgttctcccctgtctctctgccttttcctccttttccgccatccaacttgttcgtctcaattccttcttcccccaaattttctccaaaa

SEQ ID NO: 3110 - DNA, 2751 bp, Toxoplasma gondii
  source 1..2751: mol_type = genomic DNA
aaggcactggtatcctcttctggtatctgcaacctcttcactgtacatatatatatatatatatatatatatatatgtataaattcacaaatatatatgcgtaaatttatatatatatatatataatcagtttagatgtgccaagattcgtggattttgtgtccaagtactcgcagctgtaactgtccatttaaaaatgcatttattcactacaggtatttcgcacgatggttcgtctgtttattcggaggaacaggaggggggtgggcaagtttttcggtgaccggaactccgtcgaaggctactccggtcactcggcaaaggcgcagagacaagaccgactgtgtttcatagagatgtcctccttggtcgcgaatgcctcattgaaaacgcgtttcttcggaaagctcgcacagaactggtttctaagcttccctctgtccactctgctccaatcagcggaggttatccctccccagagagacgaagggcgccgatatcccgacgcaaaaaggcgaacaaacggaccgcaaagcgcatgcgcagcttcaggctgaaagaacgcgacactccctgtcgactcaaacatgcagtcacacagccttcgccttcaacaacaggcaatataggtgtatgtctatatgtatgaatatatatatatatatatatatatgtatgtatgtgtatataaatacatgtatatgcgcatatgtttgcatatggatagaagttgtatacatgtttttatatattgatatcgatatcgatcgatatgtatcggtataatatgtgtgcatttgtatttgaagggtggtgaaagagaggaggcctggagtgagggggcatcttgtttctgaacagttgtggggagagtggagagagtggagagagtcgagcagctcgaggacgggagagaagagacggagttccttcatgtagacgccccgtcaaaggatatcagaccgagctgcgtcgacggagagaaggaaaactcagctgcccttggcttccaactgtctgtggtctgcgcgcgcggcgcgaggtggacgaagactgtccagagagacaagcagagtcagatttttctgcagagatctcctcgcgagctgaggtcagccgaagcgtctgtcgcctgtttgcgcgacgcaggtgtgttgcgtcttctctctcgctgcgatggcttcacttccccagtcacctcgccgacgcagcgggcaggcaaccaaatagatccgactcacgcagagcagagtcgtcggccgtacaaatgcgttggccttgcagacacacagatacagacacagacgtcaggcgactctgcgaagcaccgacggacgcagaggaacagaagccttccgtcgctttcgctgtgtctctgctgttcccaggcgaaaacgcgaaaacgctgttgccttgatgccttgctgcctcgttgcgtcggtgtccctctctacttcctcgcgtcacagttcttcgtttccacggtgctttgccgacgaactccgcggagcgccagcctcgttcttcgcttcttttcggggatctctgctttctttttccttcgacggcgttttcgctcggggcgtcgtcgcccaccgccttctcactcgcctgcaactcgcgagctgttgtgtgtgcgatccaagcgcatgcagagcccatttccaactcgctgcttttcgcgcgaagagtccccgtcgacttttagcctttttaggagacgcaaagtcttttttccctgccgctttcctcgcctcaggttcgctgtgaaagcgacatgcagacgctgccttcctcgcgctccagcgcctgagatttccgctcacgcgtttccggtggatgcgcagctggcctggactcccgaacggttttccttcgctttctcgagaacccttttcttcttgtctccgctctcgcacttcctccctccgcgccgtcgaggcctggcgcagctgttcgcctttttccaagttttcacctccgcgtgagacacggccgaggttgagaagcgcagcggggcaaagccaaacgcgtcgaaagaaaggcctttttctcgaggcggcaccctgaaagattctgctcaaaaggcgagaggaaaacagacagacacgatacaaacagaggccgagaacagcggcggcggtggtggcgccgaagagagacagacaggagaagtttttcgtctttacaacctctgttcccgcgttcttcagagctctctttccacttggaatcaactggaaacagaaacgctcggtcgcgtcgactcccctcttctccgcgtctcgcaatctgaaaatcccccggaaaagaaaagcctgacgctcctgccttcggtcgccggcggcgctctcgccttgctcgcgtggatactccccttcccccctcctcggcgccttccacttcttcatcttctcccttgtcatctgtcgcatcttttcctcttcctcgctcctatcttccttctcgtcctctctgaagtcttcggagaggggaggacggcgaagctacgctgctctctgcgcgcctgtctcgtcttctctcgttctggcttctctgctccattccccagttctcctccctcttcctcctctgctccacgtcatccctctcgacgccactctcccgttttacatatatatatatatatatatttgtgcaggttctgtggttgtctctcgcgtttctttgtctccaacttatacaccgctgttttttttcctgcatattttctcttttctgcttccacca

SEQ ID NO: 3111 - DNA, 1775 bp, Toxoplasma gondii
  source 1..1775: mol_type = genomic DNA
gatatatcacttcaggttcactgacggagctgtgtatgtacacagggatctacggagagagaagaaggggtaagacctgcgtatgcagacgtgggtttcttcacaacctctgctgtctgtagaataactttattccctgaacctcgaaatatagtgaacctgctgttggagaggcaaaaacagtcatctgcacgcatgcatgtgaatgtaaccctacatcgatcgcagtcagtgtgtcctgtttgtttctgttttcgccagcttacaaggataatccatagcctcatccctcaaaattgttggtgcatttgttttgagcgctaacgcggatactccagagaggacgctgtccgtgtgaaacaaacgaactctctcgtagattttctcgctgacattatctccgtacctgaaggaaagacgtagcgaagcacacgcctcgggttacgtgtgtgtatgacatccaaagcacgcatatgtgtatttccagagagagctaggtgtacacaccccagcatggaaacattgccccgcttccttctccaggactcataattgaacctacacactaatacttatactgaaacgtacactcacgcagaaccatgcagcaggaaagcgttgtggcaaatatgaaccgttgataagggatcaaacataggagcctgaataatttaaaccgccggaaagatgtatgagaaagatgagcatgaatattttgatggcgtgccggaggggcaccccgtgaaatccgcaagaggcaaagaagctcactttccacctaggaagtcgatggcgtactgcccaatgccaagagcctggtttgagtctcgaggcaaaacaacggtgtcagctgaagtactttgagtcattttgaggactgtccggcaaaatgacggctgtaaaggcgcgggcagtgttcataagagcagttttccgaggcttgacagtcgggttttacggataaaacattccaggagctgtcggcgagagaaacctggcagcgtcggtggcaactctttggaccgcgattttgctgcagcatcagtccgtgtgtgcctcgttttatgtcttggtgcacgagcacaccgtcgtcttcgggacaagacgaatggacctttgaacagtcttcacaacactgtgcagaaatgtcttaatgcttgttcgtggggatagtcgccgtctgcagttcatctgccaagcctacacttcgttcacagggaaacgggatggtgagctggtcggctgtacgtacaggcggctctgtaggataggcgacttgtgtgggtgaaactcactctagtcaaatgagaaaaaaccgtgtcctccactactgcagatgccagggcacctcgtgggcttttgagtctccctgcttttcgagttttgaccttacccagcaaaacgcagattggctggcattcacgctggcgtgcatgcggcgcgagtcgcgaatcgcaaggaaggcattctttttgtgccgggcaagtcgtcaccagaagaacgtcttttccagcggtccatttctcctgcgctcttcaggggttgcctatttggagatgtttgtctggctgcccagcacacacatacacactcgtgttccggatctcttttttcgtctccgggatatcgaggcctgccgccgaactgaaccgtctgtcgagtagatattcagctccctggtgtgtcgggaagcgcggctttttcccacactatcccgtctgtaaagtgcgccctcgtcggggtattgtttctttgacaccaacgcgttgccacca

SEQ ID NO: 3112 - DNA, 3670 bp, Toxoplasma gondii
  source 1..3670: mol_type = genomic DNA
cctttagctttcttagggccattctgcgcgaaagacctttgttagaaaacatcgttgtttgtttcttatagcgtccaaataatcagccactctgaggttcacatgcagctgtggttagggctgggaatataggaactgagtcagcagcagatgctcaagaaattgttggatgtcgtgggctacacaggtccagagaatggcgtcgatagcgttgttccaaggactgttacaaggctcattcacaccggtgtcagcaccgagaaaaggtgtactctgaggaaaggcaacgccacagatttgggacgactgttcaacgtcacagccactatgccacaaaagtgttcatccgttctgcgccgtttcatcgttctctggcgaatgcctgtcaggggacctagacactcgaagcaggcttatagcttttctcttagtttgcgaaaacaacttgtagaagcgtgctgtgtggagcctggggaaagattatggcgcggaccgaagagatgtgagtagtctccaaagtcgccttgcggcaggcgctcttgaaacaacagaacggaaaaagtgcgcagtggagatgcagtgtcccggaggcgatgtggtcagcagaaggaatgactatatccgtaacaagcataatattagttaactagggttcagccagagtacgcaaaactgttgctcgagatgctgacttgagtattcgggggttcggtggagttgcttttacagacaaataggtgctttatcgcaagtctttcatgagggagacaacttgttggcaggggggaaaatgatgtttttaaaaagaaccgttgtttgcactttggcaagctgtaaagtatattgagactcactatggaatggttagagtcacggcagcgcgtttcccatgttaacaaatgttaagcgaccgcagtgcttttgtgagttctcgagttgttctttacagattggttaccaacgcatagccgctatcacagctagtggcaggtttgtgttaaaacccctcgtatgcctcctgtgtgccacattaggaccatgtactgcagcatgatcgagttgtgcgaggcaacccgtccagtagcacgaacggctggctgaaaagtgcttaagtaccttgcatgatgatgcagctccataggcgtctgagtcatgggatttataatactctcccagcaaaacgacccatgtcttttaacaaggtcttatacgtgcagccttccccgttccctgcagataggtcgggtagaatatgtagcgtcctcgatcaacacgtaatgcaaaaacgggtgacaagcagcacttccatttaggtgttcacttctatctttcattatcaggacctgcaaaaggaaacaagtggatggcagattctatctaacaaaaggatcctctatcgtcaaaaactaaaggggtgccttcgcagaggacagattttcccgctgctaagctggaaacccgaaatctttttcaagcccacctcgtattacatgttattttcgcggagatgttgtgggatattgagagacgctcacgaacccaaaaccgtaactttgtgctctcaatggtttgcgataattacaccgttgcccctgttaattcctttgagtttcacccttccgagcttccgttatattgtatagatcacatggcttttcatactttgagatcatactagtgacaagaagggaagcgtgtttccaagaaaaaggatatttagccaggaagtacattttttgccatcagatttattttttttaccattctgttttcactaatggagtagcccttggttttgtcattctatctactttaggcggtaaaacatgaccggctgtacgctagagactaaatccagggggaatgcaaagcgttgcattcccttcatacgcacatatatgtcgagattgctagcctatgaaacaaagaggacgaagaaaacgctctttcacttgctgtgccttgatggggcccctcaggaaaattgtctgcttggaatgaaagccaatgcatcaagccccaaaggtggcctgcacgctaactatcgatatgggtaagtgcaagaccgacatctatccccgaaaaaaaggcgaagacaaagcgtattagtatgcatgcgctgctgtaacagagtttgcgcatttcgttctcaaaggcctcattctggggctcgctgtctgctctctggctagcagtgattgcgatggaggcagcagtggtgacaccgcgggtccgtgagaccatcgatgcaagagtcccggcaccctccatgggagcagaggatcgcgattccattgttgggtatacgtggatctctgcttcgcacaacaaccaacatgatacagaggcacttgcagcatcttcagaacgaggttcgcctccagattttagccgtccgatgtcagctctctcaactgcctccgctttttcccggaaacctggcgctacagatgacggactggtgccgtcaactgtcgctcctcacgtacaagaagatgtcagttggcggcaaacatgttgctcaagcggaggtgcccgtgtcacggcagttccttcttcgaaacaaggaagcggaagcgacgaacccctctgtcacctgaacgggggtgagacagaacccgatccgagagcttccctccgacagacctgcaacgcagacgccgatattgctggtgcggattcggttagagactggcgagggccagtttaagtttcccaacacagctctgcagacgacgtattgtttccaaagcgaaatgggacagttctggcaagaaacctgcgctaaacatgcttagaagggaccgctgaagaaatgctcgagaagaggtctttggccggacactcgtagtagtacagcaaacaagtcgattctgagaatttattggagtatgcgctgaacaccacaacatcactatactgcatgtacttaccacgatagtgatgagcaccaagattgaatggctgtcgtgctacccacagtgcctgtcgagtggcacaaggataatctggtcacctgtggaaatgcaagatagtcacggaacctatccatcatcccgaagtgacatagaacttctgaaaatccaggcgacttgtgagaatcactacagatatgacagtaccagtagctgatcccttcatgacgttggtgcaatgtctgccagtgcatttggggaacaagacacaactgaaaatgcagaaatcattcagatcctcttggtatatagcaaccaggaggctggcgtgacaagcacttatatgggataaaattgtcgttggaacgcggcaccgagcaccagccttccacaaagtggggcggtctgaccctgctcgtgggcgatgctgactgtacttctcgcaggagcgaaagatgccggccgaaccgagatattttgtgttccctgcaagtcagctcccagacggcatcagccatacattgaatgcattgacgtacaggaaagtgaccctgacgagcctttggttttagcatatcggcgacgttgtgaagaaattggaatatcgccaaatcctattctcattgagacgttcgaggctatagacagaggcacgaacggttcgggacagttggatgctttagagcaacacatacacgtgcactgtcccggcaatgtgaagcctgtgttttgtcaccgactagacgatcgcggaa

SEQ ID NO: 3113 - DNA, 2393 bp, Toxoplasma gondii
  source 1..2393: mol_type = genomic DNA
cgagcagtgagaattactccttcggtcagataccgcgacagacgcatctgcctcacctgatcgtatctcagtttccttgcttggcgagcaaggagtacccgcatcacggccttcgcataaactgtcggctgatgcaggagacgaccctctctcacaagatgtgtgaggctgtcgtgccggtgacctgacaccttctcgatcttgttttctcgtggcaagcagagaaaagttgacctcttgtaaatgttgtgttgtctccttcactgcgcaatcattcggtagtccttcgggctgctcgtcgcattcttgtctcaagataccagtggctgccgaatctgcggacgcggcactagggcagctagttgacagcagaggaatagctcctaatccagccttcgacattttcggagaaaaggcgaaggtgggcttctcgtgtgcacatctctcttgggatgtggcagccaagcccatgtgcggccttccagatccgttgtcaagggcaacggctgtatctagaatctctcccgcattaccagatcccgagcgtgttcttgacgaagtcgactgcaaagcggggccctcacctgtcgaatggtggccattctcctctttccgtgcaccctcacggacaaggctgtccctggtctccatgactggaactgtacaatgaaaacggacgaccggttcacctcaacgggactccaacgccacattcgttgagaggaagacgtcttaggagcttctcaaagaacacatatggagcttcgatctttcagacctcctcgaaaatgctgacggcgaaagtgccgcgtttctactgatgccacgtataggacacctgcttgccgcttgccccgtgcatgcgcagatgcagaggaaaaaacatctgccgcagcaaactcaatgacataccgaaactgaccattcggcctgcgtgaaaaaaagcgtagtgctaaattttttaagatcacgctgctttgtcgcagtagcaagacgtttccgaaaaaacgtgcaaagctgtcatcttccagcgcacagctacatccaggagagggtggattgcgagaagaaaagagagaggtagaagcgtgcacaagtgaaagaaaaacatgtagagcatgtgtatcgtcacaaaattctagatatagagtgtatgagcattcgtgtaacgtagaaatgatccgagcaggaacccatcgagtcgcgccgccaatttgagcttgatgccactgcgatgacggcagcctttgacggaagagacgggtgtgcgaaccgcagcatgccgcgctgtgtcgcgcaaccccagcacgccgtccgctttcgaacgcctcaacactggtagatccttggttgtccccgtaccagtgtctacagcgcagtgaacacactgtgtcgccaaaaaaatactggtagatgagttccctgttatagtcatcgccttccaagttcggacgaatgtccactgagatggcgacaggagggacgatttttccgaggacaacgcccactggcacacataacgtgggaggacaaaccacatagcagttgtgtgcagctgcccgtcgtctgcagtcatctctctgtctgtggggcttcttggtttcctattggcagagacacttctaatgtactgtgacggcaggaaattgactggcacgaagcgattgcagtccgcgagtgcatcgcgacgccgcgaaactcatcgggtgaacttcttctgcggtgattctctgatagaagcagaatgtagcgatttgcattgcccctattgtcggttcttcgactgtcccagtaccagcatcacatttgaagagagatcgagagcgcaagaatggctgtgtcgcgcagggctgcgcggtaccgccggcgttcagtcttgtgcttgcttcgatttgaaactacacggggcatgagtgaagagaatggccctgcgccagtacacactattggggcacctcccggcaatgctttagggggactaggctgtccaggcctttcggctttgacagcacgggtctctatccatgcgcttgcattcctcaatccatgacagttcacttgaaagcgccccaaaacgccacatcgttgttatttgtcacgcataacgcaaggtaaaagcgccaagggggaaggacttcgagagaaaagaagcgagtaggtttttctgatgcagcgcattcaagggagtaaatgttttgtctcatgtggtgggcacctggccatatgcctgccgttgcagtgtgcatacatcagggcgcagccgactgttcttacacttctgtggatcactccaactgcaaagcttccttgtttatgatctgtatctctgttttgtgctactccctcgttttgataccgcgaggttgctttattgttttgctgatttccaaaga

SEQ ID NO: 3114 - DNA, 2547 bp, Toxoplasma gondii
  source 1..2547: mol_type = genomic DNA
aagcgatttgcactcgcgaagaacttctcctagatcggtttcaatgtcaagtgtcgtccctgttacgggactttttgttgccgtcattccctgttagcccacccttttgttgactgatctctacaccaacacttgatgcttgacagtttcacctatttgctgcgttgtgagggagtttcgctgtggtggcttgcgtgtactctttgccgcatttgagacagggtcagctttcgccgcatgcgtggtttcccgttgtgagtcgttcttaggaactaacttctcctgactctgggtttcgactctcgcttctgaaaatttctcactatcacgtgcccagaagtagactctagtatctgtcgattattgctctagagatggttctccaaccacagaacctgcatagggataatggaaccaacgctaccatgcctttaaattgaacccagcaaccagcaaagcatgctgttgtacacggcagtttcacgctcgatgtaaagttgacagtggaaatcctagggctttgaggaaccaccatggcaacatcacaagttctggcaaagactgtgttagagatggagctcctccgcttaatgcccttgggacaaattttgtctcgtacacatgcctgagcttcaaaggcgtattcttccgtaaacattaggtttctagctgcttttaaaaaatcccctaaagatacatgtgccaaggaggtcaacacaggctaacagacacattgattttcgccctttgaggatctccaacaaacatggggtaccttcccaaaaaatatatttgtcaagacgctttgccaccatctagtgtccttcgagagacagcggccaacaggttttaaacggtagttttatcaatctggaactagatttaagggaagtaatgcgtttcatggttttcactgatagaaatttgcgcgcatctgttcctgctcattctaatttggatccggtgtttccctgacccgatgccggcacacaacagcacaccagaattcggtcgcttccgacggaagcctttcggtctccgccacttgccttactcaaaaatgcaagctgtagctatgactccgtcggcatctgctttacagaggtcaaaagcatttcggtctcatcggcaatggcttccagcctcacaaaaaaccacgaagtttgtcaaacactggcactgtatctgtctatgcagattccagttcagccttctcttggtctcaaagatgacagaacagacagctccgtcccaactacgagtttccgatccttgacagacgttgcgaggcttcagttgtaaatgcgtgcgcgtctgccccgcacatctgggctgtgttccatgtgtatcccgcttgtacctgtgttgtgctctcagttcggtgaggaaaaagaggcgaatatcgctttaccaatgctgcactgtatatcccttgtggccgttacgaaagtctatgacccactttgctttgggtatgtccaagctgcgattttgcacatgctgcgtcgccccccgccccccccctcactctcgcgtcttgacccacagagctagcagaatgtgccatgagcgcgcttcgttgttcttctttccttaactgtggttttgaagagtaacgctgccccttttcatcacacagtccgcggccacacttttgtcgagacgatacacgtagcggagagttcgcaatattccagttggacggtagcgctggaggagagcaatgacaaggacactgttgctgcgcgccccccgtcccgcagatcagacaacttcgccgttgcgggattatcgaatctgtgaaacgactgcagaaaacatgtgtcaaaagatttgagtgaagccacagaatcggccttcccttactccctttactggatttgtttcaagcgcaatctcttactgcccttcttcacaccaactagaccaaaacaaccgtggcaagagcagtagcgagacacatcgacacttgtaagcttcccgcgtttcttgtgcgatcagctggcacaaacctcgttggaccgggtgacctgtgcgtttgactcgtttcggctgcattgtgatcgcttttttcaacagtgttccgatttaccccccatgagtctttatcacaagagtggtaaacaaaaagaggttccccgctccctcaacgcgggactgaaagtacctggccgcttcccgtacgaagacaaatgacacagaatgctcatgcgtcttgtaaaaaccatctgtattttggagtgcaactcttaaagtattttcttgggatcttcacgctcagaatgttccagcgttgttacaagaaaaccggtgagacatctagatgttcttcggcacctgaaaaactggcagccaagtggcagctgcatattccacagcccgttgttaaggagcaaagtctgcagaacacggcagcgttgtgcaagcaattcaccaagcgggttcccacctcttactagttcttttgccccccctttccccccatttcccgcagctaacctatttgtcggaagcgggtgatttgttggttgtcttttcttcccggaa

SEQ ID NO: 3115 - DNA, 4650 bp, Toxoplasma gondii
  source 1..4650: mol_type = genomic DNA
gacttactttgggctctctttgcgcctgtgattttcagttcgttggtggcaaaggcccgcctccagtcgtgggctcggagcgtgagagcgatttccttgtacgggacggcggggaacatgcgtttgacgtcatcgaccatgagagcgaggacgccttcaggatcttcttcgccaattgcatgcagagcggcctcggccgcaatcgttcgttcccagcgaggcaggagatccatgttgattagcttcacgcggagctggccgccgcacccgcgcacatcgtacaagccatcgatgaggacatggtcgtgcagaaccggagacaggtcgacgtcgcagaatcccttgacttctttgccgaggaatccgccaccccatatctcgatgcggaggataggcgactgtttgttcaccaagtgcgtgatggaaaaccactccttccactccgggttccggcgcgcgaccgccgtggacgtcttgtgtttgcagctgccgtggtagaacttgcaatacaacttcttcccgtccatattttggcccccgtaaatcaccaccttgatcttcaccacttcagttgcacctgtcgcagacgcgaggggcgcggcgtccgaggccacccccacggttcggtcgcgggtcaccgccccaaaggagcgcgggtctgctgggccagaagccgcttcatcgcgcaacagaccgatgtcggagacaccggacgctccgtttgagcccacgctcgcgccagcagtctgcgacatgcccagcgccggaacgcccgagttcgtgcgaatctggaacgccgacggaggcgattgcttctcttcctccttctccgcgaccgcagacgcgatgaacgacgccgggaccgccggcgttccgctgacgtctgccgacatggtggaccttgggcaaagaggcgcgggacgaacgacggggaggttgcggttgacgcggcccgaaagacaaacgggatttggggcgccaaaagccaggatcgggatgcaagttcaactcgtgagaagtgggggtcaaacgccaaaaagaaagagggggagtgtgagaaaaaactcgaggaaaagagacggcaggtacggggagtagcaagcgagagacgctggactacaaaaggagagtttcacctagaacgtggatggtgcgtgtctgcccttgtgcctgcacgccctgctaagaaaaggcaaacgccctagaaaacggtctcgaaatgtcgcgaaagtgcgcacaggcgatggctgcttaagtcaacgagggatggaactgccggtgcggcggagcgactgggccgcgatacggtttgcgcgcggagaaacgcaactcgacggaacgtgacagagagagagaagcgcaaatggcacaaatcttgccggtggatcggacagattgaaaggggatgacgacgtcgatggcggtacgcaggtgtcccgtttagccgtcgcgctttggacgatgtttctcgaaaagaagagtagggaaacgagaaagcatccggggtttccctgatccaggaaggtatacaccaagagcctaacgagatcagcctcagcatacgaagtttagtagtaagcggtatggaatgaccgacgagggtggaacgaatccgaagccaaaacgaaagcggtgtagagtcggagtgtatgtacacccaaagagtcgcagtcgcagtgtaaacggaagctgacacggaatgtgccactttcccgagttttcctcgggcttcgtgacaaaacagctcgaccgttctctctgcgggtgcgtccggaaaaagctggacgcaaggacggggggcaagaagtcgggtaaacgatgagaggcgaagcggcgatatcgctcgaaaaggagcgcaggaagtgtctgccactactagcgttgttgcctgtcctcgttcccagagtcgtcccgtctctctcgcatagtcgtcccgtccctctcgccgagacccgaaccagtagtggaagctttttgagcacgctttccctcgtctctcgtcgcggcctgcccgctaccccgtttcgccgacagcggaactggtgtttctgagtgagaggcgcgaaaatgtccaagcaggtacgcagaatgcatttcgagcgcgcgcgccgtcaagagtcttcccaaggaaatccactggaaagcagtctgacttcgtcttttctccccattttcgtggcagcgtttgtggcatgcgcgccgctggtgcgctttcgtccggtgagacgtcgtctttgccagcctgtaccggagggcaccgcaatgaacgagcctctctatatgcccaaggttgttttccatccagacaaaaagcgcgaaaagagtttggaagcgaagaaaagcgcaagaatcagaaaccttctcaaaacggggaggcggtatgtcgcctccgatggtgggattcgttccgtaccgttggtggacttcgtcgatgactccaacagtcggggatccccgttccatagtgtaccggcagcttttcagtacagaagaagcgcacacatgtatacacttttatatatagctattcgtatgtacggatttcggcacttactttagtgttgaccttctagtgtgctgtgaccgacccaaagaaggcaaagcgaatctttactagcgggaacgctttcggtgccacgtttgtcacacagtatccacctcagtgggcgccgaagaagaagagcctctcgattcagcctcgttcccctccctgctcacccacaggttcttacgaacagagatacacaaagacaagggtagctatctacgtatatatatatatatatacatacatacatatatacatacatacatatcgcccgtggtggacacagatggatatgcgtctaccgcgacactctaatttctgcgggtgaacatacaagcatgaaatgtctcgatgttctcactacacaggagaagtttcttctcgaggttccggtatgaaagacatacccgacgactctgagaaggacttaaatccatatacacctgggagcgtgctgaaaagggactcccctgcagctgtgtagcagcttgcacgctgaggcaccctgcttttgacccttgaagcgtcagtgacttgagcggcacaaagaatgaacagatacgcccagcatggtcgctgccggacaaaaatagcttttccaggagtacaacctggcctcttttacgatacagacactcctatagagcatgcctgcgcatttaccttatatagagatagtcgattcatttcacgagagttcctggggaagaagttccatatttatatggatatatggatatagaaagacagacataaatgtgtcatttaggtatatatagagtattgtatctatatgcagttccatatttatatggatatatggatacagaaagacagatataaatgtgtcatttaggtatatatagagcattgtatctatatgcatcaggtattcctacagcaaccgaaatgctctacggatcgagtgcggtttctgcttcttcaccatggtagccatccaccgtgtagtccgcgtgtgcttactagataccgcatgacgtattcccaccgacagacgtataactctatttcccctttgttcacttgtttgaaatattaaaatacatgtatttttccatgatgaacacgcggtggttgctcgatgtttgagaagagtttcccagctccgaaacgtcgggttttccatgcatgtcgcgcacagtcgagcacagcgctgacacgctgtctcttctcgctttccgtctgatgtttttttccgcgtcttaatgggaaaaaagaacgaccagatcgcttaactcgcctcactcagttctcagattgaaagatatagaggcacgaacaaagaggcagacagtctacgagcggcgaggggtcacgagagaagaacgagagcgacagcggctgtgtacagagcaggcaagcgcctgcttatggaatccttgagggaaaaaagaaagaggaagaaagaaaaaaatacgcatttttgtagcagatgtttgcaaagagcaacgccatcgctgctccctctaagagacacaaacgggcggggcggcgatcctcgacatttgggggtcctgatactttttccgggagtttgtgccaaggaaagatgtaaaggcctttgtttgcatttgcggccgcagtcttcctttctatttgcccgctcgtttttctgtctcttcggtctcggggtgtctcttttttccatgcgcctccgagtgctggtacatggagtgtgaattctctcgatcgatcttcgagactcccccgcgttttttccaatttcccggcgaagtttcttgtccatgcatccagttctcttctgctctcgccctctgcttccagcactcacacctcctcctacgctttctccgccgcctctgtcccttgctctttttctctatccatttgtgcctcacttttgctctctccgcgtttctctccctccttcgtttccgtctctctctgtctacgtctcctccacggtctcgcgtcgatctttgtgcctctcttcgtcctcatcaacgtatttccttcgtcgtccggtgtctctgtctcgccccgctccccggttcggcaaccctacgttttcgaccgcgttttgtttgtgcacctcactggcttctcgtctctcgtcaaga

SEQ ID NO: 3116 - DNA, 3443 bp, Toxoplasma gondii
  source 1..3443: mol_type = genomic DNA
tcgaagaagcgttggctctgaaaggatttggtgaccgccgtcgccgccttttccccacacccacacctctccatcgaacgttgctgcgaggctgatggaagctccacagcgaatgagttgcacacgcaagctgcttgctccatttctcgctctggcactgcatgcggaacagaccagggaggcagcagaaggctggacagaaggcttagacgaagggggagaggaaacacaggacgacaacgacggagaagatgagtgtggggccgaggacagcggatctgacggtcgtctttgactggacaactgtggacctctgctgcagaacaactcagaggtcgcctcatcatcgaacgagaagtggacgggccgtggaggatgcgttcgcttcccagatgcggaagagaacagaaggtgaccgagctggtgggaagatgccgctccccatgtacagagacatctgaaaagcgacacgtttgtagcccctgagaacgtcggagggaaaacagaattttcacccacagatttcacgagaaagcacctctccagataggggtcagcaaggttcttccggggcggcgaccggagaagagcacagagtcgtgaggccagttgcatcggcgaagggcgtgtctgatggtgggaaacgtgtccagccgaactcggacattcccagtcgaagtggtcgctaacgagtgctttcgggaggatattgaaaagggaccgcgctgcctcgtctgagtagagaagcggctggtgaaacggatctgctccatggtgaagaagaagatgcagacactctggcagttggagctgctggaggcaggcaaaaagcagttctgacggtcctacctcgggacggctttccccagaagcagacgtggtcgatcggaagccttggggtgaccggcgcgcaggacagacaaacggaaacgccaaacaaccgactgtgtcccttctgctggcccacccttgctcgttttcgccgattgatgaatttccacattttcgtgttgctcctcgctggctgtgtggcgcagtcgatccacgaagctcgggactccggccctgccgcccacgtcccggcatgagctcatgagcttcggcccaaataactctttggagatggagtgaaagatgtgatcccccagcagtatttgcgctggaagctagtcacagcgtttcatcggttttttctttacgaagagtaccgtcaccgggaagtgtgcgcaagcttctccctcgtcgaggcagattctccttcaggcccgtgtaaaagcagtgcgcatggaaaaacggtgagggaagtcacatgcgaaggacgagacacaagtgcacacatcgcatgccactcggctacccgcgatgctcggttatggagggaggtagcgccgcgatgtcgttgggaggcaaggccccaaatttatcaacctacttcgctgcatccttcagacaagcacgcacacaagatatgaaaaacagctgtatttagtgtgccgatgaagactctcgttgcttcggccttaagaaggcgtttctttctgcgaacctcgccgtgcctcctcaggagcgcgttctgtcgtgcctgtgtaacggcgggcgcgagcgcctcttcaaatgtcagttcacagttttttccagaggatggtgactttcaacatgtaaactcttgccaaacaatttgtaggcaagccttcttttctggcggcaaatttccattcgagacggaacgttaacacaaacaatcgctaaccgcccgccttgtcatgtaaaaccaagacttgacgggctccgcatgctctctcaaaactcgcacaagatggagattgctcaacttaacgagtgttttttgaaccaggtagctgtcttagcagttgtcaatgaccgaaagcgttcaaatgaatcttagacacaaaaatgcgtcatcgtaagagagactgctgaattctgcatgcgcccgttttgctgtcaattttgcagtgtcctagctgctgagattcgtttgaggcgggtagcaccgctcgccgtcagtgagcttttttgtgccaccttgcgtaatatccttctgaccagaaatgggcagccctccaattactacagcacaggtaaagcttgtcagaaagaatccagcagctttacagagagcgtgaaaggtgtgctaaacagtgactgtggtaggggcctccagccacgcaccctatgaaataggccagttttgctccccccacagaagctctgtttagtagttttcttttcggtcaaaccaagacatatcttaactagtagctcatctaccatttctgcggtagattgtaacttcttccgcgtccgccgtccctttcatcttctgtatttcctgcggagctgcaccgccgctcaaggacgactcaatccctgtctcagacagttgtagcatcgatatcgcttcactgaaacagattgctatacccattacatgcgcagaaggagttcatgaacgcagagagagcgaatgcttgcggtgtgctattccactccgccaacgtcgatagccacacacgtactgcccacgtttgcatacgcaacggagggcggcgtcggacatcgagccaatatacttcagatatgtatcactgaaccttccacctcgttctgccaacaacgagcctcaataaagaccaagctctcacattatgtgacgagcttctgtcttgaacaatgctttttttgcgtgggggagtaaagattttttttgagacgaacgaaaggtcattgagtcacatgaaggcacattatagccgtatgtccttgacaggacagcaagacgcgtttgccattgcatgcatggattccactttgctggcctttctgagaatgaaatggagtaggaaactgtctacctgcaggctaggagagttcccgacgacacatcgttgcgtggcagaaccggacgcatccgtaagcacacgactcaataaaaaccaactagcaacatgggtgtaatttgctgagccaaatatgcaatgcatattcttggttaatgacaacagtacaagtgaaaaaagtgtccaggccaagcggattttctcagcatgcgttcacttctgctttttcctggatgtttctgattctgatgctgacgcaaatctgttggcgccattagcgaggatataccatttaatgacgcaaacacggtgagattcaattacatgttcattttcctgcaggatcttcttgcccgtgacacgtttttctgacacggttgccgaaacgtggtgtacataacatcccttcgcggatatctgagtgtctggatcaactccgggtgtacatacaaaccaaaggcaaacgttcgtgttcagcacgatcgtgacggcactgcagttacacaaactccaggtaccttgaattaaggcgcctttctgccgacactttccttcagttttctgatttagacacatttccaa

SEQ ID NO: 3117 - DNA, 3718 bp, Toxoplasma gondii
  source 1..3718: mol_type = genomic DNA
tccacgagatgtctttgacaggcgaagcgaagccagccagagagaggacttgtgtcttctcagaaatgcaactatctcccccctgctgtccacccagacgcgcttctgcgttcccctccctcgaagcctcgcccgcgctcttcgaacacgagggtcctccacacccgcctagctggacgagcttcacctggcagtcgacggccaccgcgagaaatcgcgcgtccggactgaggagcaggagagaaggaaacgcatctttcgtctcgccttccttcgacgcatgcaggggaagacggccgcgagaaatcggcgatccgcaagcggcttccgttgcgtcgaccgccaggatgctgtcgaggcccggcagcagcagcacgccgcaacagtgcagaagacacaggctgtcagtacacctcgcagccagcagacgctcgggaagaggagcgggagacgaagaagcgtcgaaaagcagtggagagagaggcaacttggaagctaaaaaagcgaaagagcggggaagacgcacagcaacgagaagtcaggaagaaagactacactcgagcgtagacagagatgctatgaaaaaagagcagagaaactccagggggggacaagaggagatatacgcgcatgcatgcatgcgatagagagtttcgaatcctaaggttctctctccaccgcaacataatgtccttctacatgcatatacatgcatatctacatataggggtacgtatgtatatttgtagaagtgcacacaagtagtatcagtgcacgacgagggaacgcgttcctcgtcatggtgacgaaacgtttttcgtctcgacctttcgttgccgaatcgctcctccggtgacagcacacctcatagacaccatataaacaggtggatgtttcgcctgcgcatgcacaagcggcattgcaatcgaactgagtaggcgcgagcgtctgcgtctgcatctccagagctcggaaagacttttctgcttctgcgtagaggaccgcctctgactcaccgtgttggaatttgatgtatggacattcgtcaacgcactccacttcgtatccttcttcgaaagagttcgtcggcgcgcggggaaccgagcaagcgatcgaatcctgaagatcttcttccccttcgcccagaggtgcctccgcacccacgagtccttctctcgtccttgcgctcgtcattttttgcaagctccgcgattcagagagaggggggccttttctgtctctcgacagccaagaacactacagcgatctacagctcgggaaacagcgaaacagcgaatacatatgcatacatctatgtgtgtagctgtgtgtacgttgacgtgtactgatgggtttctataggcagttacgaggcgagagacagcggaggcaagcagagaggagcggaagcgacggaagctcgacgcagcgagaacgggagttcaagacagagtcccgtcggtctctctgcgctctcacattgttggtcatcgtctgggggggcgaatatcctctgtcttgtctttttaaaaaaatccttttccccagacccacgatagaaaacgactacacgcgcggtcgcaggggagagaaccgccagcgctggcctcgcgtccgtccgagcgatctggggcctgcagaaagaggactctttaaatgcgacttagagaaaaaacgaaggcagaacgccacgaaacacgtatcacataggcgtgcaagcagacaagagcgcgaagccaacggagggggagccgcgtttcccggtgtcgattctgaatctgagacgaaggaaagagccagctgatcacgaaaggcagactggccggcagtcgcgtctctggcgtatgtgcagcgtgcagagtctcttcttactgcgttccaacagaacaaagtggaggctgtgtgtgtcctctacctcggcaagcgcgttcgagagttgcgcgatttttcggcgttgcacccgaatatacgccgaatcgcggatccggacgtgtaaagaagcggccagtcggagagaccccacaaaactggacgagtgaggttcccgtccttggagggagatgactgggagacgagtccatgtgcagaaaagggagaattgaacaagaatagcgggaaggaaggtggtgaaaaggcggtaggcgaagcggcctgcgaaccgacagtcaatcgacccctcagatgtacgtacacctggtgcagcaaggcgaagcgctcgccgcgacgccgctgctggcaacggaagcagagcggacggagacgcagaagcgagcagagaggagtcagtgtcggaatgtgcaagaaggcgcgggtggcgagtctcgcaggacgcttccgttcagcggtcgtgcggcgggtcgagtaggattttttgcaggaggaaacgcaagtccagcgtcgaggcgaaagagacagcggcctggtgaccgaggccactgccggcgctccagagaggaagcacgccacgagacagacaagcgaacagctcccggttttgcgctttgcgggtgcgcgtctcgcttccccagaaggtcgccgtcgaccgcctgcacccctggtgtatgtacaccgaagcttgacgcgccagcacccgcccgtgacctgtgcggcactgagggacgggggggaccaggaagcttttcaaatcaaattcttttgagaccaaagccagcaacgccctgcgtttaagcagcaattgcttgacgtttttatcgagctccacgctccttgacttccagtcttttcccccgcgacccggcctgcttccagttgcgtcgccttcgcctgtttgtcctctcgcaaacggatttcctgcattccaacacgcagaagcttcagcttcgctccgaacctcaaactccaccgtaggcgtcaactcggatctgcggaaaagcgaaactcgtagaaagacgtttagcgccagtctcccttccgagcacctgtgccggctcgacctttcttccccaggggccctctgtctctcctgtctctccacttggtcctcgtccacttgtctccatccgttatctttgtctcgtctcttgtctctctggggaaaatccagtcagtcgtcttctctcttgttttcttttgtcgtcgctcctccccggtgtcgcctgtcaccgtttgattgccaatggtggtccctctgtctgcggttcgacgcccaacagtgtctgtgacggctcttcgcaagagagtgcacatcccggcaaacgatttctctgtttcgtgaacttctttccgcgtctcgcgaaggtcgacgctgtctcgtgacagatgctggcccgacccacacactgtcaccacaccgcagccgagcgtccttctccttcgcgtcgtcgtcggaagaagcgcttctctctctctctcgctgtctgtacagccgtgggagaatctctgcatgtgcagtcatgtaaatgcaccgcatgtgtagagctggatgcatgcaggctggggagaccggcgtaggcaagttgaaaacaggtgcagaggtgcagctgcgactgcaggcttcgtcttctcgcactcaaaaggccttgtcttctcctcgcatcactctgctctttcatctggtagcagatcgctgaatctgtctgtgtggggcgtctctgtaaatctcgctgtcgaccgtccgcttgctggagcgctcacctctgtctgtacactcggtctctctgtgtgtgtctgcagaatcgcttttgtccgcagttcaaga

SEQ ID NO: 3118 - DNA, 2676 bp, Toxoplasma gondii
  source 1..2676: mol_type = genomic DNA
caggtaccttctctccacttacccgaagagaccaaaatgggttgtccggcgtagaactggagcgagcgaatcggcccctcgtgggcattgtcgagagagccgaggaacctgcctccgtcgaggctccagacgaccaggtcaccgttttttgctccactcacaagcacggcgcgcatgtctgcagcgtccacagaggcctgtgaggcaaatgcgtcgttccggaacgcgagggcgaggacggggccttgcgcaggcgagtgagcgaactcgaggaggagttcgtcgcgccgcaggtccacgacagcgattcgcccggacaagaaaccgaccgcgacgacgtcgggctccggactgagagcggcaactgtcaccgcgccccatgcagaagaagccgaggaagcgagggaagcgaaaacgcgggcggcagatgagttgtcctcctccgaatctgacacatcggaaccagtgccggctctgcgcgcctgcacaccttcccccgcatccggcgccgaggtgtctaggcatttgagctggtggacgacttgcccagtgcgcaggttgaggaggagcagggcggccgagtcgaatccgacgagcactttgttcaggtatgtgggggggtgcacgagcgcggtgaaaagcggcaggcgccttttcgcggccgcggcggaagcgaagaaatcccggttttcacaacggcgaacgagctccccagatagccggttccacacgcagagctccactccggagaaggtgagaagccactcgccgaggacgagcaggccacgcagtttgaactcgggggcgtccggaacggcgcgatgcgcgtgcttcgccggtagaaactccgccactttctccagcttctcccatccaaacacttcgtacttccccgcggtgtacaccgtcgagtggtgcacggccatgtgccggatcttgtggccgaggggcggactcgaaaataccagtcgcagtttctcgccctcaaacacctggaacgcccgcccggtgctgcacgtaataaagtgctccgtgcccagcctcgccaaaccgaacggcacagcctccgtcactttcccgagcatgcgcacgggatgaaacaaaacgctgccctcgcgagccgagcgattgccagccgccgcaggggtcggagccggcgcaaaagcagaggcgtgcgcgtcttcgcgcttgacggattttcgggacttcttcgctgcgtccgaagtggcgtctcgacttccggaacgccccttggcagcagaggaagacgcgatttcgtctgcgctctgttgagtgcatgggagggcggctcgcgacctccggccttcccacggggagaccccgccggccaccaacccgcgcggctgctccatggccactccaggaggcattctggggggcccagttttatggagagaatcgatgtggggtctaccgaactgagaagcgaagaaggacgcaaagcgagagaagcagatcagccccgctctttgggatacgaaaggcagaggccgtgcgccacaaaaatcaagaaaatcagtgagagacggctggaggaagtgacagccggatgccgggacgtcaaagaaaatgaggaagaaggacgacagatacggttttacaaaacgcagttggagctccacgttgctctggggatctcggagcaacgggacccgcacagttggtcaaatcagcgtttctgaaagcacagagaactttggtggaaaaacggtgtctccactcccatctttttctcctcttccccagcgggctgactcaaccacggaacggcccctgacctgcggtctgcacgtttcgtgtcccctttgtttttcaggcagggaagtcggcgacagcgcgttcacttcttcaaatcgcctttcgagaaaaacaccgaggaaacattcatcggagataacagggtttttttaaggaatgagagccgcggtgtctcgattgtttcggcggcgtacatgcgcgcatgcaagcgaagtggaagagcgactcctgtggtctacctaggaatctgcaagggcatccactgccttccgcctgaagaaagagccgtacaaaaagttatagcaagacaaaagcggatgaaaagaacgaagaactcgcctcgtgcgagggccccactctgcaaatcacgctgaccccaaagccgcaagcgcatgtaaggagaatgccgctccccccttgggggctagcgcggcttctactctcaagcttgacggtcgaaaacggttcctctcgtgagaaaagaaggcaattttggcagtgagagaaggaaattggagaatgaacgatgggctctgctttctgcttgtgcaaccaaggcagcagacgcctactccatttctgtctactatgaaagcctcgtcaacagagtacctctagtctagtacaaatcgcgcgccaggcgtgcgctgcgcgaaaagtcgatgggaagctttcttaccgaaaacaccgtgcctgtgtgtactccattgtccgcagctagcgaagatggagctaactcacgcacaaactccaagacgaaagaaacagacactcatgtgtgccggttaacacggctcttctagtcttttaagggagggctgccgaacgaacgtcgtgggctttgttgtgccgcaagatggcgacgtccggcgttagctgcaagacggtcgggcgtga

SEQ ID NO: 3119 - DNA, 2378 bp, Toxoplasma gondii
  source 1..2378: mol_type = genomic DNA
tggttcaccattagagcgaaggtcactggagagagttagcattcaggtgccggcagcggtactccgtgtgaatcttttgaaaatacatcgagtagtgaggtgtcctgcatgaaaatgaacaatttgttgtgcgcgtatctttactaagcggcagcttacagcgactgtcgatgatgaggtccagtggcggactttcagcgatgtctacagcagcggatctcttctgtcaaaggcacgccatctcgtagaggctcgacgtcgcgtgagtgatcaaatattgtgtataagtttttaattttccaactgacttcattattgcgcctttctgttcgcttacgcatgctcttctgacgaaggaaacggtcgtactctccccacctacagggagcaaccgtacccacctttgtcgtgaagacccaacgacctcttggaacggggtagtgtcagtgtgtttttgtgaattggtagacagtaaacacggcggaggcaactgcttgctgtctccacagggatggaaacgcgtttgagagctttgtactgcaagcttgctcaaacggaactcccgtacccagaagacactgtcaccccttggccgtacaggaaacaccccactctccaatgttgtttttcgctgggaatatgaagaacaaaaactcataagtgaccccaagcgcatatgtcggacactacattcgagattcaacgatcccaagaatgtttcgggcgcgccgattcggcacagggcgaagaagctacccatctcactgcactcggaatacgttgaaacctcatttcctctgctctagtactcatctgcgagcgtctaaacaaagacggtggccgacggccgtctaatgtagaatcctacctaagcatttgcagtgggggcgagtcagtttgctatttaggctgttctacacaatcccatctcaggggagatcctgagtttcctttacaccccggaaaatcacaacgaaaggttagacaggaggaagtacgtacacccttgccgtgccacagagaacggggtcactgttttgggccgcaactagttttttacttccgtttctcgggaaatgaggggtcgtttgccgcgtgagtcactgggttgcggcaagtccgttcgggtagctgccggccaccactctaccgcagctgaatttgaagcgatcctatttcggtttgcttgcacatcttttcagaagttggcatttactaggattttcacaggaaagatttggctttcagcctgtgttccaatcctccgcccccgttgtgctggcgaggacgatcttcggcggcagacgagtaacgtccccttgaaaaagagtaccaagactgtttgccgtctgttcgactcccgtctcaattttactcgtctggacagaacagacatcacaaacgttgctccgctgcggtttaattctttcgttccagcgaagaacagagaacgcaggaggcacgtaccgggaacgtgtatgtctttgccggagtttcaaaacccgtgcgcgaagccgagtcctgttgctgccctcaaagccgcttctctgtaagacacggcacgcggacgggggctactatggtgaacctgcctctcgagtatcatgcgcgtttcctcttttttcctgcgaggaactccgtggcgggcgctaaagaccgcaaaaagccgtatttctctggtttttttctcggctatatgtgctctttctgaacttgttctctagccgagtgacggctctcctagccacccgcgggtctcgaagaacgcgccacttgcgcgtctgccggcttctacgtccgtttcccggggaaacaaaggcacagttttcggtcttttgcggcagtttaaggagaaacgtttctccgtgtagagttccctttcttttgcccgccttctgtggctccccgttttgcgactgccggtcgagtcctcatattataaccgtacaatcgttgttttcctctcctcagaacgcgttctcttcgtccgcctccggttttaccggccttcacagtctctcctcgagtttttcgcgaatctctttccgcagttgtttcggtgcgttccgcctctttcccctccgttctgcaagtccacagccacgagctacctcgtccgcggagcagcctcgggtcgctggtggctgcggattccgccgttgcgggtttacttttttccctcgatgttttcccgggattttcggctgcaacctccgtcctccgtccccccggagcggttctgtctaagttttgcggcgcgtactcgcccagaaagatccacacactctccgcaaacacccagaagctgcgagactgccaactcgcgaggccgggagagtgtgacagtggctgactgtacacccgaacttttgttgcga

SEQ ID NO: 3120 - DNA, 2239 bp, Toxoplasma gondii
  source 1..2239: mol_type = genomic DNA
tttccactctccggcattgagcaaaaggccaagcctgaacttgaagcgagagggtgacaggaacgtcacgaggggcgacagaggccgctcgtttctcgaaatcagcgcggtcaaaccgtaaaaccgtcgcgccgtggtgtccaggagtgctgcgactagacgcgcctgagaagcccccgagggcaggatgcgtcaaatgcgatgaactcggggaaaaaaactcaccgataggtcttcgtttcctcgccacgggggtacttctcatacgccggagctccaaatcccccggaggggtcaccaatgccggcatacatcgtggagaagcagcggcagggcggagaagcagcagagagggagagaatcaagaagaggggaaatcctggaacagcagacggaagccgagaggaaagtccgcagaaagcgtcgaacgaaagaaaactggcagacgagagaggcgacagaacggcatgccaagaaggcattgcagagacacaggaagactggagctgcgaacgtcggcaaccgtcgaggggacagacgcaaaagatgacaagaagaggagagagagaggagagggggaagaggagaggagaaagaggacagggagaacaggaaagggggaacaggagaggagaaagagtcgcacctgaggaaaagagattacggggagttatccagaaggaaccgtcgccaaggtgtgtcgaaggacagcgaagaagagaagagggaggtgacgatacagcgaggcgctcaaagggaagcgagaacgaaagaggaggaaaaagaagagaaaagcacgagggtgaagcagagacagcagagagtcccgcagacccagctcagagaaagaaagaagcgggtcggtacggaaggtcgatgtttttattgacggcacccgttaccttcagaagcataccgttctattcttagttgtcctcattcgtacaagttaaatcgagtaaagcgctgtgaggaaagaatcttgcttgccgccgcgagggccgcgagtggaggagttgttcccgccgtagttggcgagagcaacttgctgcgtctctcaatcacctacaggtgttgtttacaacggtggcagtgaagccgttgtgtgagaaaaaggagatcaggcggaagtcacgaaaacacaaccgagcggtgctggcctgttcgagagtcaagaacgcgagagaacgagggcgccgtgcacaaaaagggacgaacgagagaagttgtcacatctgtggtcgatgtcgccaagataccgacgtccctgaggtgtatgtacaccggaggtagagcgagagtccacgtcaggggatatcgatcctctgacgataatacggcgcacaggctgtcggggtacattcaacgcctacacgcttcttctttcatgaaatctgcgttcaagctaagcagtccgagaacggagacacagacagaacacaggcgacaccctcctgcactttttttcgacgaaccctctccagtggaccgagaagtgactccgcttgtcccttgtgcaactggaacagtttttccactgcgaaaccgcaactccatctccacgcgcctccaccgggtcgaccaacttgtgtgcttcctctcttttccccgaaatctgtgggaaaataccggagacaacctggcaagttcgttgtcctttttcaacagttagcttgcgtgcatgtgcagcatgtgcacggttgctggagaaacggagagaagggtgacgcgggtaaacctgcatcggtttgcgccttctgctcccctgtgccacttctcgttgcgttctttatcgccgaaaaaacggcctttcccgtgtacgtacacagcagagtcgcttctgctcgcgcgtttggtttccggcattgtctgtcgtccccccgttggaattttcccttctcttgtcctggagagtggccgctgttcgtggtgtctaatcgagggcgacttcgcgtctgtttttcttgtatctgcatctgcgagagcatctctcccgcgctgcgccgagaagcgtggagacgcagagaaccaaaagcagctgaggaagctccggtcgctctctttgtcggcgcctacgtgctcctctacgtctttttacgaatcgtcctcttccaggcatcgccccgatcagctcgacattcacatgcgcataaatatgcgcacatatatgtgagcttctgtacacccacgagtgtatgagcgttagtagctttgtcacttttcccctctcgtgtggcca

SEQ ID NO: 3121 - DNA, 4446 bp, Toxoplasma gondii
  source 1..4446: mol_type = genomic DNA
ttttccaacaaaggcgcgtggcaggcgggttgcatgtagctccgaagaaaggacggcgcgttcgccactggagagagcgtcttgcgcctggtacgtgtggacaagacttgactcttcgagagtccagccgctactgcgaggagtgaatactacgtactccctgtagacctgtaaaggctctttttccagtatttcggggtgtctcggatcgagaaaagcggaacgagtgaaaacacgcgtcaggcgttttgacaggtgtccccgattaacatactcttttctgcaaagcgagcgaaggcaacgaaaggggaaagaagtacgtgtcggtcgttccgagcttgtgccgaaagggtttagagaagtacaagcacgtagacccagcagtttggaatcaacgagctcacggggtctctgacgcatagaggcggcgtggcagtaaagacgtctgcacgcggcgaattcttggctaggaacagacagtgcagagctgtgtgtttctcttatgaagaagggtttagacatcgaggaatccacgcattttcccaaagtgcggacaggcacagaaacaaagaggttccggttcaacccaagaactgtaaggggacgatctccgtgtgatggcatacaccggaaaagtctatacagataaaaacgtagcagaatggattttctacacgcgccggacgtttctttccttccaagttttccgtcttcggtcgctgtcgaaaatggttgtttttgtgccgacttgaagtgtctcgtcattgttcggcacacattccgcaggaatacttgttcgttcatggtgcactcacgttcatttgaagagcagctcagctgcagacagattcggttccacgaacagggcggggaatgccacactccagtacggcgaacccgtgtgcatgctgatccatgaggtattccactgaatcggcagtggaggggctcatgcctcgaaggtagggatgggcgacaactcacattgaggttctgcgtttatatggatgtatatgaatgtgtatgtggacacctctagtatgtgaaaggctggcgttcgaatgtacagaagcacagtggtatctgtggtgtgcatgcctttgtttgggtttgggtatgtttgtatatgcaaaagaatgtaaatgtagacatgttgacctaaccgtcgcagtctccctgttagggaattccgttattcagggtcgagtacgacaactgcctttcaacaaagtgcgtaaaatgcgtttgccttaaatccagtcgcacgtcattttctaaatcgtttgcatcgcccttgctccccacggtatggttctgtttcttttcgctgcaaacgtcccggtagttgaagacgctcgctttcacaagaaacacagtagttttgcccaagtactcgaaagaacatcaacaccaaagaaggagaatggtattcgtgttcgacttcggacgtgtttggctgccccgagcctctcgcgcactcgggatgaacgtgcttcttgtactgggcaaaacgggacaaccagcggtcgccgaactgaggtcggagtactagcgacaattaggaaaacgggtggggcatgacatgtctgccttctcagtacccatagacacacggcgaaacgatcatggtgcgcgtccatgtttcccgaggcccccacccggaggcgatgaagattcagcgttgtacttgcgtgtgtttggtgtacttggggtcacttgaacgtcaaaagcacattcttgtaggcaggtagaacagtctgcacccacagccgaaatgctttccggtatcttcctcgaggacggccgaacgaccgcgtcaagtcttaccgcttttcactgcgtgtatacactctccatgtttcctaaatttacaaatggtcatagtatcatttgcttccgtttcatgtgccgcgagaagatcgcgagaggggcagttgcaagttagcaagtggctaccgactgacgaacaccgggctgtgtgtagcgggggacctattcggtaccacgacgacacttcgtcgcgtctccggcgctcgaatttcaggcaccgtcaacgtgtgtgcggtcctccgagcacaggctgtctactgtgtaaaagctgcttgcatcaaacacggacatcttaaccctccacatcgacagctcctccgcgttttgagagatcggtcgaaaacgaagccgcgattcacggccacgagctttggttcgtacagctcactggagcgaggacaggacttcggaacagagacccgccttgttggtgggcactccgtctcttatctgcgatgctggcaacccgtgtggagagcacaaagtcccggcgtgtgttcgtggtgccggggtgattcctgcttacgccgtcagcgtccagcgggacctgagcgtggccagaggctcctcacgttgccgcctagagacctcagactcgactggtaccactacacaggcgggggaattgcgacacaacagccaatacaggaacccatttggttgtgtctccatttgctggtgcgtcgctgaatcgcgctgaacgccatgtgcccgccagagcagtctccgtcgtctgcgtcgcgttgtcgctcgttggcgccgtttcctcggtttttttcgaataccggattttacaaccactggcacgcggaaattgagaaacgggcactcatgaactcgaagcggcgtcaggtccgtttgctggagtgtcgtattcgagtcgtctgttcgtctcctctcccgtcgctacgagtgcacagtggtgtgtacacgctgggttcttcaaacatagatcttcgggcaactcacagacacttccagctctagctggtctgctttcttctgtgtacacacacggcgcgagatgcctcccgacgaacggacgggagtttacgtattttgagagaccgttgaatctccttttgcgtacccgaagcagcctgcaggcgctccttcccacgtgtaccagtcggacagatgccagtctccttccgcaggaactgcacctacgcgccacttgcagtttggggaggggggaactggtgctgtttcgcctgcatgccaactgcgggtttgtctacagcgctgttctgaaacttcagtggtctttttgcgtttcgacgcgtcttggttggcaggcagctgtcggctccctcgtaaaaaatgcgttttaactcggagagggggtttccgccgcccggcagtgcgccttgctgcgccgtgtgttctggcttctgtgtgagtaacttttcttctcccaggtttctctgagatttttgggagttttccctcttttccttttcccgtgctgtcgaggctctgccgaaaaatcaacggctttctcgtgccagtgcgaggacacctgcgcggtgcggcaaccaagaggcacgacattgagcttgactggaggcggtttccacgcgcgttcgttttccagctccctcagtcgttgccgttcttcccagatatcagttttttcgatctcgtgtgttttccctggcgcggagatgcctttttcgagtttttcaccaccagggtcttgccactgcgctacacactgcggtatactggtgatcgtctgtttccttgtccctgtctcgtgcgtcgcgggcgcgtccgggaccctgtgtaggttgcatcgattctgtggctattttcgaaagctggaggcgactcgaatctaacttatcgttgcagtgatcacgcaatgcgggcaagatgaacgaacgaaacttcccctgacccttctgcctttctagttttctgagcgatgctgcgttgccatctcgtaccacaatgttgtcccatggaagattctgcagacctctgtgttcatcttcatctaacagaacgagagtgcaacctgctgtgtatcttcagtccctcgtggcaatcacagcagcacgggcatctgacctggtcaacaagcgccttcaccatttaatctgcgtttaccggaccatgtagatcccggtctcgggcgtccacaagacgtcgtcctgtatgtctgatccgcgtaatttcttggggcgttcgtctttttccccatacactcttttctgcgtttctctgcgaacggacgtgcgtgaatttctgatgacgagtaggcggtccggggcacaaggtcaccggggagttgtttcgtatgtgtctccgagtttgtgcccctgcaccttatgtggggtggaacccgcgtgcgtctgcgttctgcgactccctttaactttccaggtggggtgccttcctctgttttccagtcgattctgtagagcacgtggcccgcctcgtctgtcactgacgagcaaagtcgccccagggagctcgagcgactggacacacccgttcttgttggcggctgtctcgtcctgtgttttcttctgtttttgaacttcgctcgtagaaagtcaccgacaactgtgcccgaacggctgcagcagagcccgttgcattccgaaa

SEQ ID NO: 3122 - DNA, 4963 bp, Toxoplasma gondii
  source 1..4963: mol_type = genomic DNA
gcgaagagcagaaacgtcgtcgggtggtccggaatgcaaatcaagcctgcgttgtctcccccatccccgcctccacaaagagcagaagaacaaaaggaagaagaggaagaagagctgtcgagacgagcgcggtagagggtaggtgcgctgtgtttttcgcgtagctccggtaggaacggtacagcatcttcgtcgttgtcgtcgccgtcttcttcagggtcggcttcagtgtctccatggtccgcagaaaaacctccgtcggaccgtgcgcaggccagcgctgagacctttgcacgcttgtgatttgactccaacggtgacacctcgtcgctctgctcggcgctcacgccctctccaccctcagcccgccgcaggtcgacttcccaccctggaaacgaagctgggggcgggaccttgacggcaaaggcccgcgaacccatgaggccttgtccccaaatgaatttctgcaggtccagggccccgagaaacgccgagatctcctcccattgtctccgtttctccgcatccgtcggttcacctctcgcgcccgcgccggccgcggcggcctgctcgccgccgtcagggaagcagagtgcgaggaatttttcgtacgacgagaaggtgtctctgaggaccgggaggagacggcgaaagaggttgaaggccttcagctggctctcgtcgatggtccgcaccaacggggtgtcgccgaggaactcggggatctctggcggtcctaagaggagcggctgctgcctctcgtcgcgtggcggcgggaccatctcctgaaagaagaagcggaaccgggaagcgtctccacgctcgacttcgaagagaaaatacagtaacgtgactgtgtcagtgtcgaccaggggtaccgcagaggcggccgagtcgctcgcggctggacgcgcatccgcgggcgcgccttcgtccgcttcattgggtggatgcgcgggccgcaaggtgaggagaaacttgacaacgtgtgcaaacgccgggtcccgcaggcctccataaacgttgaccatcgcagtctccggcacgtcgacgacagtcgtcccggcgggcactgaagtcgaacacatcagcccgcggcccgcgccggggatcttcacgacctggatcgccgggtgtacgtacaccccgagtttcttggcttcttcgtggtacttcttcgtgaatgcttcgtcgacttccgcgcgtgcatcgacgggggcattcgccggggcgcagaagcgatttatcaggtgctgcatgtgggacacgaacggccgcagcagagctcgtctgtcctcgcttgacacaggcatcgacgcagactctggggaggcgcccgaggtcgcgccttcagcccccgtccgcgactctagcaccacgagctcgctctcgtcaaagagcgggaccgctgcgtccacctcgcccttcttgagagccaggaagcgtaggcgattctgaatttcaaagagcgcgcgacgaaggttcgaaggcgactcacaggcggccagcaaaccccactcttgaaagcgctccggtgtgatggcgacgactggcatgcccattgtctcccttgttttttctcgtccctcgcctgaggccacggcgcaaaagttctttggagcttcttcggcgtccttcttctttccggaaacaccctggtcctccggcgtcactgcgagggcatccaccttcccgcctcggcgcctctgcgcccggcggccgcgggcttcgcgctcgagttcgcgcgccaccgcgtcggcaaagtagagatcctggtcgctcatgtagcagatccgaaaggcgtcgaccagctgtgcacagagacagcgaattgcaaaaggagacacgtctctcgacggcagatacgccaccgaggtgggaagacccaggcgctccagcagccgctggcgaaacgctaaacgtgacgggcacgccgtctgtgccgtcagaggcagagccagacccaaggctcccggagaaggacatgcgagacatggcgaacagagagaacagcagagagaaggcggcgaggaagaaggggaagaggccgaagaagaggaagaagaagaggaagagagcgaggaagaagaaagaggagacatcttggtgttagagggtgtaaggtgacggggcaacccaggacgaaggacggaggtcatagagaggagagaagaatgaggaaagggtgtgagcacggcctagacaatctgtggtgggagaagaagaagcagcggttagagagagaaatgcatcggtgaaatacgcttgacagggcgccggatcgtgtccagtgctcctcgcccggaggtcgttagcgcaaacaagcggtgaactccgctcgaacacgaatccacagaggcactcgccttgtcgtgtgcatgcgaaaatgcgcacatacttctgaggggaagaactagcccgacatcgtccggttgaatctggttcctctctcccacacggcgttgagccgctggcgccggcgggaacgacaagcggaagggaaggctctccccagagagtgttctcaacaacaatcttcgttgactcagagaagaacacgaaacgaaacacacacggggaaaaaagagaactgggagtcgttccgttatttttcatttctcgatgctgctatgcgaggaggcaagatcgcgactgcgcctgtgcgtacactgcagaagcgcgcatgcagcagaaaccacgtgctcaattccttctgttgaactacattttctttgctgcaaggagaggaatgaaaaacgttgaggcgcctctccctgtccgatgcgtttccacacacttatgagaggctaactttgctggacacagtttgccgaggtctctacatgcgacgtcgatgctccgcgacacgcgtgtgcgctttgaaagcgtcctccaaggcagccgccacattgcctaggcacggcgtgagcgaaacctcacactcattaagatcttagtgtctttgcagactgtgtcaggccaccagggcctttcctcgttgcagatgggaacgacacgatcgcatcacttctctccgaaagccacgaaagccacgaccaatgtagatagagatcttctggcagaaggtaaaggtcgacatatgcgtctttctgtacgtacgtacatttccgaagtagtactgttgaaggcactttacacacaccgggtgtgtgtgtgtgtgtgtgtgtgtgaagccttccatctatgtatgtcaacttaggcgtacctacatgtatatatattttttgtacgtatatcgtgggtttttgtgagattgcgcattatttggagaggacttgctcgctcagacacactgttgtacgtgtgtgtcgcgttttcggtatcatttctgtctcttaattttagtgatccgtttgcagaaaaaaagcctgagtgtctgcgccgcttggtctaggccttcctcactgcagccgtggcaggacagcacaaccactggactattcgctgggaaccgatcgcatggggctcacccacagatcctgaaggccgcgtgtctctgttggaaatagacaactgtctcatcgtttgcatgcgcacaaaaaactcaagaacgtgtgtagccgctctggtctgctttggtagagcaggccgggagcgagcggctggctccactcggggttacgggtttacctatagaggcacttaagatctatagtttttcgcttgtgcgaactgatatttcgccttgtatcaccgtcgtgatttctggcggtcgggccgaggactggaaaacgcttctccttcgtctgccgattgcgcgtctcgtgtctccgctccggcctctctccgtgccgtgtgccgcgtcggctgtttcaatccgaggctcacgggggtgttttattctcctttgttttggctttgctgagcacatcctcggacgagagtttcgttggtagtctcgcttcgagttctccaatttttttcgcttgcgtctgaacatcttgcgtctgtgatgattcgctcatttgcgtccccacaaaaagtgccttggctcggctagaactagggaacacgcgacatccacttcgagacgcggcactttatggggtacttgctcttcgcttcgtttttttaaccacaatggaagacaaggtgtctttctttctcctcgattttgtcgccttgtgtcgaggccggtctcgcatggagggggggttttccgcgtattttcgcgtctctcttttttgtagtggcagaggtgtttgacgtaacccagaaaggctttttcacagagaaatacacatgtgcgcaatttttgcgagagatagtgctctaaagggttagccatcgcacggcaaaaaaaagcgatataggtacatacgtggggatgcgctcacgtggtttcgtccctggtttcttgtagaccttttttatttcgtctcgtcgcgtcacgagaagcccagcggctgtccagtctttcatccgttccacgctctctaggggagaaagaagctagagaaatagttccacacaagggaacctgccgacaggtgccgcgaccgacagccgtttagggaattagtaataatccggttatgcacagctacgcgtgcttctgcatagatctttctagtcgctgttctttgttaggctaccaggtgcgcgaccgaagtggtttgacccggtcgcaaagaacggagaaagtagtagtctgcgtctttgagattcttgtgtgtcggccggtgtccccttctccgttttgtcggcgcggtttctcacaagatctcgcagcgcagcgtagggacacttctggcgtgaacactacactggcatgtggccgtatacgtgtgcagttgacgggttcgggtgtcgtccgatcggtgtatttccatagatctgtatatttgtgcggaaccctgtggtcgtattgccagtagtctgccgtcagatcccaagtttttcggtgcagacttgtttcgcgctcgtttgtaagtcgtaaaga

SEQ ID NO: 3123 - DNA, 4059 bp, Toxoplasma gondii
  source 1..4059: mol_type = genomic DNA
agtcttcatgtagttgatattctttctcccgctatgacggccctcgcacgcttcgaggcatgcaagcggctcgacttttgtacagctgtaagtcggtatagattagcaagtgcttttgtgaaacgtttttcagtggttaagtttttgtttccttttgaaaattttaaacaggttgcgacgacagccgctagcaggtttttcgagggcgtaatctctctcaaggcgtcgtctgtgttgttcggggtgttctgtgcgtgctgttttttctggttgtatgtttttttagtgggcggacaactcttttcagtttgtttcctcccgttttcaagcgtgcggctgagaatatatatgcgggacctcttcaccattggaactctaattggataactggacaaaaagtaatagtcttgaaaggatcagttgtgtataccacaggctatgtcagtgacgtgtgcgctgcagacttcgctaggtaccggtgcaaaagctcgtagtatacacaagactcaattctaagtatctagtttttgactttcgaagtgcatgtccaccaaagtggtaaacgtgttatgaagaacaactctgaccgtttgttctacagaatatttttttccgtcgtcgttgtagcccgtgaagcggtcagaccaatgactggagcgttcgcggcgctagtcagtagtgtgtgctcgtctgttctctgttggtagaagccattctttgtaagcagcgcgccttctgggacgaagtgatgcaactgcgaagggatgtatcaaactggaaacctagtgagagtctctggattcttgacaaggcgaagcagcgccgctacacctgcgaatcaacgtttggttgtaactccctcatgagaagagagaagaaataaatccccttctatcgtctcgagtaacactagtggtaatatttacagtattggaaacggttgagaaaacaatgtcagaagtgggattcgaacccacgccctcgcggactacgacctgaacgtagcgtcttagaccactcgaccatcctgacgagagccctacctgggaccgctttcgccatccgcgaccccgtcagagtcgatgcagaagatagttttgcaaaagaaccggaaactgttggtggctaaagttcccgttgaaacctctgctgatacgaaattcctcagtgttgcaactactcgatctcgatacgccaactggtggactttccgctctcagttactgccgtccatccatacatgtctcagtacaatattgtctgaacgaacgatacagtacagctagggaaagcccagggaagatacgagattgagtcgttctcgacgtgatatgcgatattctttcatggtattgagaagtgcaggaagtgggcccgtgattctgtgtagctacattgccagcgtcacgagaaaagtggaaatacctctggcacgaggagggttggaaactcctctcaaaccctggaggtcacattcaccacggctccgcctgcaacgcacaaatataggaaacggcagcagtagaaaaggaatctctagcctcccttcaaaaaaacgctcaggaaaagcgaaagtggaagtggatagaaatgtcagaagtgggattcgaacccacgccctcgcggactacgacctgaacgtagcgtcttagaccactcgaccatcctgacattcgctctcggtccccctcttgccatccacgtttaggatcgagggttgaaaccggcgtggagaagcttttcgaggtttggtggaattcatcggagtctgtaacgtcaccctgtatttctctcatccttctcaaagcatcatttcctccgtctggtgatgttccagggaaatttccggctgcttccttttgtctatgtgcatgcggagatttcgcgcccccgctggttacgtgcagtatcgagcacaagcgagggggcttctggtagggggcttgttgtagtcagagtggcattatcggtgaatcgctaagtttcggctagccacatctcaaatggatcggtttcaccatgtgtcttttgttttctttacgagatgcaaaaggtcacgggtttgtggagtttcgtcaaagtgtgtcgttgctctgtgacggcagtcacaaactgggtagggcagacaacaacggacgtggctgaaaagttgcacatgcagtcaagtaatggtttctttctctgaaccaaacactgcgttgcaacagcaagttgagaagcctagcgggttgcaccacacttctaaaagctcgggtttcggctgcagccccaggataccgtgcatctacgtctggagcccctggtctggcagtaccaacggggtgcacaggttcttccagtcgaacaaccagagctcagagacgcaagggggctgtgggaatctccgtcagttctgtcttcactgacatgagcacagggatcttttgaggcctacactccaccgtttgcctctagagaattcgctgtgtatcgcatagataagttaccgcttcggcggcgctcaggcgcagcgttgtacgaagccatagagttgtgtggttagaaaggtagccaagtactaggctgttgacaaaaaagcttgtttctcgaagacgtttatagggagtgccgctgtggacaacacttcggccctctagaccagcagcagtgctaatactcgtactcgcttaggttctttcgaacggtatatggagacagcctgtcgtggagcagagacgtcgcttgagattgctgcggtacatagtttacagagttctcgcaagtggcctagggtctgtcagatgaatatgccacggagggtttcccctcggaaatagaagtataccgaatttgtcgaatccgattcttctgaaattcgcggtaggccctttcccgacgtgtttgactgttaccgagggcataaaaacacacgggaggactggcattcagttcccatcattttaattttcttcaccatgggtcgtcgccctcgttccggtcacggccgtcgtgccagaccaccaggtaactctcggagtgctgggccgaacactccccgggttcagcctaggtcggaggagacgagtattcgagattcagtggctgtctcacagccttttatccgtcgtaactcgacggagacatctctagtgaatgcattaagtcggctgcacttgagtgacgacagtcgtcagagcccccttcacctgaacacgtcgaatgagcacttgcttcgaacagcgtctcgaattcaagagggtaatttgtcgaaagatccaggtatctccaccacgtcgaagcagaaaactgaccaggatggaaaaaaccaaaagcaggatgattcagaaacccgcgattccaaccctacacccccgctccataaggtggattgttgtggcaatatggagctgctgaagttggataaccaagaacgagaacctggtccatctacgcctgcagtggcacaaatccctcctcgttcaccgttgggctacccttcacctggcgtagtgggtgtgtctcgatttcttggtttaggtcaagctccgcttctccaggggtcaagcaggttgttgtcactcgagacgcacggccacgtggcaaagcgttcgccagtgctgcagttcagtcttgttccacacgaagaagtctggggagattttgcaactgcgggggatgttgggcgtcatccgctcctgcgatcaggctttggtgatttgtcctcctcagatctcgggacgcggctgccacaatttcatgctgagaacgaattcgccagatacttgcacctgctttctgcaggcagctctcacaacgaaaggaagtcaaggggagtgaccgagaacgcgggtctggcacttcgacggtccccagctgctaccccaaggagcacactgttgccaagaagcacgctgcggtgcagccctcggaacactttgttgattttcgactgggacgacacgctctttccttctagctggttgcgttgcgcaggcatcgacccgctgaaccaagtgcagttcgggtcgttcagcgacttacccttgcacgtgcaagaagcgttatcagcatgtgaagaca

SEQ ID NO: 3124 - DNA, 2131 bp, Toxoplasma gondii
  source 1..2131: mol_type = genomic DNA
ctatggacttgccgcctaatgcataaaggatgacgcggactgtctcgggcacctccgggaagccgaagaaagcaatgagacttgaccatgaagaagtgttgcaagcgaaacggaagatacgtacagaaaggggagagagaggccgatgagggtcaatgcgccaaaggtgataatctttccagcggatcgtcaaacttgcgagtcagccataactatgcagaagggtttttacaaggcacatccggcgcatatcgtggatggtctacgatgatgaacactcgtatcccatgtgctggtgcaacgaaatcacttctttcagctcatcgtcagaatccatcgtggtgttgctgttgttaagcttagaagaacagtataataagcatctagcctatagcggtaacagcacaagttttactgtaccgaatgtacagggatgagacaaagttcgagcgagcattatagctaactgattgcagaatgagccaaagctgtaaggcacagtttcagaaagggcaacggacacaggtgtagcatgaggaaaatgtcggccgcagctggggagtacaatatgctttgcagacatatgtgatttttcatcgtcacaactcatcactctccccttatgaaagctaaaaatgtcttgcgctttgtcggtttccactgatttattgtactttctgcgcttcatacgagttccagtgggcacttcattgcgtcagccgtgcaatcagaggccactgcaatgctggcggggccgacatgttatatgaatatgaatcaaaattgacaacagccgctatagcggctgctcttagtacgcgtaagacaggaaagcatgggtggtgttatttatactgttacctgtgtaatcaccagcagcgttggatctgagcctcgccacgcacattttttgcagagtgacagtccacccgtacaaaagcatcgcttttacttttcgagtgttagattccacggtctgacggttcgtaagtagtcatcaggtcacactgaaaaaacgtacgaccacacatcctctgtcggtcccgctattagtgtcccggcatgccctctgtcatgtcgctcttgcatggatggatcgccaacgcagttgtgagtgcgccaaacatgatcactagatcaagttgacaccgcggccactggttctgaaggagtccttacaatccagttcggtgttcgctagttcatagagaagcagcatcatgtcttcgccttgtcgactcgttgatcccatgttcttactgtatgcaatgaagcgtacgactgtccgctaactatagctgtgtttaatcgcaggttcctcttgtgtgcaaatcagccactttcatgttcaggtgagctcaatccggaaaagctttccctaaagacagaaatacacggtgaaacaaaaatgtgatgataccccttcgtacccggcagttttgtgtgtcgctcgcctgtcgcattccggttcatgctaactcatgttcttgtaccatcagcgtttattattacttatacctctcatgtgcccagggctatcaggtggtgcgctgcatagcccgtcggcactcagtactacggcgtgacttctgtataagcgatgggccgatcgtcctttttgctttacggtagcgctcgccttgtgcgcgcatgcatgcatgcatgtctttccgtctctcagagatgcgtcgtcgtcgacatagttcacttcacagcttccgttaaacgagtgaagaaaatccctttttctgtctcgaggcagctcgtgtgacgtgtatgccgctgcgaaccgacaatctgattgtcggcttcgtcgtagaaggataagagttccccgagtcaagtcttcaggagggtttactgccgaaacaattacaacaatgagaagtgccctccagcctggctaccggtacggaatgttcctgaatatctggatctttcgactggaagcgtttttttgcccaggataagactttttggcgaggcggtctgcgcagcaagtcgtcactcgagcgcggttttctattcattggggtgtgaccgcttatcactgtcccaggtattcttgttcgtgtacagcggattcttttgtgtatacaggtgcttcgctgaagaacagtgtcttcagaga

SEQ ID NO: 3125 - DNA, 2609 bp, Toxoplasma gondii
  source 1..2609: mol_type = genomic DNA
acgaatacatccttgcctcggacctcgtcaaggatttgaatgacgacctctccgtctgcgtagcggcccagcacggccctgcccagcgtcacgttcagatgcgctgcgatctcacgcgcaagctcgggatgggccgtacctgtgaagatctgcagcgacgagtctgcgcagagttcctgatagatcgagtccggggcggaggctgcatcggacggggctgagtcggcagcctcagctacgacaggcaagggaacagacggtgcgtctggcaccgaaggcggcaactcgggggcgacgctcttctccacacagagagccggcgaggaggcgggtgacgaggcgagaagagtcacgagctctggaggtgtggggggcgcaaggcgcgctgcgggagccgaagccgaggaggagagtgatgcgtccgcgcgcactttgctggggcgatttgtgcctccgtaaaggaacgaggaggcaacaaccgcgaacgccaccgccagggcgaacgggctcttgatctccgttccgttcccgtccagggcacctgtgtccctcaggtctctgtcgaggcgcgccccggcgctggggtccacgggcgccacgggcgcgccgcgctctgtgccgcgggccccgagggcgggcctgtctggggggcggatccgttcgggcgccgcggagtgccacagcggagtgtcggcgggggcgaatctccgaggccggtggcggggcctgcacactgtcgtggaggagagcagccgacactgtgaggtttgagaccgagacgtctgaccgtcccggaggagaaacgacgaggcagcaaaggcgacgcacgacggcgaggcagaggaggaagggccgcggtgctcggtgttcgcaaaaacgcggggcgaagagacacccgacgaagacaaacggctacacgagagagagaatgaagacaaaggtgtcatgatggagaaggaagcggaggaggaagaaaggaaagaaaggctgaacgccgatttcgcacgccagacactcaccattttgcgatcgaaaacaatgaaacgctgggaaacaacatagaagaagcataccctttcgagacacagacgacgccgaacgagacaatccacgtgtaacgcatactcagaatacttgacctgggttcatatatacatgcaaactggatccatgaatcggggcatgtatgcatatcagtgagccagcacgctaccctgtctatggacctctacaagctttgtggaccatctatgcgtgacgaccagcagctgtcgcgagtagacccctgcagccgcgatcggggacagagcgccacagaaaagaacagagcgcgatagaatcgacgcaagaccggagtgtgctcgtgggggccagggaaagaaaaaagcttcttcaccctccaacggaggtcgacagaaacgctttgtcaaggactgcttcggcgccgcgcgactcaaattgaaaacgcgaaatctcgtgcgccaagcccagaaaaaatcaaagtcccccctggcggtcccgcccgcggttggactcgaagcgagagagcggagaagaaagagcgacgcagaggaaaaaccgccgaggaagggaaaacggaaatgcgcagtcaaccgccccaccgggaaaaaacgcttctgtgaagaagtaggagaaaaccgtacgagcctactcgtctctcggtcgtctgtgcagtcccggcggcgacgcgcaagcaggatgcatgcagtctatgttgcaaacgcaaacgcgcgttctctggcaaagaaggaacgacgaaccctccccttgttccagatcttctccttctcttttctcttatttttcctgttccgcggctaaaggcactgaggctctgctgaggtgacttgctctggaagcgctggattggaaacagaagagccgcaggccaggaagcggctgagtgtgcgtgtctcgcatcgtgcctgtcttgtctctctccttcaccttccctccctttctacgaaacacctggcgtttcttcttcatcttttctattcactcttccctcgcttggtggaattagtacgattcgttgctgtgcttccgagccgcctttctggggatacaacgctcatgaaatgctacagggagcagacggcggggaaaggatgcgacagaagaaaactacagaagggaaggtggactaaagaaggactaggaaactagtgaatgcaaggagacgaaggaagagaggaaagaccgctgcctctgttaggagggtacacgtctctgtcttaaaagtgggcatgcttcccaagaaggtcaaatgaggaccagtcccaaagtcttagcattccataattggatcctcttttgtccccccctctcttccttttcctttctgtgttgggtcactcttccctccttcgttttattcgcctactcttttgtttcctttctcgtcgctcttctcccctttctctttttcgcatatcccttctgtatttcgcttcgtcctgctttctgatttctcgacgcctgtcttgcgcgccggggctcggctcgcgcaaggagctgtgagacacgaaagcgagtcactcgcaggtgcctttgacggcctcttccgcttcagccagtgacaagca

SEQ ID NO: 3126 - DNA, 1565 bp, Toxoplasma gondii
  source 1..1565: mol_type = genomic DNA
caccatctaagccctgagtcctgctacatttcactgaagatcagtatcactttttctgtcgaaaagcaacttaaatgctgacagaatcgagtctcacagagaaaaccttcacctccttgcttttccggcgacaacgcgaacaagcaaggccggataaggctcgaccatatgatgctcacagcgacggactgtctactggtgaacattccagcggagccgtttccactacgcttaccttctctctggttcctaggtctgcttccttgacgatgtctgcctgtggaatagcgtacgatttctccaagccctcggtcagcagtccgctgcaaacgcaggcaaggatggtgtcgcaggcaagaagagtgttgcacccgtgtgtcggaaacatggactaaaaagcgattctcaaaaccacctggtcgcttacccttcttcctcaaaaagcatgagctcagtagtccgtagtcgccgcgtagcctcatcgttcagcttctgctgtgttcgcagccgtcccttgagttttttgttccacagaccctgtcgatatcagccgacacgcacacgggagaggaatgcaaatgactcttcacacccaaggtccgcgcaaatctagcgaagacaagcgggctatcaaccgttccccccgcttagtgtagtcgactgttccccagcttactttgagtgatgcgattttctcatgtcgttggaatgacgtcgacgttgaaggagaactggtcgctctgcgggaacgcttcccgatgggcttccgttgcttctttccggatacaacttgttcctcatcgccatcccataccgttacttcgatctccggttggctgagttgacgcgaagaggcaaccccctcgttgccggaagcttttgctgtccccatattcactcacgaaggtcgcgaggcctactagagcagtagcagcatatacgaggacgaagaggaactcgaaaagatatccgtcacttgacaatgtcgtacttttgtgaagagatcctcgattggaacgcacagtagcataacagcatcgagtgaaattcgctcgtgccaaaatcgcatgttttcttgcatgcacgcttgggagcaaacacgggaaaatcgcttcaagctgcttgcgagcacggaaggctggctacttgctcggttttgaaggccgctgcggggatcccagtaagatttgaatgtcccgaatatgtgtgaagttactcactgccggcgctcgtgggagctaatgcgcgggaatgtaaaatagagtgtaccaagctgcaccccccccccgagtcgattgaggccgagatatgcggctgtgcttcgtttcgaggcacagtcggtcaagtttgataagtatccctttttctggttgcaattgacaagccctaacgtgtcacttggtggttcgtaaggaggtgaagacaacaagtgcgtgccatacttatttttggagctgcgacttcgaaacaagccggccagcgaaatagaacaagtgacgaatccttacatgtcacgtgttttctgttccgtgagtaagaaagagacataacagcgctcggcatca

SEQ ID NO: 3127 - DNA, 2727 bp, Toxoplasma gondii
  source 1..2727: mol_type = genomic DNA
gtgccttgaggtaggtgttgcatccgatattcaccagtgcgtcaacgggcaccggaggctggtccgccttcttcttggacttggccgagcgctccgccgtcttcccttgctttccgtctcccttggcgtcgctgccttctccccccccttcgtcttcagaatccgaggacgcctgccgaggccctgtgaggagccgaagctcacgcaacgccttgcggtgccgccgcagagcactcagctgctctttctgctgatgttcaagcaggggaagatagtccagcaggcgttgtctgcgacatatgcagaaatccacatgtcacggaatggcgcacgcgccttatggcgaaccagccgtccggtcggcaactgcctccattagacgcgggggttttccactgtagaaagccaatcaaattcacactcaacaacgctgtggctccctcacgttgctgtgacaacgccaggcgtacacacacagttgaacaccaccagcgcgcagcctgtccgcagctggagaaggccgggataggcgagaaaggcaggaaactaagcgaagagggaggaacaagggcactccggaaatttccacaagaggagaacctgcacacggagagacaaagccgtcgaatcgacggcttttccttgcaccacaaccgtctggacggccatgtattcgcgatcttcccatgccttcctgaattcgtttgcagatatacgcagacagcgtggccatctccgtttgaggaaaacgcacggagtttcctcgggaaaaagtcttttttccacgggagaaggtcgaacttacacactcagaagctcgtgaaagactttatcctgttgtcgctgcacttccttgagttgctgccgcagcacatcgtcgacgacgctctcgctccgcagcacgagctgctggagatccatcccttctctgtcagccgtcgcagtcatcctgccggtctagacagtcctgtacgattcacgcacacctggacttccctggaaattcccgacttgcatgcgtgtcagtgtgatcgctgagtacggcaaaaacggggagtgagatagaggcctcccgactgggccaaacgcgcaggtctggcgtcctggaagtgacgcggcacgcagatttacttgtgtcataggtgaacggatccgacctttgtaaaagagagtggctcatggaatctgtgaagaccactatgtgaaggtaacaagagacggtggtattgcggactgaaagatacgagacgagatacagacggagaaattcgctgccgtactgggaacaaacagcggcgttctcagctgcagaaaagtaaaagtgaagcctgcacagttcgagtcacgcgtcaaacacctggtcaggtgtacgtacaacgtcaaggtgaactacgatctaccagcgcgtcagaacggcgcgacagatctgccgacagaggccgcagacggcggctccaaagacgttgcaagtggaatctaacgggagagaaacatgcgggatatccgacatcgacacaggtgaacagaagcctgcatcatcagtctcgctgaaagaatcagctttagagcagccgagagcgtttgccgtcctcgtacgtcaagcagaaaagacgcgtcggtcagcaagagagccgactctacagcaaagctacgtcgttttcagttccttctttagaggagcggcgagaggaggccgatgatgtgaaattccttgcttttctctgctcctctgcgagagcacctgaaggatttcgagggactcatccgtccagccttctcttgcacatgcaaaaacgtctgcgcgaaaaacctttccaggcaacccgccggcactctgctgtcgagcggggcttcttttctctccccgtcgatattcacgtcacgcctctgagcactaggaaacccgctacttctgtgtcgtctctttgtctgtactgcatctgtttcttaagttaccatctccgctttccagacacacagaggaaggctttcgcttcaactgccgcaggcggggagcagcgaactcgtttcgtgggcgggtcctgctctgtttttcctcgacatccagacgttgtgggacgggcatagggacgttgccttggccgatgatacccggcggttcagcgaaccttttctgctccgaaaattgtcaatggggggtaaaggtacattgccgaactccacgaagggaaagaagggatctttacagcaagttgctcccctgttcacccgcgaccctctttgctggccccacacgcgtgtaagccgaattggtcaacggaggatttcttgaggcatctggggttatgtccgtagaatcgctttcattcattctcacattttctctttcttccgtctgaaagggacatccggcgcatcagcaaatgctcttgtccgacttccgttgttcccgcccgcgcgtttgccactttgaccgctgcctgcgcgaagttagttcgtctcacggctcttttccgtcacgttctgggcacaacgccgtcgatttccgaatttccgatacactgtctcgaacgctttgctatgcctgtgcctcgcgccatgaatgtgctcgtacttctttgttgaagcgtgggccttcacgtcaccacttggttcttccgattctgtcgatgagtgtagagacgtcgatatccgtctagtcctctcgcctgccctcgctctccctccatttgtttcatttttcccttgtccatgcactgttgaaaa

SEQ ID NO: 3128 - DNA, 2373 bp, Toxoplasma gondii
  source 1..2373: mol_type = genomic DNA
gtgagcgacgcagcttaagcaaaaacagtgtcggtaaccttaaagataaacgacaaaaatggtaagcaacaccgacaaaaacactgactgcacgtcacacgcctgcattcacgtgcaccgtagcaggggaaagagaacaaccgcgggttctgtaaaaacacggaaaatttggaaaaaggtagctggctagggtgtagtatgtagaaaactgtggatggcattaactactttttcacagcttcgaattaggcccaatatcaattaaccgctgtctgttccacgcccccatgacactcgcaaagcatcactttttgactctctcacaccatgccctgcgccagtttcgggtgttcaggcgattgtcgagaggaagctttcaaactgccgttatcgcgagcccttcccatgtcactgcttcatgtacttggcttttgccagggtctatccgattatatgtttctaataatttgcaagagacgtgcccccaaaagtccttactttagcagcgtgaacgatttcatgagacccacatcgtcaggcacttcacttttagtttgtgaaatgatctactctatcatgacagccactgaacacaaggaacgaacactgacgcagttggtacattggagctatctggggaccccgcattaaagatcctgatgtgactaccccatgcacgctagtttgggttccgcatcgtctgcgcttcattctctgtgaggcgcatgtatggccatctcgaggtgactcctaaggcctcggtcacgagatagggacgggtttcacaacgagcttgaggggtacaacgcacgtgagcagcatacagtgaacacggctgattcccctagtctcgagacgcaatcctgcaaagacgggagatataacattttcttctctacgacgtgtttcacggcctgtagctatacacactgctctagtggctttcctccagtcccatgaagcaactagaggtatccaaagaccgtcaaaaattccgtaggacctgatatgttggcgggaaaaaacacgtcacactgttacaatatgtctgacgatccggcagcacatgcctcttttttagggacaaaaatattctgactcctcaatgcttccaggggcaacgacggaaacaagacaccaacggagtttttgtaaggtgatgctgtaacacaaacgggtaaagccttgacccgttgacgcacctgcaacagcggtctctcgaccatccatgcacatttaaagcttcattagtgttttattacaaaggggtggcaggcccaagcagtacagcaggcaaatcctggcacatatgtggaattgtgatgcttttcgagattcttcggggacattaacgacatgacaaccccaaaaatattgagatgtccgcggcgaatagaaatctttcaggctcgtgaggtggtgcattccgggaagatgtgcagtttgtatcaagctggcgcatagaaaagcagaaagcctttcgtttttcacatgccgagattatcatgaagtgccggcggtacatgcgtggcagtgacctatataggtctgttcttcttccgttgagctgagaccagcccttgaccttggagggagatagtgacagtatgactcattatgactggcttttattgcttttagttaattcacgtctcaggcagacaattgtcttcaatagtacaaaaatctcgacaaaacaaccactaattggcgtctggcttccgacgccccgtttggactcgcatcctgttacaggttctctagcacacgcgaagtagcaaggacgctagctgcatgcgtctatacgcggcgcgcgtgttgagactgccctcattgctggccgacaacagtaattcctaatcgcaagagcgtgccacgaaaagtggttgtatccttcttctgtttcgatcactgacgcgtcagaattaatgtggctctgaattttggttgagacctgaccgtttgccactgttccccgagcgtgcggagggtgagcacggtaatcatgctccactcgatttcggccgacgaccgattttaccggattaagccgcgaggctctggagaaatagagattgttcattctttcagtgagcatgcttatgtgcggttggtggccatctctcaagccgaaggaaaacgaaccgggaacaaagcgactagagaagcgacatccaggggttgcgtctgtcacattggctgcaatcgtcaacgcactggcctggcatttcttcgtttatgttggagcttccgttaacccaccatacttctcctaagatacgatgtgtacctgagtttcctctgctacgaggagaaccatcttcaccaaatgcctgaggtgtagcgtgggtggtaccctaactgccgtaccga

SEQ ID NO: 3129 - DNA, 4617 bp, Toxoplasma gondii
  source 1..4617: mol_type = genomic DNA
ctttttctgaagacggaggcgattcctcctgggaacgagaagaagagcttccgtcgagagaatcgaaagacggaggcgcaagatgagagcctggcgaagaagatcgcgcagacgagctttctgttctctggagtccgtctgcagggagagacgacacagaccccacacgagaagaagacgcgggaggcccgactagagagttcgaggaaaggagagaagaagaagaggaggaagaagacgaagaggaagaagacgaagaggaagaagacgaagaggaagaagaagagagagaagaagaagcagggaaagacgcggtttgtacgggagacgactgagaggccgagggagaaggcgaagaggcatctccaccggcagtgccttctccttcacggaggccctgagacaaagagtcggttggtcgtctctcgttgtctcccgagagagaccgacgcaatctctcttctgtggccatgctgtctcgactttattcaaggtctcctcagtagccagtctctacctgcaggagtttctccgatcctcgaccgcctgttctctctcttgcacgatggctaggcgagtttctgccattttctgcactgcccgctaaaatttcttttcctgcgatgcctcctccctgttgtgtggtgttcgtctgaagtcgcagagcagttgaacttgccgagaggaaacccaagacaccgcaaagcgccagtggctgcaaggaatgaggggaaccgctggagcagcacagaggcaaatgcctgtgtgactgcgaaaaatgaacgcgacagacggcgacagagagttgaacagacacgaatcaactaatcagttctttgtagcgcagatgacgctcgatctttacaatgtcatagctcctacagagcgtcggtgggcgtatgtcatagacagagccacagattgtatcctgagaacgccagtgtcagaactcctacggaatgacggtggatgtacctcgtaactggagtcctgttcagaatccaggtcctctaatgtctccggttattctcgatttcaattgcttggtcctgggtcgcggacgatgtcgagcgcgtgtgtgtcgattactcagaagacgcagggcatctgtcaaacacaaaaaggaacgattcacgtagatggtttattctcctccaggacagacgcatgcagttccggcgcctctggaaaaaaagaggcgcgcgcgttgtcgggcactaaagtccaccattctttcctccccatggaaaaaaacttccaactacgaaggggtgcaacgcaatttgcaaccttcacagaaatgaaacgaaatcgagaaagaaaacgcaggatgtgtggccgcggtggcttctcgcaaacaaaggtcaccatcaccagcgctcgctcgggtgtgctctgccggtctcaggcgagagacgaacatgaggacttcaaggaatcgacgaacgcaaagatgcacactgcagcagaaaggctgacaccaaaagtttcaagatttgagaagcgctccctcttctgctgcgttgcatgttttgtgagaatcggtttctgtgtatcctgttggttgagcaagctgcctaccggtttgtacgcaccagggaaaaacagctgtggagaagggtaccccgacagaagtcaacagtcaggcacaacgaggagagagaaaggaagaatccaagaagtttgaacggcgagaggcgccgagataaagtgacctctggagtctcaagcgatttccgactcgatggcttctcggcatgcgtagcgagacgcgccagaacgaggccccatcaaggtctgcgaagggcttagtccacttggaagcagaaataacaaatgggcagaagaaacgggagtccaaatgcgtttcaagggggcttactccctccagaacgcagagcgaaatgttttaaacctggtgatgggaagaaaaattccaaaaagatggaagtctagagatgacaattagagcgtagactgggtttggggggaggaacaacctaggcagcttccgggagaaaagcgtttggcatatcgacgtaaaacaaatggaactgtggatgttctcagaagcgaagaagcgaaggaaatgctcgaatgctggtagaatggcataggtacatggattactccgatgggttgcagctgataatccagtgacgcctgtccttttttgtgtcataggcactcagtgaagtgaactggagcttctgtgctgtgtgttttagagtgtgaaaacgccgcgcgaaaaaagtaggtgtgggcccacttcctggcggagcctgctgtcagcttcagcgggtgatttttttttctgtggatgtgcaaacctcacgctccagaaacctcgagaggctgcgtctgggcactgcaaacgatgcgggaaacggacgtcattttggccattccgcttacaaatccagcttgcggtcgtacacaagtcagagaacatggaaactttcgaaggaaaggctaacctgtttgtagatgtcatctgggctcctcaccaaaacgtggaattgcgtctgtcgcgggtttgccgtgtttttccgttacccgacgcggagagtctgttgagcaaagctggtttgattcctcgcaagcttctttttgctgcctctgggaagattgctgatgtagcgcaagcaccttgtggcatttgctttccccaagatgcagagacaagtcgacttccactttgttcgtctgatcttccgacgtggaggtgccgatgcaaggcacagaaagcagctttctgttctgcggagaccgtggaaagtcccgcaggacgcgtgcgtccgttttccgcagaatattcccatatgaggaagaaggcaagcgagcgaacaaacgttctgcactggacacttgagtcgcatccagggaaaatgtctaatcaagccaggcttaggactaccggttctctgcgaaagagtctgtggcgcgaaagtgatggaactccctcgtttgtggctgtactgcgataactctcgaagaatcgagctcctctgtcgaacgacaacaacaggctacgacgatgtatagaatccgaaatactcatctttatccgagataatttccaaggcagtcatggctgtcaagcttcctgatgggataaggaagctgggactcgaagacgtttgagattacctcgcctgcgcgcatgttgtccaaagaatacgtcttagtgccttggccactgctctcaacaagagaagggtattttctttggctgagaggtttccttgatcggcgatttctcaccacaaaaaactattttcttgtccaaagtggagaacctatgaggtcaccgcctgaaaatggcgccttcctagacttcctcctgcctccactgtgtcgcagagaatctcatcaacttgcgtttcgtgggtttttctagcaagactcgagttctgcaacagcccttcttttctcagtgtccattctttctaccaaagagagaatctcaactatcggttctgtgccggcttcctctgttcccatgttcccgcttcacgtggacatctactgtgcagaggaacttcaccgatacacgaagaattgtatgtgatctcagagaagctttcgccccgaaagatgaactcttgaagcaatggattcgtatccgtttcagtttcttcacatacccgatgttcctcggcaagacctgactgacgcgtcaacacagataatacacgcacacacacctccccttttgcgtagagtgaaccactctgaagaaggtaccgcctcgcaggagaggagagcgcggagaagctcgactaaagatgaaagacgaatccacaaagatgcaccttcgagaaccgtgtgactctgcctcaaaggtttcacacgctttttaactgtgtgctgcccctgtctctctgcgcctgtctcgctctccttcgctctgtggggtggcatagccagcctcggcttatattcggggcgtcaggccgccttcttccttttttgtgggaagcagctcagttctcccgtttcgtgcctttcgaaggctgggagaagagcccgttgagtgtgtaggagaggagggaaactggagcaggaaacatgaaagtccaggacgaggcagcgcgagaatctcttccgcatctttctgtgaggaatcgcaggcgttgtctctagctccacgccacccccccccctctttgcggcttcttccctctcgtcgaaaaaacgcgtagatctcgtcgtcttccttgcccgtgctggtgtggagggactccgttctgattgcggcgattccggcctcctttttcctcgttccactgcttcttgctctctttttttgtactccgtcgtcggttcctttccagcgctgtggtgtctgggcactttgcactgtgggaggttcccttcccaccctgtctctgagcacagtttctctttcttcgctggcctgtttgtctctctttctccacgtcttgcgttcgaagaaactcttttgtttttcggagaattctctcagacactccagaacccccctcgccgtctcccatttctttcgccgaagcgcgtttcctccggtctctgtgcaccttttggacagggggaacgagaagaggctgcttctcgcgatttctgccgtttccaaga

SEQ ID NO: 3130 - DNA, 3941 bp, Toxoplasma gondii
  source 1..3941: mol_type = genomic DNA
tctggacggccgttcgaactgttccgtaactcctcgcatcctactagcaaaatgcccgctaaggaaggaacattcatgacgatacggaaacggatctccataagtcgggaatgcccagccataacctgcgtctcctgggtatttcagtaaggtgctccgatccctgttgaatagcgatggttgacttaggtggagctccatctcgcagcaacacttccctcccctgggcggagctctgctggccacctggtgagcctctgacttgatgcgaaatccgctgatacccaaattgttcgcctgtcgcgcgctttcggtttgaatattcctcacctgtgcaacagcggagggtttgaccctccgctgagaaaacggtccgctccatccgtgcattcgtatgcatttctcaatgtgcacatctggttctttgtatcccagagatacacttccattactggatgtgccctccgggttaatgggtgtcatgattgacactggcaccgaaagagatgttcattctacaaaaattaattatgggactggatatgcgcatgttgtaggagtcatcgtatgccgtgtttcgtggtgcgtctgcgtcagagctgcgagcaagcaaaagcgagtaaaccgccagcggtcatgttctctgtcgcctcagcttgatttttttttggtgtcgaaggcggcgggcgtcagaacagctactggggcaccttcatgaaaagagacgcttcagcctgcactgctatgcagatgcgtcaactgtctcatacatttttcgtcctctccaggctttagaatagttctgacacgaggtaaacagccaaggtcactgactctaaaggcaccacttctctgcgcaacgaagattgtgtcttcgaaagtagagtcgcaaacagaaggcaagcaaatgtacggaaaaacacagaagatagcagaaagcaagcagattctgtgtgccaggcgttcttggaagacaaggagaaagatatcaattaattggagcagagacctattgttgacacggtagtccacgtcctcagaatgcacagtttacgactccagcgggacaacacatttcttaactcacacaatcggaacagaaagtattattgatgtagcaggaatggagtatattattcacctgcgatcaagatctcctgctgttgcagtatttcagccgcgatgttcgtgcatgctcctcgcagtgggtgaccgcaaagctgcggatgggcagcgtagagcaacgcagaataaaatttggacagtttttttctccattgcgcattatttttgtggaaattcggcggttcgttcacgagcattttccctacttatttcacacgaatatgttcctgaatcatcctcatgaaggggccgtgtgtgcatgcgtgggtaagacacagccctacggcttcgaaaacttggtaagagtgctgattaatctgcaagcatcgccaaacagagatcgatcaaaaatgatacatttagatccttttttctttgggctgccttccattctcagtcgttatccccaggattgtttcgtgagtggtgctagtgcccaaaagcgtagaagtgttcctgcaactgcttagcgagtgccgggccaacaagaaaccgatccgtgtattctttaccgacaaaagttaggaatgagactacgaaagtgaatatcatggtgtctgtacaggagcgggtgctgaaagcagtcctgcaccacagacgcacatatctgtcggtacggtgcgatgcctgttttcgtgctcacacgacgtgcacaccattgttaagctcctgattagtttttcgtgtctgaaagtgcacccatcagtgtaccattgtctgtttgtaatagactgcagggaagttttgtgaagggtcgttttcgcggggtgaaggcacgaacgattgcaaaaagcagagatatcgccatggtttcagcgtgagaatgcatgtcgcgacgccttcacacggacagcttttggggtgtaagccatcttcggtctcacatatcaggaaagtgaatataaaggattgatatgcataggtagcatgggcattccttacttgtaacttcgaacacggcagacctctggaggtatgcagtgtcagcaggtttagaaggatctggcggacagctcgagtagacacgtccgataatcgagagccataatactagatctctcaaggaagtcttctgtgcattggtgcaacatcgaagtctaagactgacgcccactggctccatgtgactgcattcatgccccatacataccgctttgttcctccgtggggcgtttttatcaacaggcatcatataaagctagagaccctttcacactctcgccgttcaacccccaagcagacacttcatttgcagctgtttgcagctcagaatgcttttgaaatggggtagatcgaaggggttccatgcgggtccgatggcagcatttctgtttcccctcggggatggctgagcctagcgttcgacaacgttgggtgcgactgccgttggaatgattgaaatcaactgcggctgtcgcttcacggaaatggcaccggctgttagaacatgtgtttcactctcgaagcaagaatcaagaatggtgtggaaactctgcagtgcgttcttgaatgcgcggcaagccaagctgggagctttcaacaacactgtgactgtgcaggcggccttctttccaagagatttggggagttccataagaattgaaactctaaggaagatcctccaggtcgagagctgcgtcatagtgaaccttctgccgtggaaaaagatgcattagggaagcgagccttaacgaggaattgattggtttggtagtgggtcggcgattctaaggcacaattagcgaagccatagtaggcagtcagacggggtaacagtgtacatgcaacaccctggcaagccatggtaccccattagcattcagagacagccaatgcttaggctttcattctggtcaataccttactgctggagctgggctttattttgtgaacgttaagaaagcccgtgcacggtgggcgggcgacagtagtcaccactgccattgacaggttatcaggtttgccgctaaaaaaacataaactgtcagagcgaaatattcccccatggaacgcggggctgttcctttctaccactcattttcttgggaaatcttcggcacgaaacgcacgaatgtgtgtaagaggaagttccagagagtcagaatggctcggatcgatcccagagagttgccgtcaatccatggcggacgaaggcgaggtgagtttgcagtccgaactaccctaatgtgaagcagaatgagggtaattgtcgaactcattcgactcatgtttcctccttttccacaagaatttatggcaaacagttgcatgactcgcgttatcggatcgagtctttccagcgaaagctgtgtagtaggcatgcaaaatccgcattaccgcagttacttttcgcaagccggccgcaaggggggcagacatcccttttttttgcttttgtctctaaactgaagacgcaaaaatttccgggtatgacagcctggccggctgctgtatacctttttcaggtttcttctccgttcaatgtagaccttgtgtctaccacgcattctcgtctgttgtgctcgggctgtagctttttttagtatcgacccagttcttcgcaggtcaattttgccctcaggacaatccggcacctttatctgcaacatcctcaatcttttacctcgtgcgcatgacgtacacgagcgttctgacggagctctccgccgctttatttgagcagacgaactgaaattgactcagtaccgcagagcaggaaccagttcttgcaagattttgtaaggatgcgaacgaatgctgcgtgattcactccaattctgttgacaccggacgccgcatacatctttcctctgcca

SEQ ID NO: 3131 - DNA, 4012 bp, Toxoplasma gondii
  source 1..4012: mol_type = genomic DNA
ttgtatttgaaaaagacaaggaggacccgatacgcggcccagtgtcggagttcagagaaaagccttgatcttgtgaaggaccatctggggaagacgatagacaatctctgtttcctcgacctggaggagcctcagacgctctgcgagagtagaagaagccgcttccagagtccagcgcgagagccaccgcttcctcaaggtcttcgtttgcctcttggctctctgcatttctgccgctgggctctttttcgggagacagttcgaagctgctttcttcagtgtctacctcctccccttctcgggatctgctgtggcggttcgcaggcagattcgccgcggatctcgtttctcccaagcgttcgcgctgggaggccccgctgtctctggaatggagacatgacgtcgcgtccgacggatctgcgccgaaaagctgttgcggaagagaagacatggtcgggtgtcgagttctgcgcagttcggaaaaaggaagccgcagaggcgcgctccgaggtgcatgcgagctacatcgcggccttcgcgaccaccggcgagacgccaattggaagagggaagagacgagacagaagaagagagaaaacgggggaagacgagaacagccgagggagagaaaaaggaaaatgagagaaggaaaatgagaggaggacggggcttcgaggagaaaaggaagaacgcgaagaacgcgatggtggaccgaatgaaggaagagatcttcttttttttcgcgtgaagaccggagaaagtggagacgcggcaactttgaggcaccggcctgtgtggcgccgaaacttacgaaaaatggactttctgttttcgcagaaggaagggtaaacagaagggatatcgagaatgcagccagagaaaaggagaaacgcgaaaaagtagagagcgtctccttttttgagacagtcaagcgcgtcggcaaccacgcaccagctgtttgacaccgacgattggaagtggaaatcgcggcgttttccagatcgcgttggagcgcaggaaaaagagacccttgagagcagaacgattctgctccctaaatctcccgaacgagtctgtcgctctgcgtcgccagactctccctcgcggtcgccgcctttcctgcagctcgaaagagaaaagagagagacagcacagaggtttgcgcttctgggagaaagaaaaacgcgacagaagaaggagacgaagaaaggggtgcgccggcagatacccatcggagggaaaccgccgtcctctgtcacggcaggactccgaattctgcaggaaaaaaatgttttcgcatggaagaaagacggctttcaaaaggagagctcgtccagaagcagccgccttcggccgccgcacttgcctttgttcgcgaggcggtccagagtctcagcgttctgcctgcactttgatcgcggagggtcgacagagaaattgcttgcttccccgcagaaaaaaccagacaaggaaaactggaaaaagtgactcggcaaagaccgagagggccagagagccgccgtgcaagcgaaaggcgaaaaaacagcgttcctgcgccttctcacctcgcgactctcgcagcgggcgccgcacgggagactctggtagcctttgcgttttttcttaggaacagccgaattttcgaaagaagacgactgaggaaaatcgagagaactctgggaacctcgccttgcgtgaaagtagaaacttgcactctctcttgtcccggtgcaaccgaacccccccaaaaaaaaccaagacaagacgcgaatgaagaatgccgtcggagggctcgctacaaagaaagaaacgttctttcttcttttcgcttcaacgcaaacaaacacttgcaggagggagggagaccacgaccaatcttcgtgagacccaccccaagacagaaaaagtcgattggtgccatttccttcgtccagcccggcgcagacggctgagcagacgacggggaaaagcgaagaaccgcttctcgtttgctgtcgattttctcaacgtttgtctttcactcggatcgctcgccttcacgtgagttgccctcgagtcgtacgaatcggatgcaacgctgcctcgacgccgggtccccaggaacttcagcaaccagacgcgagagaggacttcgctgcacactgttgtattcttgtcaaaagttcccaccgtttgcgacagtctccttctttcggtgcggagagcgtgatctgctctctttccaagttagattcagtgttgttccacgacgcaaaaaggtcgaggaaaagaaacgtcgtaggtgacaacactctacgcggaacaccctgaaagcacacggacctctccgacagtttctcaggggtggaagcggtcaactgatagtgaagcgagtgtaaatgctcgggcgttattccggatctacacagcctaaattgctttggagaactcactcgaaaagcggtgtgaaagccgagagcgaagccgtgtgctcaccgtgaagctaccagctgcgcttcttcttctgacgaaagactctgcggcagtggcaactcccccgcaggagaaaagactcgccttttttcctttcgtgcatttctcgaaaggaataccccgagaaaccttgcctttccttcctgaacagggagccaccggcacacctggctcgcctctcatgcctgtggtcctcggtgcgacccccctgcagtacaacgcctgtttccgtctcgtgcaacgtccttttgcaggcgaaaatcgttttctaacattctcctcggctgcccacctcttccttgcagtgtgcgtgtattgcgaatcaaaaaagacaaagttttcttcacttgcctttctgcctggcgctgctgccgctcccagagtagacaagcgggggaaagagtaaagagtcgagacagcgacttcatgagagacacgcaccttgttcgctgcatttctttgtcttctctggtgttattgcggcgcttctcagtttctttttcttggactgcggaaaatttcgttccgctcccccccgctgctgtgcatgtgtgggaggcgagagcagcagccgacgcgcgaggctgaggggggagacctcgagttcctttcgagtttttctccggagaaatctctcttttttcggtgggaactggcgtcgaaagcgtttctttgttgcgtccttctctagtcgttgtgctcggcctcgagaattggtgccagactcggcgcgggggcctctgggagcgtgacgaaggaagagtatatttcttccttgatctttcgctctgaaaagtcgccacgctcctattcttttctcccatcaaatccgcggcgatctgtccgagccactcggtaggaaaacggatttccagaggaaaccccgctgttaaagaactcccgtccgcgccgcgcgcccagtgcgatttttctccggagctcttcgcctgcaagagtctccgcgtatctctctcgccttgcaccctctgttttgtttttcttcatcgcggtttcgatgtttttcttcagttgaagtgaactcttcgtctccgttcctttctccttgcagcaagccgtttttcgcctcccgctgaacgccccgtcgtccccccaagaatctgcactttctggccgatgcttctcctcttgtcttccctcgcgcgcccactctcttctcttcgtctgtctgttgtttcttcctcatctgtctgtctttgtcctccgtcgtcaaaaaaatcgcgaagcctgtacatgcacacgaagaaggtcttgcgtttttcgcgtctccgctccctctctcgagtccagtcccgcgtcgtgcctccacgttttctctgtctctctcgctcctttttttgccgctgttcttctctccgccttctcttccctccgtgagtttgttgccttcgtctcgcttcgcgcttccctcgaccccgccgcgtccttctccctcgacctgcttcgtctttcgtctctgctgaagagcttccccttgcttgtccgctctcttttgaccaagtgtccgcggccgctctgaaaa

SEQ ID NO: 3132 - DNA, 1347 bp, Toxoplasma gondii
  source 1..1347: mol_type = genomic DNA
actccggcagctatagaaaagtgaatagatctaaacagatagtagatggataaagtggagatgaaggatgtatgaagaaaattatatatatatatatatatatatatacctttgaatttatggagaggctaatcacagcaccacgttcaacgttgctggcttttcttcaaagtaaatctgtgtagaggatatctgaatcggattgttacctcagtccactttgtcttcgtcatctgtctaggagttttcggatgggagaagaaacttcgaggtatgagtgagagatactctgtacacgatgtggattttctgagtttgaacatcacgaaacagaaaaggaaagaagcaacagggcgtagcgatggtcgtctttcgacattatatgagcacatttgcatatacaggtatgcaagtatgtacaaatgcgtgtccagggttgtgttttgtcgtgtatgcaggaggacgtttctctctgttgatttcgcggacagtctcctgtgttttgttctgaaggacgggggaacctcgtcttgacattcctggcttgtttcagctgaacgcctgcttttttgtctcggggaagtagagagagatatgcggataagaaaggatgtttgtcccgcagtgcgttcatttctcattggcaactttcgtttaccgattccaggaagttcccaaccacgtgcaagttcgagtttcttgtagtttcaccgccctcgcgcctcgcatccgccagcgcctgcttctgccgctcgcccacgtttccagttggtcgtttttcgtttctccctttgttgggatgccagcagaatccaccttctctgctcgttcgctcggaaacgtttgtttcggtatcacggaagtgaaaaaccatctcgtgattgcgcacgttacatctttgttgtgcggtgcgtggtttggggtaaatggtactccagcggcaagtcaagagacgaaaaaaatgtgactgcatttgtctttccggcgcttgtttttgcttttttggcttcgcaacaggctctcgcacaccactcgcgaccgtccagtttatgatttcgcttttccttttcgtctagagtcgctgcagttaggtttcggtggatgcatttgcctcttgtcatcatcttagagacacgcgatctgcgttccctccttggaaacgaggacacacgaacgaagctagtcaagtctatcgcacaaaacgctctttctgtgctttcttcgattctgttttggggtttgcatcccttaaaactcggaacttggagagccggagtcccgacgtcccccaatttttttttctcgaacgccgcgtttcccccctcaagaaatacatactccgttgga

SEQ ID NO: 3133 - DNA, 659 bp, Toxoplasma gondii
  source 1..659: mol_type = genomic DNA
aaaagaagagaacgatctctgctggaagaaggagagaaaagaaacctctctgtgtctccctgcaaatcttgttgccacactgatcccctcgacgaagaaaggagacaaggaaaacgagagaaaaggggagagacctcaggtcaaaaaggaagcgaaccgacagagaaaagaagcgaacaactcgacagcatagccagatcagcaagtagcagagcagaggacgagagagactgaagagaataggagggaagaatgaagaagaaaaggtggaaacgccgaggagggtagagacctctacggtgtcgtgaggcaactgatacgtcgagaagaacattaatttttcgacaggatttcttcagatctccgcagatcgttttccctgtctttctcgctcaacgacaactggaagaaccgtcaagaaacgtccaaagcacacgacaacagccttcctcgtttttgtcctcttcggtaatctgaggcatcaagacgtacacccggtggtgaccctcttcttcttctttccgtgtcttcgccttcattccttgtgccccctgttgccttttctcttcttctcttttccctcctgtctgtctggccgctggagagcgcgttcgcggttctcgagaacgcgttttttctcctcttcgcggcctttcgga

SEQ ID NO: 3134 - DNA, 4451 bp, Toxoplasma gondii
  source 1..4451: mol_type = genomic DNA
tcttcgttcgctgcaagtttggctggcacgacaaacgcgccgtggctgagacttccagagggcttgctcgtcccggaagtcgccgcgttgtcgcgcttggccgccgaggcgccccatgctctcttctgagaagcgcctgcggctcgcccacgcccggagcctccgcccgcagagctcgcgggcgcggtctggagagcgttggcgacctctgatagggcagtcggtgaagccaggtttccgtggtcatcacgcgcctgaggagcatcgccggaagttggcgactcacgcgcgtcgtcagtgacttctctggagtgtctccccactccacctgccggcgagaggagaccgttactcccgtccgcgccgggagatgacgagagcgaagaggcgcagctggcggggggaagaagatcgaggaaactctgggaggggtctgaggcgtgtgatgcagcgctcgtagttgagacccgctctgcggactggcttctgcgtctgcgggaagaaggcaaggcactgagttcttttgccgtctttccagaaagctcgcctgggtcatccccaggtgccgtggtggtgactgcggcggcccaatggtcgtccggaagcaggggttctccaaacggctctgccacccgcatgtcttctttgcaaggtttctcgtcgtgagagctggagactgaaggaaaagcatcgttgaactcggcaacagcagaagggccagcccccccgcagtcggccctacgttcgtcccgaggagcggctgctgcccgcgccatcgtttcactgggtgagacgactctgggcagaaaaatggacacagaacctcgcggggagggacgcccttcgtcgtgagaaaacgtttaggaaaagcaagcgttgtgctggacactcgtctcgacgcgaaccttcggtgcggctgtgctccccccgtacggcatttccactccggagagacgaacttgaggaacactagagcgcgcgcctgcaacccgccccacgcacgcgcgcctgcccacggacaggtttcgaatctcagagaattcaggtgtttccgacgacgacagtgacgttttttctcgactgcctcgcgtttcagttgcgactgagatccgaaccgggggctctacgcatcggctacgcaggcaccacttttttcctcaagcctgtccaccgtctcttcttcgttcaggggagtgtcgctttctaggcgacatgtcgcgcacgacccgggctggctgggctggctgggctggctgaaacgcaatatctaaacagtggacgctggacttggaacaaaagtgccctgcgcgagaatcggaaagcataacgcagacgaattccgagaagcgaaaaatgtctcccggagaaaggcacggatttgcggcggatggaaaactggtggataccggtggtggagagagtccccggcgtgcgacgctcggcagataagagagccggtctgccgtgctcgtccttctactactctcccacccaccgagttacgcgcactgaacctgacggttggaccacgaaaccgcttgctaccttctgccagtccggcgggatgacatgcgacgagaaaacccgtctcggctatcgtcaactttggtcggccaatagtgtttgcccgatcgtcgagcgtcgctgcaggcggcccgccaaaacctaacgcagcaagctgcctccgttttttcgcgcacgaaatgagagttttcaccaggctgtctttcgtcaccaaactctcgacaccttctgcggatcggccgctcctgggggtagcggcttcgaggcgcgctttgctgtcttcacttcgtgacaaacgcacaaaatgctgtctgccctcgtctttcgggcaaatgcacgcgagaggaagcggccgtgcggcggcgctgccagttgcctccaggtctggctacgtctcaccatagaagatgcatctccggagaaattttttccccatcacacacgtcatttttgcgcacgcatgtctccagacaagcgaatctcagactttcttagtttctcgtgtctgaactcttaccctcctcacgacccagccgcgcgagaaacatcgtgcgcggtgtgatgctgagaagccacaacgaagtacaaaacatgaagacccggtcccaggggcgcctcgagtttctcacaacgtgatgttatacaagtctcgaacgccgcagacggaagagtgagaaggcgcatcaaaaaacattcaaccgaacgttcgttttatccacagtgcagatgcaagtggacgacgtctgtgcggcacgaaacaggtgatcaatgtttctggtgtccccggctgactgcacgagaaacaccgcgaggagtgttgtgctacagcttgcttcaccgccacatacgggaataccagccatctggggtctgcctggggcagactcacacacacacaaagttcgttggaacggggcgttctaaagtgcccgcacacacatcccgagttccttatctttttgtcgaagccaccagtggggagagttcttggaaaaggttgtgcgcaacggacagattcagtgatcttagggggaagtcgccttttcggaacgcattgattgattgttttgccgtgtttttttttgagcaatcgtagatacggttgttagtcatacgttgcgagcgaaagtcgaaacaacactcaaaaagaacatctcaaacatttcgcacggtgtcgttttaagtccagtgagagttcctagtactctactcagatgcccgacaaagggggaatgtgtcgaaagcgcagggtggtgctaaaaatcgcgtcacacgctcacacgaacatttgtgtaattagagaatgtaggaatatcgaaagaaatcaaacgaattgtggtaacgcgtgtgcaaagtccacaaatggatcatgctccgttagtggtactgttcgacgaaccccgaaacgccatgagctgttgtcatcttcgctgagaactataccgctcggaaagacgtaatggtctcgtgaggcgaaatgcgacatccacttttgttgtctgttacgtgaggctgtttcccgatggctcacagaaaaagtgatacaggtagtcaacaccaccgcgcagcagaaatcaacgaaaaaaattcgctcatttagaatgtcttttctgcggtatcctgcccagagtagggaaatgagattcatggtgtcgtcgtgtaggatgatcagactgtgttccgctgacgatgaatatgaagagcacgtgagacaccgccggaatgtccagtcgtccacagggcggtgaagatgaatttcgtttatcctgcgatatttcatcacgtcgctgtgtgtcgcttttctgatatgcccaagtggtggcacggtgctttcacctaggtaacaggttcctgtgacaggtagctcatctaaacacatcattccgataggtgaaaatgaaacatcctgctggttgcttgagcttttggcgaaacacgattccagggtgtctcgccaacatgtttcacatttctgcccgcttgtctacttttgcttcttacacatctgtcactttaaacgaatagaagactgggggacgcctgtacagttaaataaaaaaaaacggtgtcgtacttacttcagcatcataggcgtcgcgttcaaaagaaaacaacacctgttttgtgtggccaaccacatgggaactttttaggctttaaccgagtgaactacatcagattcggccatggctcgtaataaacgtggatgtgtagaggactggggacgcatgagatacgacgactcatccctcccctacaaacgcgaaatgccgtgacttcgcgccgcaaaggtaagtgcagtatggtaggggtaactgcattatcgtcatttagacgacggagtatcttgggaagatttacgtggcaatcacaactctcaccgttccgacaagcagccgaaattcttccggtaactggatctatgcagtggagccaccgtgagcgtggtcgcctgcttacgtggacgtgtagcatccgaaaattcctgcactctgtgagtgtcgttcggctttggaacagtatacagcttctccaaactttacatttgcaaaaagaatttcggggctacacgtgtcctaacctaaaattccgtttcgatctcggaaggtacttaacgtatctctggacaccggctgcaatgccatcggcgacgggaaatccggcttacggaatacggcaccactaatactttctatgacctgaaggattatcagtggttctggagaaacgtttctccgaagaaaacaggtttcgacgcaggtcacaatcggtgctctgtctcctgtgctgttgacgtgtgccccttctcgaacctggagcaacaactgctaggcaaacaagacgccaaaagtggaaaaatgatacacagcggtcaacacaggaaagtgaagagcgaccgcccgctcgaaagcgctaggccagaataa

SEQ ID NO: 3135 - DNA, 699 bp, Toxoplasma gondii
  source 1..699: mol_type = genomic DNA
tatatatatgaaggcgtcagggtcaagtcgcatgcatgcgtgctgcggctatttcgtttttgcaccatttggcgagacaatgactcagcttaccacactgagcgtggcttgagaatcggttttattgccatcgactgcaagcgctgttgtgctccgtcgaatggtgtttcgtgtgcgccgtgtttcgcggggtcctttagttttcgctcccgatgaagaacccagaaattctgctgacagacgcagatcgtcttccgcttctttcgtggtctctctgaactcagtgattgtcgagaccgaagacactggagaaacgggggttcgccgtcgcctcgacggaatggtgcgtcgcttcagaaattgcatctcattccgtctggaaggaagggagcgacaggaccgccgaagtgaagcaagcggtgaaatcggcgcgggaacagcagggacgacgagtatgggccggctaacgctagagaaagtgccgagacaaaaacggaacaacgactacggaatggacgtagaaggcggttcggcaaaaactcagacaagtccaggttttacggctggcaatcatgaacacgcggacggactgtctcgaggtagttatcgagtcagttccagaattcggaccgggtgcggatagggttttggttgtacgtacacccggagagaaacgggaaactccggacggttcgcaaa

SEQ ID NO: 3136 - DNA, 1825 bp, Toxoplasma gondii
  source 1..1825: mol_type = genomic DNA
ttccactcctgtactcctgtccttccttgtctttttccgttgtcggcttgctccgtcagtgtgccttcctcgtcctgagtgtcggcttcttcctctcgctccggtcgatcctctgtcgttgtcgtcgacgccttcgctcgttggagacttccttcttcgtctgtcggagccagttcctccgctgtcgatgtcctgtcctctccttccgatgccgcaccctgaactgcttcggaaggaggagctgcagagaggctagattttgcaggcagcgacgaggaggatgaggaccggtctccgaggagaggtaactcggtgagaaaggatcgcaaagaagaggagaacgacgaagacggactagaggcagaaaagagtggagaaaaggtggacttcgctgcgaatcttctcaggctgcgtcgctcgtcgccccctcgttcgcctcgaatagcgatgcttctccgtccaggcacacgaagaggaagactggggagaaaggaaggcgcgacattcgatcgcggcgaagacctcgactcgcgagtgcagacgtcgggggcgggagctggcggcgacaacgacaaagaggggaaggcgttcgttcctgtctttcgaacgaggagggcagcggcgacggaagaggcgggacgcgtcaacagcaagaggagcggaagcagacgaaacgcagaaggtccgcgcatgaagaagacgagaaaaggtcaaagagcgaaggaaagaggcagcgtccggcgaggaaaacgttcaaacttgaatttcccctcggacttgagtgcgacgaccagccacccgggtccaccgccgaatgcatgcggtttcgccgaactcccttgagaaaaaaacacggcgcattctaggacgacagactcggcgacggttccctatgaagacgggaaggcagaacgaagagggtgaaagaaaaccaacggttttttcggacaggaaacatcgaggtgtcttctgttttcacaccgtaggcgcggttgagaacgtctgtgtcgggcaacaacgcggagagagaaaagtcagggagaacggcggaaaagagcgagaaatcagaaaaaatggcagacgcgagagagaaaggaaatcacggcgatcgttgaagaagaagaaaaggaagaagagaactggcgaaaagcttcgattttctccatcgagccccgagtgttttcctttttgtgcatgcgttcgcttcgcaaaaaagcgacatgcccacccccctctcgacgctggccggcgcgtgctcggcgacagcgttgcttctttgtcttgtcatttttcttctgtttttgggatcgaagctttcctctttttctgagcaacagacgagaactcgagcgcctcggctgggtccatccggactctcactctccgcagaagacctcgttcgccgggcgcgtcttcctttttgtggctttcggttgcagagagacgctgccgaagcggtcaacagggacctctggagaaagccgatggtaaaaacctccttctcctcgccttgcttcactccctagcacccaaagtcgcgtgagacgctcgcggccatccgttcccttcaaacggttcttctccagcggcttgtttttgtgtcattttcttctgtcttgcctccatcgtcttcgccttcgtcctccgttcctttccctttcatcttcttctttggagttttccaagcgtccttcgtcattccttcttcctcgtcttacctccggccttccgacccccctctgtctgctccaggtccgttctctctcttcctcgctattcctcgccttttctctcttttctcggctccgcggagagcctgaagcaa

SEQ ID NO: 3137 - DNA, 4841 bp, Toxoplasma gondii
  source 1..4841: mol_type = genomic DNA
gatgaagacacagtctaccacttaaacccgagtgggaagttcgtgataggaggtccccacggcgacgctggtctcaccggcagaaagatcatcatcgacacgtacggaggtgagaatttagcgattcgctggaaacctcggggctttcggcgtgcagaacccgagagagaagagcgcagcgaaccggggtgactgtcacttggtacgccttttaccatgagagtacaggtgaaaggacaggtgtaccggaagtgaggacgctgcggctccaaggattggtctgagttcctgtttcgtaaacgttcttctcatgttgtgtcacgggagggagaacgagggaaaccgtcacacgcctttctgtgctgtcattcttttgtgtgttttctctaggctggggagctcacggaggaggcgcattcagcgggaaggacagcacgaaggtggatcggtctgcggcgtacgcggcgcggcgcgcggccaagtcgctggtggcgaacggcttttgcaagcggtgtttggtgcaagtgtcgtattccattggcgtttctcaccctctctcgctgtttgtgaactcgtacaacactgcggcggagaactacacggacgaaatgctgctcaagatcgtcatggagaacttcgacttcaggccgggtgtcattttgcgggagctccgcctcaaagaaccgggcttcaagcgcttcgctgcgtacggccacttcggccgcaccgaggaagagtgtgcgtgggagaaagttgtggacctctcgcactgcaaagtgccgagcaagtctgcgtaatcgcagaggaaagccggagcgggaagggtagcacgcggttcctgttccgccctcgatgtgaagccgagacaaatagagccccaaacggaacgagaagcgtgcgtcgcccgtgcctgtgcgtcggccttcgatcctgcatgtgcttgcaatgtgcgtggtgtcaatgtgggggcggtccacagtttgcagtgcttttcgacgcagaaaccgatgttcgaatccagtgttctctgtgccactcgagcaacaatgggtcttggagaccgacacaagcaaacaattttttccacaggatttatcaaaaagttgcctgttcgcaaaaacgcttcgagctcgaaatccaaccgcaagcgagtgccctaggcgacagaggccaagccggcatgatgtgttggtacacttacgtcacctgttgtccctggtgtttgttacggtgctttccgtttgctgaatcgattatcggagcagtcaccgggtttcatcccacacagatatgcacttcgtttgctccgcctgctcgctagagagcgatccggctcaataacccgaatgcaaagacaacgcacggtgaaagaaatacttcaatcgaagcgttatgccaaactgttttgttgcgagttgagaactcacaattttgccttcgttttccggagccctttgcaagttaacttaatctacgagccgcacaggaactttgaagagcatcagtgggcaataaagaggaagattacggtttccttttttcgcgacaacggcagcgaactcttccgtattggaagctaagcagttcgccgtagccacagaaaatggggttctttacttataatagcaaaaagcgcactctggtttcttgaatactgttcagcagaagggatggcagtgaggttgccttctgcatcgacgctgagctccgatctatttgttcgtggtgcgatttcccgccataaaagcgcaaaatgacggttcttcttgaaattgtcagctgtcgtttcaatcatagtagatggtagcagaagtgccttaccctgacagtcgatccttggcaggacaggcatccagcggcctttccgctggggaaaggcccacgatgttcgctgcaaatgttagtaaaataatagtgcgaccttttcaagcagcatgaagactgtcgttttgattgtccgtacgtcgatttcgatcggcagttaaccggggctgtaccacagtagacggagttgtgcgttttatgctgacgttagaagcgataagctaggcttctgcttaaactgcggaatcaactaggcccagcatgatagaatgattcgcgacagttcaatgctccaagcaaatcgctgcaccgatgtctcaacaaaaagggttcagaatgcaaggagcgatatccagtctatctgctgcagttgaatgacatgcagtgaatcatacacataacatcagtttccaacagtccttcagttcttttgtgttatattttgcaacgagacggtctagcaaacacaggatgctgtcgactttttcccgcttctccggtcagggactttaagagaagcattcactcgcgacagccatccgtgtgactacagacacgactgtacgtgcatcaatcagagctcgcaacgccaaaaatctccaagcctgtatcatcacagcataaatcttccaacgacgcagctgtcacggcagacaccagaagcaagtcgcggcagtacggagaccaagtgacaaatctggtagaccaaagaacgacaggcacttcgagttttccaccccatctcaaaagagagggtcttgatttgcgtacccgcatctagttacccagcgcctctttgagtttctggcgtactacttcttgttgctctttgttggcatgcaggaagccctgcttctttgtcttctttgaatgcaccagcttcccattgattcttatctcgaaatttccggtcgtaccaggatcctcatggcctgtcaaccaagtccgcaaaaagacgttttgcttgtgcatgagccggagttgacttgcacaacgcgaaaatttggtaaacacgattatcgctctttctctcgtggtacctgaaggactgggaggggagttggtgctacgtcaacaagaataatattcctgtagttgcctgactgttcgtggccatcgcacacgattgtctcgacctcgtgacagagcacctccgttatatgcgtcatcaatacgctagtgcatgtctgactaatagggggttcttggtatgtgaaaggtcacgcataataacaccagctcaagatctcgtacgtcttttacgatagaaatacgctgcgtccccgtaacgtatcacgctctaacagcttacacacctagattctgacgattccccatgcagagttaacaactctgaatgcacgtaaaacgcacaaaatttgaaatgctaatgccttctcaccttcgatcgacacacggcgcagctccgcatcgctaagccatgaccgtataagagcttcagcccgatcgaagtagggccgatagcctcagccaccacaaaactggatggtaatttcgaccgtctgctccatcttggctactgcacaaggccatcaccgcagatcaacacaaaacatattaatttccaagaaaacaaggaaagaatcgagcgggaaaagtggaagcgttacattcaggacagattcaattctgcgcggaaagacgccccctctacagccgggcagcgatgccttaccttctatgggcgtattcatccgcagatatacacggggtgggttttcaaaaagttcttctcatagaaaaatgaaagtgttcgaccaatgaagcttgtgctgcgaaaccgcatgtgcggtgggagcactggctactgaaggttacttttggcccgctggtttagcgaagcccgcagcgcactcttcgccatcgctctgaccggtccagatgagggattaaagtgatgcagtgtctcgtgcagccgtacaccggcactgctgcacattccttaagtgacagcagataacgtgaactacaagaaaagggtggccttgtgtatgcatgaccagaattgttttcttgctgtaccgtgtggcacgtcgtccacgtgcgtcattttgtgggcgtcatgaacgcatctagtagacgtattgtcttgcgtgctcactcaaaagtgattctttttttcacggttacgtgtaaagaaatggtgggttcggtttgtcaacgtcctgaaactgaggaacgaaggctgttctgaccggactgattggcagcatgggtgacccacttcacgtgagcacacaggaatacgccaacggggaagcaacaccggcaggtgatttggtgtccgcaaattggcagttcgctctcgaattcgcagaagttccctatttcctaaaacaaccagaaaaataccgcatcatgttccacaagtccactctggtggtaaagtgtgctcccgacttctctatgtaatggcccacatacgttatggccggtggcaccgaccacgtaacggttgaagtcggtcagaacgtcacgtccgaaaggtctgaaaaccgtaaacccacagtttgccctcaccatgaaggcaaccagatacaaaaaaagtccagtgtgttcctatttttggtagctgagcctggcagcgttgatgccttcccgggtctagccacggtagatccggttcagcacgagaagtacaccggtgttactatcactggaatcaacaagttagtcaggaaggcgaagtacagtcatgcatttcatcactgctacttgcgattagtttcctcccgcaataatgaaaggctgatccaccgaagtgaaaaaatggcagacggttttgtccgtgtttgtcactgcaaccaacgttgtacgcggaagatgcacctgagatacgaattgctgccgagatgtgcgcgggtctctcgatgcctgagtgaggctgtcaggctctgcatttcctggaagtccacggttgaaccagcagatcgcggtacggtgctcagcggagagcgagctcaacggcacttcaggataagcctgatacttgtgta

SEQ ID NO: 3138 - DNA, 1269 bp, Toxoplasma gondii
  source 1..1269: mol_type = genomic DNA
ctgaacactgcctggtcgtttgtctgaagcgttccgagttttctcgaggtaaatcgaaatttctcggccgcgactccccgaaagtcctcacattcgctgtaccgcagaatcagctttcgggagcttagcgaaagctgaaatggggaaggggggcatggaaaaagcttcagttccagacaggagcagagcactcggaaggcatcgttctccctcaatcaccgcgaagggaggccgacagagaccattctgtggatggaagcctcaagctaattccgaaaaaaaagaagaggtgacaagcgatgtgtgcatgtagatagacgtcaatatgcacacatcagaaatatgtgaatatatatatatatatatccatacagatcatcgaatacgtatatatatatatatatttgtataataggtatttatatatgtataatagatatatatatatatatatgtatattgggtatttatatatgtataatatatatatatatatatatattgggtatttatatgtatatatgaatatacatgcgcgtggcagagtgtctcagcctgcagagggcctttgagtgtttgtgggtctccggctgaagtcgcctaaagaaagtttttccacgcagagacttgtggcgtccgtgggccgagagggtcgttgacgtcgtctgcctttttttttctgcgatggttcgcgcctcgaacctctcgtttcgcgagaagaagaacagaaggtgagaaagagcgaaaaaaagcggagtttccgagatgcgtcgccgcttcgaaaagtcgcggcgggtgtgcaaaacgccttccggggggccagttcgctttctgttgggtcgaacaagctagtcagtgaacttgcggcagaccttcctttgccttttctgcttctttgtcctccgctttcgcgctcttcttttccactttcatctggtcgggatccatttttttattttcggagacgcgctggcgaaggcgagacgcgcgcaaggggaggcgacacaagatattgcctctcggcccggcactgctgaacgcggccggcagagaattggacgcgactcaccgagcagaaaatgccccagacaagtcaggtttctgcggtctgtttttgacacacgaggagtttctacacctccacagttttctcgagaaacagcgccttttttgcagcgtctgtcgcgcttcatttcgcctcgtccgtctctccctgtctccagtccgccgttcacccgtccagtctttgtcctctccgttcctcgtgga

SEQ ID NO: 3139 - DNA, 2129 bp, Toxoplasma gondii
  source 1..2129: mol_type = genomic DNA
atcgctcgacacaacacagaaaagaagagacacactcacagatgtattacgaaaacttgggaaatgagatacgggtgtacagctccgtctcctattcacacctggttaacacactggaggagagcggtaggggggacggggaggaggggggtatcgctgcttagagatctctgaactacgtgcacacactgtgataaagctgagaggcggctttttcagcggctcgtccgtagcctttcgtcggatttctgtacacagttgaaagagagtccgtagcttgcagggaggaaaggtggcaagcgtgcatggagtacagacagctttcttgtgtgtctgtctgcgcacagccagaagggcgctttggttttcttcagacatttgggaatgccccgaacgcgggtttgagtaccttaaagcgtgcctcgtacgcgagggaaacgcttttttcttccactcgggggcagcgacgagtggagaaaggtggaattcaagataacgcgaatacgagcctttaaaagcactctttggacctccaaatatcgatcgttggtgacgcctgatccaacatctgagtggttttgtttgtgtgtacgtacactcagtgcagcggctgcgagtgctgccacagaactttttgcgctgcgtgctggaacttcggttgcgctggcttttgtttcgacggcggaaatatcaggtttcccttgggagcttccgtgttctcaactgaagttctgtcctgtccttgctcctcccccgttcttccaagtggtgcctctgtgagcatcctgtctatctcgtgattctggaagagtaaccctctctcgttgcgggtaacgtaactttgcacgaggatgccgcctttctcatgtttgttcctctatgtacggcattcccatctgctaacagcaaccctggtatccgtataatcatatgtacacttgcattaatgttcggcatccatataagcataaatacacttgtataatcagttggctccgaacttcaagcacggccaattgctgctggaacaagacttatgcgctgtgaaaaacagatctctcagaacatccttggacgctcgtctagaaacccagcaatcgagcaacatacacggtctttttagggttcgtccagtggcagcaaatgctttcccgatttgagttacacagtttcggacggtaaattattctatttttcacagaaacattgtggggtcgaaaacccgcaccgctgtaagcaggtgcttccattccagtgttcgcctgtcacccttctatacgattcctaagcgatcgaatcgtatacacgcagattcctctgtatttcgaggtactcgaagtgtaggagttgcttctcctgttgaacacacgaacacatgcgcaacaaaaatcgccacaaacaggagccttccacagtgagctctgtgctgcctacatggtgtgtgcgcgtggacctttgtgccacggtatttgctttcatgtgatttttttcgcatggcaatgtaaaccgactcgagagagcagacacaatcaggctgtcaccgtggctcagtttccacgatctttgagagagacagaagcacggaagccaggcactgtgcgcgcatgcatgaaacgtgtgtctgcctcgaaatctaaaggcacgtagaagtggaagtatcgtctcagtgcgtgaaaatggaccctattcaaaagaagatttcccgtacagctccctcggcgctccccgtttgatggtcacttttctctatgcatcgctgagagaggcgagcgtggcagcctgcatgcgcaacgacgggttgcttcacagtcccaggtggcgttggaatgccgacaatgtcctgcagattccacggaaacatcgaaaatctttgtcgtctttgcaggcgtttcaggtgcacaagaacagagaggcaggaaaaccagacgccgctcttttcccgtaacccacttcgcctttgtcactctcgttagacttcacccaatgactggccgaggaagacgagaaacaacaaacaacctaagccgtttccgttttccccgttttcttgcccgccgtccagttgccttttctacttttctcttttttttcctggagagacgaacgtagcgtccactctcgctacagga

SEQ ID NO: 3140 - DNA, 1555 bp, Toxoplasma gondii
  source 1..1555: mol_type = genomic DNA
tcgctggtggtggtgaaagcagtaaaatacgatgccagaagaaacgcatgctttgcatactcctctttgaccgtcacatgatttcggttgtgaactgtggcgcatgtcaaattgtattcgtccacttgagggacggagaagagttctgtactctctggacggtaatgccgtcggagcgtctgcgtttccaggcttgaaaatacgaacatagtttcccttggcgcagcattatttttctcatagatctgtgcacacacaaatttgaggctagggagacagaaaaaagtccacgtcttcggaggagggcgggcacaggaggacatagacagagatgcaagtgctctcgctactaagtttattctatttcttgaggagaaatccgctgcgaaaaggcgacaaacggaagtgcgtgttctcgaagcgttgttcgagtgcagtcatgagaagcagcacgaaacgttacacgcagaagctgaagccagtcagagcgttttacgtgtctaaatgactgtcacatatgtttagtacgccaaggaagaagcgtcacaaagtgtacaggcctccattgttctacaggtgcgtccttgtggaaagacacggaccgtactgacaggaagttcagctgaaaaacacaaaaagagtgttcgcatagcatagaatgcgtcaggctacacggaactctcctttgggtagttttccggtgaaagccgcaaagacgtgtcgacatcgtgactgctgtcgtggtgttcataataagcggagatttactgcaggaaaattatataggggattcgtgcagatagttctctcccgtgacgatctcaggtggcagttaaaggactcaaaaagttcagaacgcgcggcaagagttttgtggcaaatgggagaacaatgaatcggcgtctttcatggaaggttttttcttcccgagaattcgggataaaccaggattcagtaagcacgctttggttgtaagcgtatgtcgcaaaagacaaccgtggttagctagatcactacggtgcagcaagatcggctcatgattgcctctctgcgcaacagtcagtaactttggtcaaaaggctctaggggaagagaccaaaacacgtgacttgggtccctttctcggaactccacctgtctccgcgcttttctccggcttattcccagttacctgacgaaagagacaggtagtatctcatgcaccaagccgtacgaaagtggcaaggagacaccgccccgacactgggcccaccttacaccgaaacgaggagatacggacggaagtgcctcttgggcaatctgcgctctctctacgatcgccgtgttctgtcccaaattttgtttttctcgtcacccgaaatcgtccaatttattttctttgacgacagaacttgattatttctcaaagaccgagcccccttgtgctttcacggcggctcgtcgccttcgtgatctgcgcattgtgtgttctggtttccttgggagaccactaaagaataattttggtttcgatttctccaagttcatagcttttaccatcacgtggtggaaaaga

SEQ ID NO: 3141 - DNA, 2796 bp, Toxoplasma gondii
  source 1..2796: mol_type = genomic DNA
tgattctggtcgatgaaccgccagccgagactctcgatcagctccacgctggagacgatgagaacgaagagtccccgtccgacccagcgagtgccggggagaatggcgagcatccggtggcgaccttgcgccggcaatccacttgttcgcatgcgccgtttgttcctattccgcagctgattcgccgagtctttgcacactgtacggtgtttatcgtcgcgcaccacgccgcgtcgctgatgacttgcgacacagtgtggctgatgtggaagggccggaaaatcggcgagtgcagcccggcagaaatccgaacagacaaacagctaggagaagtgatgatgagacaggtgaatgagtggaaacgtcaatgtgcagatcagtgactggaatggtggatacgcgcgctgttgcggtgggggaagctggccgaccaccggcgctcgatgtcaggcgcgtttcgcggagactccggcccttcggtggtcagtcggcgcgaatttagaaggacgcaagtgacaagcagaggatctgtgcagcagagacgctcgacgaatcctcgtgatgtaaatgtcgcggggatggagagcaggtgtgtgttcatgtgggtacgcggtttggaggctcttggatgtaacagacatgtcgcagtgaattagcgaagcgtcgcctttggggtgacactttctcgtaacggtacatgaggcggcgggattcgtgcgatgggttgagaacgcgaggcggctccgtcgttaggccaaatcggtttcgagaagttggtgcgtacacaggatgggtcagacatccaaacaaggtaccttgtcttttcttcacggtccgtttgttcggttgttttgtggtgcacgctgctagtgacgatgcacagctcttttgtcgcgcgtggaaccctcattttgctgtctttgtcgaaactacggaacgaagaactcgtcatctgatctcagactcaatcgtgcggaaccttcttttgatccaaaccgcttacaccgtggtactggcacggggatcagccagaacgttccacgttggcagttgaagcaatcttgggaactctgtgtggatttgtcttctgtagttgagatatgttccagaaactctaaatttattcgtatcaatacgcattcttcaccatttccaagcagctggcgtgctgtactcttgactagtagaatgtcatcttacatgcagtcacgatggcaaatcaagggcggtacggtggttttgtgctactaaccatctcgccagctcggctacccgaatgacgatgtcgtggggttcggaacaccccaaattcgcagaattgctttcttgctgcgggagaatcgaagctcgcgaaccacaacttcaaatcggatttcagattacaggcaacggcccgcgcaggggctgctcagtgtttcgtttggaccagaacgagcaccttaggcagattttcgagcattgtacacatttccttgaggtggcagctgtaggttatgagcagaagaatgcacgttcctgacattacgctcgactgctcggtttcaaactgtggcacgaactgtatagatcgcaaatgatcgagggtccttgtatgggaacgaggtaatgtaagtctaaattcaccttaaaattccccctctgaagagcttgctgtgtcctcttgctcaggcaaaaatcaatacatcaaagagagctgaggatttcctcgttcaatctccgtattactccgaataaccacatctctcgtcgttcaacggtgtccattcagcaatgcattatcgagaccaaagggctctgttgtgtgctgcagaacaactgctgcggcagcaatgctggtttcgaaacaccaagttcagaaatgccatctgcttataaggcaaaggaaaaacacggaatgagcgttgacaaaccgtttagaagacgtcggaacgcgctcccacctgcgcagttccggcctcgaccttctatcgattcgtttccaaagcgcttttaggcatcccagtcggaagtttcgttgaagaacgcaagtggcaatgcagggaacttgcgttgaaacttggcacacacgtggcttttcttctcgagtgacggcattgcagcgtttttacgcgcgagtcggccacgctgatacgaaaagaatcacgaacgaggcgcttgcttagtgaaactgttcttgtcctctacgtgaaagcatgaattaagtctgggttttccgcaaattcgcttgttgattctctgtttgccttctgactgccgcgagctgtgatccggaaccgtttaactcagcggccgttctagtgtgtttctgtcgtttcttttcgctggcgcggatttcagcgactcgactcccgcttttgtcggcatttctgagcctttacgtcgctctccgttgtttcggatctcgatttcgtcttcgtcgtccttgtccgacggaaaagttgcaacggaattgcctgtccacgtgtcctacggtgtatcgcgtcattccacagcggaagaatcgtccagttctctgttcctcccatcctcgtttctcatcccgaaagaaatccagtgcttcagggcttttttcggcctcaggttcttctgtcgaacactcgtgtcttcgcagcgaaaaggtgcatgctttcaccaaccctccagccgcagttcagcatccacattttgcacgttgttctttcatcgacaatttttctcgactttactcgccgatccacagcccacgtcggtcttgccgaaagccgcggacctttcttttcctgacgttcttgtcccaccaaatcccagtttccgcga

SEQ ID NO: 3142 - DNA, 1951 bp, Toxoplasma gondii
  source 1..1951: mol_type = genomic DNA
tatctcctggtgtgtgagtgacatggtctgtacgactctgtttgacttctctgtctcctgcctcgcgggcgttcgtccgtctctcctgcctctctcgcactccgatcgggatgtcttgattctctttcaaagctcgtctgtccttcgtccttctcttcgtctcggatcgaaacgtcgtttcactgtcgctggcaacttgcgtcgggggctcccgtttcacctccttcttccttgactccggttctgcgtctcgctcttttccgagttgttcgtcctcgccaacttctgccttgtgttctcctccagcctctgctccctgctctctgagtctgtctgtctccgcagcagtcacgaagaaaagagacagcgacagcgcgcagaagcagatcaagagaagacggggagacggagagacaacgcctggggacagcgaggcagcgaaagaactccgacaggtggagaaaggcgccgcagacaggtgcagagtcgaggacgctcgctgcctgtcgccagccgctgcgaccagagaccctgaagacgcccgaggagaagcgatggacaaagagagaggaggcgagagaagagaagaagaaacagaagacgagagaagaccagaagagcgagaattcgagcgagaagaggacagagactcgagagcggaaggaggagcggccagggaggaggacgaagggcaccaaggcgtgagggcggagagcaggaaaggagaggacaaggagcaagacgaactaccagacagaagagcagtgggaaggcgaggagagacgacaaaaggagagagccaagcagaagcttgtgagagagaaaacgatcgaaaggatctcacagaatccgagagagacgcgcgcgaacgggaccacgagagccgcgccttcgccaagaacaggctgcgtccctgcatcgctggcgttgactcgcgcgacaatttattcgacggtgttttgtgaccgtagtggtacagctcagatcgagcaaacaggcacctgcggggacgtcggacgctgaggaagcgtggatcgatctctgttgtctgcgtcgatgctccgcgaattccgaccgacaacgggggcgtctccggttagcgccggttccctgagttcaagaaggccgggcgtcagcgagaagaggatgcgctctcgatcgatccactcatgaaaagcaaacaaaaggcagacgacggagaagaggctgatgaaccgtcgaccggaggcgcacgcgagtcagccgaggcgtgatgacagagcaatggcagtcgcagccggaggaagcgaaacaagacggtggacttttgagtgcaaagaagtcgcagatccgggtgtcttgacattggatagccttgagtcgcgcgttaacgaaaaacgtcttctctgtctcgtcgcactcctttcgttcggcgtctgaaggcgccctgaaccaaagatggatagaaagccagctgcatgcatttggaaggacttttcgtctccagacttgcgcttcagctgtgtcgggagaagcgggctgcgacgcatcacaaccatattttcgcacagaggacggagaagaggaaagcacgcgtttcgccggttttttcttgtccacctgaagttcttctctgtccggtggtcgcgtgtatttcggtgtttcccccctctctctcgttctctgcttgtctggccactgcactcgagagaggctaggaacttgtcctaccgtcgttcgccatcctttttccaccctgctggccctgcctcgctgggaaatggcttctcgtgttgctgccgacctcttttttcctccaacgtcgcgcagtgtctttgcgcggccttgcttcgtctccaggacaacgaagcacacagcagaaagccgagtttgatacgccttctctccactctcgactcgcgttaagttctctttctgtttctccccttcgtctaagcgcgccttgtcaaga

SEQ ID NO: 3143 - DNA, 1279 bp, Toxoplasma gondii
  source 1..1279: mol_type = genomic DNA
ggtctgcatcatttgacatacaggaggaaggtggagttgaccagacaggcaagctgcagagtcaaaagggatgtgaggccgccgatgactccagctgtgacagcagccatgcccgcacagaaaaagagagtttggtacttgcagttcagacgcacgagcgtttcctcgacgcgcgcaccaccactctccatttgctcagcaatgtgggcagctgacgtgggaatggcagggtagccattttgtccaccgaccagtgcctctgcggaacaacacacacacacacacaaacggcataaaggctcacacgtgatatggaactagagaaacgaattgaatattgtcactatgtgacagccactaaaattgtatgccaacattcgaaacccaagtactacatcttacttctaccctgattaagatgttatgtggccgaaacaatttttagggcgcagcatggtggatgagcagcaacccacccgggagatcatccatgacagtatacaagtgagcctttgattacaacaacgtgcacagatacacacagatttaccaaaataaaaaaacgcaagaaacaactgaacttgcataatgagggcgtaactcgcgcatacagatactggtgagttcgcatcccagcacggcgcgaaccctgcgtgcgcagatgagagaatgctcaggacggccaaaatatgattttcacattatccgtttgtagcctttgccaacacgattagttatagagctgcgcctttggagggcctcagcagtgaccgttctggagaggtaaaggtaccgccacgaacgaagcaccacagcgtttcctaagccacgatagactggatcgtgacagaaaaaaaaacgtttcgtgatacagttcccagctttcgcgtatccaaaagaactaagaacagagcatccgtgatgaagactatccacttcacttccatgctgttgtataaaaagggacagcccccgtccgcccccgtcgtcagttaccagtagggtcttcaagaaaggagcgaatgtctcggatgtacgtacacctcaatacaggagaccacgacgggtatggaaggctgatggaatttactgcgcaagaggtaacagacagcctgagaaaagatcgcctttcttacctgttgggtgtcccgcgattggcgcgtctgcgtacattgtgcctaaaagatgtttgaaaaacaccaggtgagtaagcgccggcacagtaaagagagcaagcggtcgcgacgatcctcgaccagcagaacgagtgaccggaaaa

SEQ ID NO: 3144 - DNA, 4522 bp, Toxoplasma gondii
  source 1..4522: mol_type = genomic DNA
catgcatatttgtgtagactcttttgcatgcatgttgatggtcgcctcaccgcgcttcggtgtgctcatcagacagagtggcatccttgaaagggtcttggagacgtgcgagaaaataaattgtctccttctgcttccctcgagcgacgtaatgaagcctctgcggaaaacgggaaaagaaagttgtttcccatgagtcgctttttgcgtagtattaattccactccagacagctacccacataggcctacacatataaatatatatatatatatgtatatgtatacatatatttatacgtacaaagggacaatgcaagaagtacacaataggtacacctctacaaaaggatatgactgatatttatgtatagttgtatatgtatatatatatatatatataaacttttcttgggagtgtaagggattggccgagacgcatgcgaatacatgaaaatagatgcattgggtattgactggatgaaaacctactcttctggtcatttacgcttgtattggtggataggatgcaatttctccgcgttttggtcgaacctggatctaggaaccaaagaccgtggatgagtaaacccgcgcgtaagaagtattatacactctgcaaagaagcgtggagccctatctcagagagtatcgttaccaatatgctgggtgttcaccttccacgtcgaacgtgagtattccttcgatacgcgtcacctgacttcgaagaatagagagtacttggaattgcttcggaaactaacgaaagaattcaacatctgtttccacccttcgtacacacccagcgaaatctgggaatctgtcaaacgaagcacctatcgaaggaaagctcggacgtttacttgacggccttcttgtttttttctgggacactctgaaacctactctttcgaactgggagtcgacgacgagatcacattcggcaaatcccgtttcttcttctgtctctcgcaacgctgtctctagtggtttctcggtgccatccacatggcctgcaacgaccatcaaaccgacgaggcatggaaaaccagcctaagagttgtgtcttctcctctctgtttttcagtacctcctacgcaacgcaaggcagaaagttccctggttttctcgtctctagattcaaacatctaattttgtctccgcgggtgttccagcgagttctgtacatccacatttcgttttgtatgttcaatatatttgctagagaacttgaggtatagtttttttcctgaccgtctcgcgttgcaatgtccactgcgccttttcgtctaaacgtaacggcctggagaggctacagtgagtgtgtctgcacgtgcattcccgacttcttctgcccatgaagagcagccggctaggacacagaagctttgcatgcaacgctgtatcggaaacggcgaccgcgaaaagagaaaatgtgcctgaaacgccaccataaagtgcttggtggtttggaatcctgacactcccgactggttaactgcagtctgctggtctgggaatcagggtgtccttggtggtgctccaacgctcgtctacgcctctggctagcatcccgtttaccggccactgtacggaatgcatcaaacatgagtgagcaaaagagtggtcttctgttcctatttgcagtctcatgcactcgaggtaaaaccccgaaagctccgagtcgttaggcaggcgaaggcgtaaacaagttctgaaagagtccaatttgaatctcacctttcggcggagtccagtggaacggttcgtaggacgctctcatcatgagaaactgaactttgttagcttcgtttgccttggcattctcgtcgatcttgtaaacgagaaaccctgcggctcgggcctcgacggctggcttcggctcttctctgaagaaaaaaatccgattatcttcagagccctacgcagtgtcagcctactcaccaggatattaacagtataaaagctttgcaaaaaatcagacaaatactataatacaattgtcggacgtacacattctaaagtattgtttagaggggcacgaccggtcggggggctggaggggaaggcctatgtcgagacacaagaaggagagttctttgcagtcaacacagcatcaagagaaaggaagctgtcagacaaaccaagcgctcatgaagaactctatcattcatgtgaaactttatctcactcgtgtaaaaaactcttgacacgaacagcaaggaagatccagcatcccctccctgcttctgctcccctacatataaacgtattcctggtgtcttcttctttcatttctctgctactttccctttgccttatccgcggctcgtccctttcctcttcgttctcacgcggtaagtgacatttggaacatgcgtttggagaggaacccgggggcttgtatatgtggaaaataccacgtttttcgcacgagaggcggtgacagaggacgactacagacgaggtggtggagctcgacgagagggataagaaaacacccgatatgtcgtctcaacatcgcctgaacaggtgtgcacgaatgtggtctccgaatgcggcctcggatccgtggaaccctgaaacgcagtcctgttccctgccttccgacagaaagacaagccgcttctctagcacgacgatttccctcagagtatcaagagctttcaaaaaaactcaacgagaaaataacagggtgaaatgcacgcgttgagaaaagggagacgtttcatgaagacgcaatggcgttgaggaatgcaacgttgcaggtgctagcagcaggcggcaggagcgtgtgccgtgtagacggtgtcaagacgaagcagatttccgaggtgtttcaccggaaacaaaacgtggacacttttctgttcccatctcatcagttgcacttaatcgtgcgtggaacgtgaaaaatccacagaaaatgcctgaaaaaagcgactcctcaatgcgctcttgtcgttttgtctcagctccatatacagccgaaattaacgctgagcccaggtttctctcgcgtctaatcccgcctgcagatcagactctttctaccgaatcttgcatggggaagtcgaaaataaatgccccttttgtgatatcgtggatcttccttctctgccagtacctttccgctctcgccccgcccccgccgtccccgccgctgcgcgtttgtagcgctctggctcttcgcgcggctccactgaaaggcggctgggggggggggcatgaggaagacattttctccttttctctcgtttccgcagctcttcagctttgaaacgaaattccgtcaacacaaactacaaaaggcttactgtaacctacgtatacctgtatctctatgattacatccccacgggttgttgtacacggacacacgcaatacataccggcgttcacgtggaaagctcgcacacttcatgcttagcttgaaatgctgccaaagatatctcttttcttctgacgaccattgctccagaacagtttccggatctgcctctttacatctacacataagcgtccgtagttccgcgtatggatatgctccaaatctagccgtgttcctgtgcacacacctctctcgtcaccgacgacacagatcagacacaagaatgcggagtatatgatgttagctggcatatacgcctcgcctaagatgtgcgctcgaaaaatcttccttcattcatgtgcttttttcctcgctcccgtatctgtgtctctgcgctcgccctgagctcagctgcctccgtggttccggcagtcccgctcttcctctcttggttcctgcaaaaacgttttttttgactctgcagtaagatacacacctcctgcttcttgtatccgattgctggtttagattttgaaggtcggtgtttaccggatccgcgttcgattgtgttctacacacgaccgtcacattaactgtatcgagcggcagaaggcgtctattggaaaccctgaacaggtacctaccagctgtgcaaatgcgacggtctccatgttggtgtcgtctccttttctgtgcacatttaaagacatctgcaatccagcttccgtcgaaacggggctggagtctgggggacaacaagttggcaggtctcgagtgtgcctttggcgtgtctctcgagagacacgactgtggggttcgctacgacaccactgttaacgggcaataggaatttttcttgttggtgcctggccgacatcgtgtttgtctcctctttccctcgctctttttcccgtaattccggaagtcttcttgcacgcacacgccgcctgtgcttccacttttctcgtcgtaaagttgcggggtctctctcagcgtttcaccgcccctgtttcgcgctttcttcatagagctgcttgtgcgggagaaatctctccggtcgccgagtcgcaggagtccctttcttctcgcgccgtcgttttttccgctcgagttttgttcttcttgcctgtcgtctgcttctcgccttcccgcctttcccgtgcgtttttgctgtctccccgcctcatcacca

SEQ ID NO: 3145 - DNA, 2282 bp, Toxoplasma gondii
  source 1..2282: mol_type = genomic DNA
gtggtaaacaaactcggaagcttgtctcgctccaatcagaggtgaaacataggaactgtctcaattccgcatgtgcgtaaatggcggataaacgtcttttttccgcaattgtaacagtagtcccatctcaaaccagtaaggggtgagcacgaaattcggtatccagcgatcccaggtagtttacgcttgcgccaggtgtcaggaaagttccgacttccgttcgagtgccgagcgtagactctggagaaattggtaccaaagagccttctcggggcccctaacacttgggcatgacagcagtagtgcgcgcgtagtttggtagcggactcatgaagcgtggttgcgtccatgttctcgagactgtcgccagtaactcggttcagttcctccaggcttcgaccggcagcatgatcatgtggctgtaaaaaagtccgccatctttttttcagattgacagtggaagttcccgcgcggtgcaaattgtgtcactgacatgggaatgtttttctattgcgacacagctgaagctattggagcattttaggtggaaatcgaagtggaaagtagaagtgatgtactttgccgttcttgcagggctgcagatttcgccggtgattgtcgatgcagatgacctgagggtacatcaaatttcgggtctgaaatgattgaatgaggcaaacaggcatcgaattttctcaagaatttgtcttaaacgtagatctctaacgttcttatacactgggctcatcacaacttccccgaattcctaaagaacctgtaatcgaccgccggtatcatcctggtgtgtcgtgtgatgtttctgacgagcgtgcttaaacgtctcaagaaaccagtttggcattcgaagaagtgatcggaaaatacgatgaacagtgctgcagcttctcttgcgcaaatgggagagcctctacatcatggcttctttatgcaacgcgcaccaagcttcgaatccttaagacacacaactcttcttgcccgtactctgattgaaatattcagcacacatttccgctcacagcatctcaagtaacatttctcaaagtccagcttcgattcacattttctaactgtatcgtcgtcataactcgcgcggcagacacttgcttttctttctgattacgtcgggagtctcgttcgtgtgcacacatgtggcaagccgctgaacgtgttgaaaacttcaacttgttccattgcaaaggacagccaaaaacgcagatggcagaagacaggacttgaaaacagtgaaggggaaaagtcggtgcaactgatggcagctccacggggggacagtatgctagccccatgtggggccctcaactgtgtgcctaaacgcatacttgtgtccggaacagttgcttggctgactggcaaaatggccaggaaaaagacacaaactgagttacttcctgacacaaagtgttctctagtacgcgaatacggcctgaggcactctgtactgtgtaaaacacaacaggtgtcggacagggatgagagtcctgatcaagctcatccaatgacgcctcagctccagcaattcagatacagcattgttgcgcgtgtagattaaagaagtttaacagtttttctcagttttctgactgagtgaagccactctgttcaggttcgtggaagctcttcgctaattcagatgcattgggtgtcgcaatattcactatccgccacaaaggagaataagcatgctgactgcccctggattttgtggggtgttaccgtttttgtcagatccggaagtgtctttagttttcctctggataaatgttcgtcttactggtgtagcctccttcattacaggtgctcttgttgtgtgcgagcgctaaagccaaacaggtcctggatgcagtgtgtgtttgctcaagccgctaggttggttcttatcggggatatcgttgtctagcctagcaacagtcaactccctctgttctgaagcgtgtcacgcgggcattaaacgccgcccggtttatacgcagctttcctgtacctcggtcacatccttaggtcaacggtgttctacgatccaaagcaacagtctggaaccggtagttttgtgaatctgtggaaggcagttttgaatcgtttcgtctcagccgttcatcgatcaaaggacgactgcgtttttcatgaccatgttaagtgcactgagtctagcggtatcggtgctactcccgcttgcccttgtttcataatttcaacggtcaccatgcggcgcaaacacagacactgtttcgtctccttgtaaaaca

SEQ ID NO: 3146 - DNA, 1624 bp, Toxoplasma gondii
  source 1..1624: mol_type = genomic DNA
gtcgatgacagcacagacacgggacgtacctgcttcggaaaaccccatcgcaaggttgttggtgaacagcttaattgtagtgggcacctctccggctgcagcgcttccgggcggtgattttatcatcagagacgacagttttacagggctagtgaagccgagctgcaccagtggacgcacgatgacaaacgccagcaagccgttgacatatggacggaaagcacgtctgagagcatcgtatgtggcatgccacccagaagacaaacgcgatttgctacccagagaaacaagaacacgctgttgaaacactgaccttgatgagcaactgcgggtcttcatttgatgaactgaggtaggcggatttcgatgtctgttcgatgatgtcgcggatggagtgctgggcatcctcgttgagacactcgaccttcgacttgtcaataagggacattaagctgggaaacgcagactcacaacgggtgcttgtcatgttttgcagttctaatacagtccgtacggcctactttttacagtgtctgagaggcctatttacgctggcaagggagtgaatgcgatacagacgcggacagggtacaccgacagaaaaatgcgccgtcgccaataattcccgcatcacgtatatttgcgctggaaacagaaagaactgcaccaaggtgcactttagcacaaagaacactttcgtcacctctatcggagaggcctctgtccaccaagaaggccataagccgcgacggacagtcgatatttcttcagaataacatttgctttgcatgcttccacacacagcgcagcttacaggcacgttcgagagtgaatgggggaacttgagagctacgaaccctccttcatacctggtgccctccatgatgccgatgtgaatatccaccactttttcgcgctgcgtatcaatgctgccgtatcttttaagtagccgggccgaagacacacggcgaagcccgtggaaaatcaaaattgtgtctcctaagtttctgttgacggaacatgcaaaacgttgtcttccaccccagcatgccgtgattgctgagaagcccctcgagagacccaggcggtcgaaggctgaatcagctgccttattcacgtgcgagatgaatgcagatgagcgttttatgttggggacctcgcaaagagactctcgagaagttgcaagggaaactcgccacacctgttccggacacagacgtccttgcgcttctcgaagccactgcatgcacactgcctctgtgtagtatttctgttggctcgctgcgtgacctgtcccgaccacgcgcatctgtctccgtattgggagacacaaaaagacaacgccgcgacccgctgcgccactgtgcacgtcccttgcttgcgacatgaaagtcttttcgttgcctgcttttgcacagggcagaatgttcgtccccgtgacaactcgaatctatttgtcctcgatttaatgggtaacttctgaaatccggagaattcgcgaccttcgtggcacgtcaggtggagccgtgctgtcgcgcacatctgctgcgaccaagttttcgagtgacactagcagaatatcctctcttcttatttacaaacacttttttgtgttaccgaacta

SEQ ID NO: 3147 - DNA, 2970 bp, Toxoplasma gondii
  source 1..2970: mol_type = genomic DNA
tgcgaccgatgactcgagtcacttcctgaaacggtagtgaagtggggcgaaggaacttcagtgagcacggaggcatcatggatcaagattgagggccagagacagacggatgaaacagagtaaaagaaagcgttggcagccaagctcaggaaagcacattccgcagaaagccctgttttttgaggaaagagaggagaaaaacgagcgagtgaaccagactgaccacgcggacggtgtcacttgaactctgagtaacctggatcccctccgcgacagccatctcggtaaccagggctctttcccctccggcaggaagaatttcggcctcggatttccctgattcctcaaccactgccttgaccaattcttgctggacaacagaacagaaacaggacacaaaagtccacagttgtatttagaagctcggccttcgacgcattcctcccgtgtacggtaagtcttatgcccccccgaaggcaaagaaacaggacgtgtacgcacgagagaccctgtcccttttctacaggatctaaaacaggagctgcagcatgaagttagtccaaatcaaacggcttctgacggcaaaacatggcggatcaggtgcgggtgaaacttccgaaggcctttggataattgtggtggcttcctgagaaggcaagtcgcgattctttgtttcagccgtaggtttttcggcagacgaacgggctgcatttgcactcagttggcgtttgcggtccactaccgctggccgcttgtcgcacggccatcaccagaggaacaagggtgatgccttatagaggcactggaaatcttcgcggtccattcctgtgatccagcctcgcaaatgggatcaagctgttgaagcaagagccctaaaatgtgtatgccccccatgtaaagccagccacgaacctagacagagaatcgatacaaacacgctttccgccgaccgtatttgtaaagcagtgcctcatggccggtgttgtacaaacaagcttacgccgagctctgagaccttcaccgcctccgcactctgttttagttttctgcgtgctcgacgagcgcgaacgtttgccccgcccagagatggtggagtcgccgcggcaagtgtcgggcggatccagtcctcgccgctgaggaggacggcgaagaacaacaggaggagacatctcctcgaaagaaaagcgaacagccccatgttgctcgatcccactgcattctacttgctgggccgttcccttgacctgatggtgcgcatcgtgtctgtcgtggcagaggttctcgcgtcgatttgtgcggggtgccgcgtgaagccgggaagtccgacctaaaacattcggtgctgttctttggaagcttagcggaagctcaagatcacttaaatggcgtaacacagaaaagcaagcggttcggaaatgctatggaacgaatgtcggaacgggcgaagctccgagagagggatttgagtcatcgttgccggcggtcctgctacggagtgtcttgacacccgagcggctgcctggaatcttgcacaacaaccggggttctttcgtaggagcaaaacaatcgacaataaaatgggcctcaactgcagagtgccctgaacgaaaatatatttccgcggggttttacacagagacaccgaaaccttaccctaccctctgcctctacggccgcacaagacagacgactctgctgtccggcacgggaccgacgtcaattcattttcctacgtcgctttgcgcctccgtatagtgagggcccgaaatggaaacagccgtttccccgcgtttttgcagaaaaacagaagcggtccaaccactcctcgcggcacgtgtcttgctccgctgaatgcgagccttgctcatctaggcaatccagcgatccggtctactcagcgcgtcaagtgcgctggccagtcacgagaccgctcgaggtctagggcacccgccgtttcaaagataccatgagacgtacaaaaaatcggatcaaacgctagcctcgagaaatgaatttcttttctctcgccggtaagactcttgagaacacgatttaggtgctttgtctccgttgtcagctacatcatggctgcctctgccaccgacgagagtccctgcgatttcaaatgctgtcctggcaccagaatttttttcggtttcgtgaacgccgccgctatatcggagtcgagggaagagagtaaaagtaagcaaactggaggtcctatcattgccgtgtctgcatggctcgtgcccgttttcagcccttctggcgctgcagcgctacacttttacactttgttgggtcgtcgctgtcggcagcatagcttcgccagccctgcgtcctgctgtgccgtccagtccttgtgaacgtccatgttcttggtggagacacacggtttccgaattgtttttcctctgtattcagcagacgtgccgtggttttcagtcgctggtcaaacggtttcaacttgcgcgacgagctcagactgccagagtcgccacacgaaagacgcatcgtcgcatcgtgtcccctctgctgtgccttgccccccgccggttgctgaccgcgcaggtgcatgcagccggacagaagcgtcccgtagaagaagtcgcctgcctctagcttcttcttagccttttattcgtcaatgcagtctttttcaattcgaattatgttcacttccagaccccgtcggcttctgccacagcgatctgagccgccacacgcgaccgcctcggatggacccaactgggagcgcggtcggttgcaccgcaacgttgactctgttttccgctcccttcttcgactggctccgcgccagggcgtccaatgttaattcctcgttgtcattccccccaaggcgtgttctcgtttctatcgagaccccgtgcactgtccgactgcgattctaggctctaccatttgtaagagggtggagaagtccgggcaagtgcagcgtcgccaccacaa

SEQ ID NO: 3148 - DNA, 2587 bp, Toxoplasma gondii
  source 1..2587: mol_type = genomic DNA
ttctaggttcgtttgcttctgtcgggcgttctgatggttctgcagtccgtccgaacactcgcccaatcggggttggatgtgtacgcgcataacatcgagacagttcggaggttgacgccctatgttcgcgacaagagagcgaagtacgaccagtccctgcgtgtccttcacctagcgaaacagttcaacccgtcgctgttcacaaagtcatccataatggttggcctgggtgaaacctcagaagaggtggttcggactctccgggatcttcgagatcacgacgtcgacgttgttaccctcggacagtatctccgaccaacaaaacaacagcttggggttgtggagtatgtcactccagaaaccttcaaaaaatatcaagacatagcggaggagatgggattcaagtatgtggctagtggcccgctggtgcgctcatcttacaaggcaggggagtactacatgaagcaccttattgatgatgcaaggaagcacggccgacgtgaaacagtgaaacaggttaagctggaagctgatgtcggcacactgaaagggacaacaacaacatttcaagtaaacgagaaagaggcgtgaccggaaacttgattggggagaaggaatcgaacgagcacaccacggtgtgcgggccgggttccctgttccaagtgtgtagagggaaggcaagggggaatataaaacggttggtcgctgctggacgcatggaaccagtttcaaccaagcaagagagcatcgttcttattgtattgtgtagccgatagttagcacctatttagtcctcttaaaaatgtgcctgatattccccttctcgcgccgagcgtagttcctcctttgccaatctacgttttgctcaagggtgttgacttagaagcgtactttacggtatggcacctttgcacaaccgcatcgaatgaaatgcaatgcattttatgcggagcatgcttttactgcgatttgctgacaaatttgtttttgcatctcacgtgcaagtcaaggaagatggaaagacgctcaatggtgcatgctcctgtcttacataccactttgtgacggtacttacgtgtgcatttgttataaacgatgaattccctaccgcacgtaccaccaattatttcatgtgcacctagaacagagggatactgtaagaaacgttgtcgctcacgtgattacaaccacgagggagacccaggtaacctctggggaagcagcaagtaccagcaaagggtgagccgcaagcaccagcaatgggttaacactccatgatccacgggccgaatgttgtgtctggaaactggatcccaacaccaatgttacttcccagagggagagggagaggctctgtggccttgaccaggattctgatctagtttccagggggaaccacagtttgcactcattggaagatgttccattagcaacgacgagcaaatggtagatgggattcgataaacaccgaactcacccgacagcaatatttatcagtaacaccgatacaatgacaacggaagctcgttagcagctgcaacatagaagaatccaactctgtcacaagagatgtggcctcttataggccacggtcagagaatgctgcaggggtatcctcggagggcaacggcaaaaaaaaattgttccccatgcatcctacacttttctccaacacagttttcgtctggggatagctggtttcgccacacgagaaggcgggcttttgccttgtaatagcatcacgctaacaacagcagttaggtgctccgcttccacatcctcgggactatgagagctgcagctaaatcatgtaagtcgaagacgcaagctcgtgttgcattgatcgccttcagccttaagtagcaggcagtatacggacggcgtctttaccaccagacgcctctacaatcatgcgtttgggaggatcaattactcgtggatatcaatcgtggcagtgcgcgagattgagtaaaatttcgaatgtatctggagcagtttcccgaatttctttgccagtggcaaagtttttcaacatgatatcttcctccatcggcgaagactgcgtagaggtatggtggagtggctcagcactgcgttcaagcgcgggtgtatgtccacgggcaccataaaaaaggtaaccccggagcgcgggggggggggcacggaacccattccttctcgtcacaacagcctatgttgtgtctggttgtctgatacaattgattctaattatgagttaccacgttggagataaagaagtaccccagaaaagactggacatgcaatctatcgagaagaaatgtccccgaggcaacgcaaatcgaggagctctcaggtcatcaccccacatggtcgagatttgtggctgttgaatcgagttaaaagacagacacagcgcccggctcctttgactagctatattttactttgcagaaatgcgcggtgattcaactgggtgccgaaatatatgctgagagcttccacgtgtatcgtgttgctgactcgttgctggccaccgttttctctctcgactgtctggcggcagtgccgtctcgctggtcctccgtccgtctccgctgcgaaaaga

SEQ ID NO: 3149 - DNA, 4317 bp, Toxoplasma gondii
  source 1..4317: mol_type = genomic DNA
agtcctgagtgacggcaacagcagcaggagatgagacaccgacagaggaggcaggatccacgccgaagtggacggaagtgacgggagaggaggcatctcgagcagcgttgcggggagacctgctgaggccgttcttgcaccccagaagaacgtcggtgtctgcagcttcataaagaggagaccgtcccgaggcaggcagagacacattcggcggctctgcttcttttccctcagtttccgagggggctgagtcagctgatgcgggcaaaggagatgtggggacggccacactgcatgcgttgccgtagggttcgtcactggagagagatgggtgcggggacgaagcctggacagacccagagtacgaggaagcatcgagaagccctggagcggaagccgacagctcctccgctacagactgactgcgcctttctccgcgatcatccagcagctgtggagacgactccgcctcggcttcgcgagagccctgtaaaagagcctcgctctcctccatggtttgtgtgaaaccctgcggccatggacgtctccccgaagcattcagggacgagttaaactgcaggtttatagatgtccacggtctctaccaggtccaagttcgatagtgctggcaataaagcgccgcggggtgtggagacactccgcggttgacgcacaccgttccttgaaggacgcctcttacaacgtgacacaaaaaacagcgaacctacgcatgcttctttcaggtgaacaggcttctgagaagtcggtcagaaacgcagacacaaacaccaccagagtgcaaagcgaggaggcgcacttgggggttttcggtggagaaacttgaagcgatctgcatgcacgattgcggacgcagggaaggtagtcgtggcttccccagatctcctttaacgaattcaggagggtgagaactgtaatccctccgagaaacttgggtggaagacgagaaccgtgaagggccgcaggactacacgagtccctcagtgaaatgtgcagcagggcggctgcctcagctggcttctgactggcactgcatgcgccgaggacatccggctcctcactccttttgtggtgaagagaaaacagtcagaaaacatgaggtcaactgtgttggtcgtacgcgccggcgctgcggacagtgtgaggggacggcccagaacactgcgcgagagaatttagagcgctttcccggggattccaagaaagcagaagcaagcaatcccctcctgtgcggaagctgcggctggcacgaactgcaatcactgcctgttggttacgcggaatcgtgaggcacgaccaattgtgcggaacccgggccgttagactcggcaaaagtgagactcggacgagaaaacactccaacgcttcacgagtaactgaggcacagaaaataaactccaacagaagaaccgtgaagccccagtagtggacctcaaatgtaactcgtgcgtcgaggtgtgcgaggaactcactcgtgtaagcaaatcctagagctgcctctccaacaagaaaaggctacggcggttcgcctgggcgcttctccgggagagaccagcgtgagtacgcagaaatgtcagactggagtagatcgacaaagttctacgcggaaaaaatggatttgtgtccactcagctggctccagggccctttgaacagttaatgcgacttcgaggtgacctggttcgaaaagcagagagcgacggcggaggcaagcgacctattgggaagaaacagaggaaagaaggtgttaaaggggagaaattcgtcgaaaaagccccgggaacccagcgacaagcggtgtcaccctcattttttccagggctgacggcggctgcatgcaggcgtctgcagaggaaaaggagagctggaacaagcgaggtgttctctcgaaaggacgcaaagatcagcctcaaaacacagaccgcagcgaccgaacggtgccaaagatttgaaaaacacaggaaactcgagggtggaagatgaacttcgcagaaaaaaaaggggtagatatctcaaattccaacacgcttgtcgagctgctggcttcgacttgtacgaacaaaaagtgtgtccctcacaaagggcttgtgtgctagccgagttgcgtggattcttctatcttttttctaggaccttttatgcactcatagacgcagatacacccaaaacgaatggattgttggtgattatgtcactcctggtcaatctaagatttccttccgagattcgagctttgaagacccgaatgctcagtcgtcgacagtgcatgactcgacgcgcagtggatcagtaattgtttgcgtatataatgtgatcgttttgatggtggttggcagtgccgtttctggcctttctaatcactatcgctagtgcttctcctactcttcttgcccaatctcgaccatgttattccgtttgtcctcgctcattctcgacagtgctcttcctgctctcccgtcttctcagtattcctagtcctggtcgtcttgctttttcgagatggcccttctccacaggcaccaccgaggagacatatagacgaaagattgcctaggacaacggcacccccaatgggaaacaccactttcgctggccgtgcacacaagcgccacttggagtcacgttggagtacggactggatgcacgaacatgaagcaagacactgtcgcattcactgcacacaaaatgcccaaagtgaaaatatatatgtaccaatgaatatatatatatatatatgtgtatatatgcagcagtgaagaagaatagaaaacgaatttcgcaagggagggctaccagttgcaccatgagcgacctaaaggagtttggcctgtggcgaaaagcgtccacaggagcctcttgtcgactgtatgtagactgttttcccgctgttttcaattgtcaaagccgcatcaaatcctgaactgttttaaatctcttctcaacgggaggatctgaacaaagtgggtcgaatgaaacgctgacgaaatgtctgtttctcgaagtggtctgcaaacgaatttgttggcaggcgctcggcgttctcgtgagacctggtgaacgatgttgtttctgtgcggaaaccacaactagaagcagatgagtgtcttggtatatcttcgactttttccctccattctgattcacctctgacccaacggaagctggacggatcaaggtatgacgctctctgagcgaagtggacgatgccccacggaacctcgatgtactccaacgaatatatatatatatatatattccaatgaatacgtaaatatatatgtataatccgtgcttatgtgctccagtgaagatagatggaaagtgaacgttgaaaggaaagagcgtcaggtgaacagtgtccggatctacaggcaggcgttctccttcaccgactctacatcagcacaaggctgcgcgaacagttgcgttttctcatggttgcatgcaccgcgtttgggttgaccgccagaccagtccctacgcgaccgaaaagcccgagagaagttcgatttgcttcctcagaagagaagtttaaacgccagaagcaagttgggtccgcgtgtgttgccggcgcttccctccaaggacgttcgagttgagtctcctgcgcaattcgcacagcgctgtgcaaggctccggcaaggctgcagtttttcttgagagcgcctcaggcctcagacaactcttttaccggagcatagaactgcttgctgtttcattttccgttgtttgcttctccaggaaagagaaccaggcacccaggcggccgctggcgccgtcgagctgggggtttaagctgcacgaaaaaggacggactccgtaaaacgccgcgggactgtctttggtttgatcacgcttacacttgttttgttgggcctgtcgcatgacacagcacttttttttcgtctgaaggctttcctagcgactcatgggtggaatcctgcaagggtatccgtgctaagctttccgtccgttccgcggctgaaatctgtccagtttttcggtgaaacaagccacagaaagactggagagcttcgtcgtcttcagtttacaggcacctctgctgagaaggcaaacgcgcactcgcgtaccgccctcgatcttgttttctgaagagaagtttcccgttgccgctcggctgaaacttgcaaacaacctcccatgttcctcgcgtcgctgcataaatttcgtcaccatcgatgttcctttgcttctcctccggtcgctactcaccaaatctgatcctccaccgttcgttcaaccacaagaagccccgcgaccgttttctttaagtctgca

SEQ ID NO: 3150 - DNA, 4336 bp, Toxoplasma gondii
  source 1..4336: mol_type = genomic DNA
gtctcttcgacggcgtctcctttgttgccgagtccaggtccgaaagaggcgttgctctgccggcctgccaccgcttctgaagttccgcgagcggaggctcagggtctaggtttgcttcccagtccggtcgccaatggcggaggccgaggagtacccgcgggcatttcctctggaggcgactcgcgtctgtcgttttcttcgagtcagagccagcctttgctgcagattcttcgccgaggccctcaagcggcggggcagacggcactgagaacggaggcaggtaagagcgcctctgttggggtcgcgtccgcagactcacacgagaggagtggattctccgccgcgcagccagcggctcagcagcacgcaacgcagcatgtgaagcagcttttaggcttgaagacaggcgcgtcttctggagggccttggcaggcgatgccgcagtccaggcttcctgacgggatcgcaccgaccgtacctttgggtggacagggtggaaaccgcgtcggcgcggcgcactgtacgagggacgaaccagacaaggttcctcagaacaacgtctcgcagaacgcaaacatcacttcgctcatcaagcagttgatgactcgagacactccacagttgcagcgtgctacggaagaaaccgcggctcagtctctcgtgcactcgcagccacaccgaacaccggtagaaagcttgcatgtcagtcagacgccgagggtggacgtcgcacccgctcctcaacacaattctgaaacctcaaccgatcccgcgacgaaaacgttcgcctcgagaattcttgtcgagtcgcgagcgccgagcgcgtcgccagtcacgccagtcaccgctggcccgaccggcggagcatcgcctgccatggcgcaacaaggtcgaaatttgctcgagttgctgaagggacgggagcttttgcaagcaaatctgccacggagttcgcgagacaatcgagaggaacagacagcaggcggatgcgcgcgtagcgaaagccacagaaatctgtgtttggacgatgatgacgatgaagaagttttgctgcgcacaagtgtgctgccgcgtcgtcccgccgtttcgggagtacgcagacccggcgtagggaacggcgcggaaacgagtggttcgcgcagtgcagcgaaatccgaaactggcggtcgaaacagtgcggtttccacggggaaagaacgcggttctgctggtcggggagcaaatgacttccgcggatcgcagagacgctaaagagttgcggaccgcaactgcccacagaagtctgttgatagtttggagatgcgcgggaccggcttgctcgggatctggcgagttccaggctgcagaggtccacaggaaagaacttttgtcctgtcaagcagtggatgtgccatttcaaggagctggagctgaaagggtggaggggaacgagcgaaacaagagggagagggaagtgccgcgtgttggaagcgtttgtgacgatttcagtatccggaaacgtagaatttctcaagatggaatatgcgttcccagtgcgggtcagattacactcttctgtctccaatttttaagctgcatgtgcgtgatttgagggaacagaccctgtatttcgcatttcactttgtgtgtgttgaaatccacctttccccaagaagaaaagtatcggcgatgactggcgttgctgcaaccacagacagctaatcttggtttgattcctgccttttctctggtagtacctgacacgcagagcattacatgtctagacgagtcactgcttcagaacgtactccttttttgcacgggctgttttggtgcgacagaaaaacacagtcggtttgaagtcggaacaactcgacggtgaatctgtgggtcggcttccgcattcttgtgtatttcaactcgcgtgggtcgaggattttcagggaattagggcagcatatcataatctcttcctggagatttcctacgttccgtgaggactgtacaactggagttttcgtttgggaaatgccacgcggttgtctgttttacttccatcagcgaagaaccctccatgattcagtcacacgtcgcgatgccggcacggacctgttagctgcccatctgctatgatgctagtttcaccgtgcaaataagggaggtaaagtggtgtcttgtctgcatggcttcgccacgttaacatcagctgcgggagtcgccagtccacaaacgggagcattcagctgtggatcgctcccgtgggtggcttaaaaaagcaatttgtgtagttctcgaacaagagaaagatgccagattatctaccttcccttgtatcaatgatacacacttgaacacatgtaccctgccgatgtagcctctgtcgtcgtccctggttcccatgaagcgccccagataccttttggacacgacacagcatgtcaacaaccgtcgaccagagcagatgccaacgctcaccatatgtagtgtattgtggggactgctgtttcgttttatgacagatatcccttgacgacaaaatgccgagacaccgagagttgtcacgaatgctgagtgtttgtgagggggctgagccaacaagatgtaccacaaggaatcattttgttcggaacgatggttcaccatctgctgtactacgtgagctggcttacggatgtccggtgacactttctctcccagccgcctttcgaatggtgtgaatgtgtgcactgggactctaacgttgatggccatggattcagtgttcgcgcctatgtggcgcttatttgcgattcggccttccagcgtcaacctcagattcgagttctgcatacccgaatctcagattgccattcttcaacacttcatgactcagagtgcatccgtagatggtttatcacttggatgaacttcttcccaattcaggatgcactctgtagacctcactgccgcttcaccataacgaatcattcgactaatcaaaaaaactacgtgcacgtgtcaatgtatcatggcgacaaaacaggaaaaactcgtgcgatcgaagccgtgcagtacggtgcctcgccaaagcgctacacaagcaactgaagtttctatctgcgaaccgttttagatcggttggtccagactatcagaactaatcttgattaattttgccaaagaacacgaggttgaactgtgggatagtgtcagtgcccacgatagagcaccgggttggatacccagggaattgtgcattcattgattagaatcatagttcaatatcttacgcatgcagtaccaatcagaccacagctgaatctatacgccgtcttccacactgtaaaaagtggaacatcgctaggctgttattcagtcactcaccaacactttggtagagacaccccgatgcagagcctgatgacggttgcgagtgcgacattaaggaaatgccgcttcacaggcgagatctaacccttcatgttatcacttccctgaaaacgtacaaatctctcacactagaaccatagaaaaaaatcaaagcagaaagaaactggtcctctgaaaggcccacggggcgctctgagagcaaccgcgacgaagggggaccgggcgggagtgacagttccttttgaaaacggttggcaaaagcctgcttctcccattaattggtaagcacggaagccgcacatcaactttttcaattgggtgtctaccattaaaaaccagaacatcctttagtttccgcctatcatggtgctttaatacgagacatcaaactagacagctggccgacgagctactcgcgctaggcattgacactttgagaaaagttggtgctatttccaccgtggttctgtttccaagcaaaactattgaaatccaagtgttgaagattttctgtctgagaaaattttgaatcgtgcttctctgtcagatccctgcattcaacgcctgctgtgctaggtcgacacctcgcgctgcgtagcaatgctaggacgctagttgttggtcgcgtttctgttccttgcgaatttgtgtgagtctcgctctgtccgacagagcgcacagaaaaatccccgatttaacagtgttctgcagccacgaatccccagtcgttgagggagactactggaaagaaggcctaccggtgacgagaaacagccttccgtcagtaaggtcactatggagtagacagttgccgactttgtgtgtgatccttgaacaaagggagtttgtagtatcctgtaaaccgagagaaagcgtatgataccttacagagagagtgtgttacccttcaatccgcgaaagtgtgtcttgtcgtttaacccccgatgatgcgtattatcttttgaaccgagagtgcgtattattacaa

SEQ ID NO: 3151 - DNA, 1523 bp, Toxoplasma gondii
  source 1..1523: mol_type = genomic DNA
gagtagatccggtgttttgggtttgaaaacagcgaacgagagtttttcttatcgtttttttaaaacgctctcgcctgtcgtcagcgacgccgttggtacgcttttttttgagtcgattgtgtcttcggagtggaaagcaaggggaagcaagagggaaacgcgtcgccatcccccccccgtcaccgagacagactgccagccagtgcaccctttccgtgaaggtttttctgcctcttcagacggtccttctgtacgatcaaatgaagcgttctcgtccacacagtcacacggcttccgtgaactcatgtatctttttgaggaactcgacaaccggagtgctccacatcgcgaaagggccgcggatgtgttgagtcacaatgaagttaagaagagtgccagttcctctccgtatcgcgggttttcatcccgttggactgtttcgtcgaatggagtaaaacagtgccacaaggagtcttgtgttgcgtgaatgctgcagtggttgaaggtttctcgaaaaaggcttcgacgcaatccagtcccgctagcactgcggtcccgcctttctctcggaaagcatgcgggagcggagaaacgcagaattctacttcgtttgcgagttcactcttcaattcagtctgcagagagtttcgccgctcctcctgcgctccacggtgtgtctcggtgtttgccactgccgactcgcaacgcagcgttcgagacagtgcgcggttgaaggcagtttctcggttcctttcttttggctcgtttcaacgagagagacagggagttccacaccgagcgagagaggagcgctgacaaatggaaaaaacctctttccgcgggagagctatggaagtcgagaaagtccactgctctacggaacttgtctctcagctagccctctcgctgtgcgagactcgccgtggtcgagcgtcctgcacagaggagagacgcggcgctcttgcagcgagaaacgtacgaagttcgccaggccgcggaaaaaaacgtttggagagccgcgaagcgtttttccaattagaaaaagtgcgttttgtgcctggcgcccctgttgagcctgaagacgaaatcgtgtgaggaggaggcggtgccggaagaatagcaaaatctgcgggggaaaaagagaaaaaccactgaagggaaaagagaaacactgctgagaaaggggaaaggcatttctcaaatgtgcaaagggtgccgtcacaagtctcaacaacgagtccttttttgcatgcaccgccaaccaggcactttttcctctcgggtcttgtcgcttgttcagctctagcgttctttcgagttgaagaagactgaagcttctgtcgagactttgttttctgcatgcgtggaggagaagaaagacctgagagaaaaatccagaggcgggcaaagagcgagaacgggaggccacagctggtacctcccatgtctccaagaaggtgtgtgccgtttcagcggttgtgcgcccagagagggagatttgttcttccttttcgtctctcaga

SEQ ID NO: 3152 - DNA, 2405 bp, Toxoplasma gondii
  source 1..2405: mol_type = genomic DNA
cactcgactgatctgaagaagacacctcagcggcggttcctgagggtccgtcgtgacatgagagctgacccatcttgccaaacagcagcaagccatcaaagtagtggtgctgccgtccacgagattaagacaactgccgcaccaaaccacaacactctaaatacagtagcaatgccaaaggaaaggcaaacaacggcaacacaggtggtccgttctcccaccggcgaatgtgcagcagaagcgcacaaatccacccggatgacgggaagacgaaatggaggggtgactataccaagaatggagatcagcggtacatacacgttgctgcatttgaaaaaaaagggagaacgcttgaaaaacaggggagtttcaccatagaagatgcacgagatgacggaatcggcacaggacaaatagacactctcgcagtgtatgtacacctcacaatacgcctgttttgctgacgctagctccacaaacagccgccgccggcactgtcagccctctagagtcacttaagagggacgtggaaattgatacagaatcccgatgcttttgctcataatgggagacataaaacagggcacccaatgacggaaaaaagtagggggtagtggcatgtaatgacaaagtccggaaaaaaaacgacagttcaagggttgcaactccgatccttcctcataaaaaggggtgcaggtttttcaaatatgatcgaggaaaacaacagatgtaacggtgggaaacaagaccaggtgagcgtcgactacacgaactcgccgatttcctaattttttgtaaccgcgtccgcgaagaaggggaatggttcggaacaggtaggaaaggtggttagaaacgattatcagagcacccgtaaagaagtggagaagacaaaacaaagactatagcagagaaataagagaagacgaatacgacggagctaaagaatcaagaaaaaacagtctgaatgccttgctctcctggccttgattgaggcaccgctacattcgtggtcccgcacggagcgctccgggaaaccggacgcagcaggtcgaattccatccctgacttagaaataggaaacccttcgtcttccaaagtaaaggcatggagactctggaattttacaggcgaaatgaacagcggtccctgttatcctgaaccgtcgcacgagatgcgagacgccggacggtgaccccacccctcgggaagtcccgtagaaaaagcggcatcaaacgagggagctactgcaaacgaagttcctatggctagcaggaaagtaaacggaagagtaaaagatggcagagagaagcaaaagtcaccaaaagatcacgtgccgtccgcatcactgagaggttgtcgcgccccccaactgagcacgagcacgtcagccgcccagtcaggcgagatctggaagccgatggaagggaaacaggtagcggaacaggcctgaactaagaacgataagaacgccagacagtgcatctttctgcttttcttccaccttcgtgaaagttcattccgactcctagccaaagtcgtcgctttcctggaaaacctaagcatataagatcgactacagacggacctgccttgccgcgcctgcttcagactcgacgcgttctcttgctgcttgcaaatgtgcgagaaacgtgttccggctgaggagaaacaccgagacaggctggagaaaaaaaacacagaggtccagaacaagaagattgttcggactgagaagcagaaatctaccaggtcaccccgtttcggatttgcagtctctcctcattttcagcgaacccggacacaatacgctgctcgagtgagcgtcaagagcgtcagccgtttctccctgtgctgtccgcggaagtcttctcccaagcatgcacggagaaatccagcgcctgatgacgggggcaacagtgaaaaaaggcgaactggtgtaagagagggggcggactccaggactaaatattctcgaaacaaggaacagtatctcggtagaagccgtcacgaaggaggatttgagcatcggagccagacactccttgcctaaagtggaagggaaatcaggccttgcagtgtgcagtcgcagtgttcccaaattcaactcattctttcccggattttgcctgttaggatctcgttgtttgctttctgtgcactcgctgtcagcatcttccctccctttcctgctgccaccaaacactcgccactctgcatcctccctgtctcgttcctgcctccgtctctgtcgttacggcgacagtcgtttctcattttgagcgaaaatctccgattccacccctttcttttcgttgttttgtcgttcgtttccaaattctcaagggtccgctgactgttttaacgctaccgcttttgcgtgtttccttcgtcttttccccccatca

SEQ ID NO: 3153 - DNA, 1501 bp, Toxoplasma gondii
  source 1..1501: mol_type = genomic DNA
gactgtcagagcgacttcccggaattcttgaggctccatcgccctctcgtcgcgccgcaccgtggtcgttcgcgctttgctccctcgggacaattctgcacggcgacaagctgcgtttttctgaaggcttcgatgcgatttctttttctccacacaccttcgcatccgattccctcacatcgtcacgtccgggagatctctccgcgtctcgagctcccttctgcttcttcttcttcgacggagttttgtcgaaccgcaacccggccagcattgtggcgaaagcgtagcgtcgagggctaacgtcgcaatgtgtcagaaggcgctgtgaaaaactacgcaaatgcttaggtgtttccaagtctgcagaggaaaactgttagacgtctcgaccggcgagggattcatgcgatgcaagtgccgcaggagagaggcagtgcgtcaggcggcgacggacatccagaaagagcatggctcggcaacaccgtgtccctgccctcttcacttgccatttcaggactggacaaggaaaaggaagcaatggtggtaaactggaaaactcgcgacgcaaactcggtcggtttacactaaaccttgtaccggcgcttgagcagcaggtcacaagtaaggagcgccagggctcaggagctgcaagtacggtcgggaagacggcgaagttgcaaacaaccggcaatcctacatgcggttaaagatgttcagacgagcttgcctcaccttcggtgaagaaacgcagcaaacctgggttcctggcggtttcggtccgtctgtgagacgcaccgcgttgaaagaaagacaaacaaattccatccaggcgcggcacgcgccggtttcactgaaagaaggtgacaagaaacgacacgacttggtctttttctacggaataacaagggaacttctgaaggcttgtcaatactacggagaagcgcgtttttgcatgcatgcatgcatcgctgagtcgctctcacggagaaagtctgaccgggaatcaatcttgaaaacgtctaacaggggagcgtatcttgctgaaaatcagaatgaagtttcgtttaaatgtccgtgtgagaacatctatagtagcgtcaaggaacaccaaaaggacagttccttttttcctcagctgcatttgccagaagtaacggggagtaacgaaataccactgtgcatgaacgggtactactaagagcgaacgtccgttgtaaacgcagcgggagcgcggtaaaaatcgtactttccagggcggtgttttccaccaaacagatttctctcttctctgtttccccattctttccgtcttctgtctcgtggcgtcatcacttttgtttgcgcccttctgtgtgggcagcggaacgcagcaactgaatatagtccttgcaagatacccaacgtttacgttgcaaaacaaaggtgtttgtcaccccagtttgccaaggagatcaaggcaagattttcctttacagtccgtctacgttttcgcgttcttata

SEQ ID NO: 3154 - DNA, 1243 bp, Toxoplasma gondii
  source 1..1243: mol_type = genomic DNA
atgaagagaaggaacaggaagaggaccaagactggaagagacgaaaccgagaaggaaacgggtgacgcgaggagcgggaagcgcgcgcaggtcgcttcaggcctctccccgaagccgtcaggtgtacattcttctgagggaaggcgaggccttgactggaataagatcggcgctggctgacatgccgagggtggacgcctgaggctggcaaagcaaacccaacgcgggtctgctggagaaggcagagagcaggaagagaactcacacgaggggcgcggacgacgccgaaacagaggaaaaggctgatctggaaaacgggtggaggacgaactggtagaacgcttcgacaaagcgcgggccggcgaagagatgcagctacatgttgacagtgtgccttgcggttcagatgagagagagtcagagcacgctgcaatggggacagctgtcgcagttgaagaagaggacgaagatggagaagaggaaaactcagatgacgagaaagttgcaggtgagaaaacacatgagcagacagcgcgagttcccgctacccgcgaaagaaaccgcttgcctgctgccattgcatgcgagaagccaaaagaaaagctacgttccctacggtgcatgcgttttgacaaactcctcagattcaaagtcacgagcggccacagccctgagtttgtacacctgctgaacaaccgagcaggcgctgttcgagacctttgctcgcagtggatacggaaaacgactgcggatggcagaaaacggtggtggggattcacaatggaagtcaaatgcgcttgatgtggctaagaacaaaggtcctggcggacaggatctgagaccctactgtagtgtcagacaccacaggacacgcgcaagtcgagcggttccggttggagtgagagggtcttctttgcaacatctggaacatgaaaagcgacgaaacgaggagatccagggaacagaccgacggaaaactgttattccaggttattggctagacacgaaaccgcttctctgcaagccaggctctcctgtcaggagcagcgcactggaaaagaacgccatatcgcgagacggccgaacagcttttcacggcccgatttgtggcggtggaatcggaagcaagtggagaacccagaatctcgggaacgcagaaaactaccgcctggagaaattggcccagaaactcgctcgaagaatcagctcgtgcagacgttcctgcgttttcaggaatcggcga

SEQ ID NO: 3155 - DNA, 2862 bp, Toxoplasma gondii
  source 1..2862: mol_type = genomic DNA
tcgttctggatttcgatttgacccttgacgatcttggtggcgatgccgagcgcctggaagaaggaggtgctgccagggtccatgcccgtcggacccgcggggatgaagacgtcgataggcgcgaagacaccctggcgtgcgggggccgggaccttgttttccgcgacgattctgcggacttctgcggggtcttcgatgcagaagatgaagccgacgttcagccggacgagaggcaggagcttttccagctgcggcatctcgctcatcttctgcttgagcgcagttcgaatcatcgtgttcttccccatgagcaccacggccttgccgcgcagagccagacggatgtcggccatctgcttgctgccgacgtggtctgcctcgacgacgaggacgcgcgggtacttctcgaggagcgcgaacagacgcgagaagtacgtcttgcgcttgtcagactttcccttgggacccgccatggtgacaacgaaaagggagagaaaagggagcagaaaggtgctggaacggagggcaaaaaagccgtggaacgagcaggaaaacgcagagacaccgaggggaagctgtggagactgtcagtgcgacgaggcctgccaatcactttaacctgcacgcaaaaaacaagaagagagagcgatgaagcctttcgacgtgaaacgagaagtggtgagcggaaaggatgacgcgcggccatccgcaaagaacacataggcacacacggattcccggtgtcgttagaaacacagagaaacctctcctcctcggtgggggggagaaacgaacgaggtcttcaaccgatacgacaggacaaccagcgttctcctctccaaaacttcacttttttgtcagactcctgtgttcagcgaggagatagagaatgccaaaaactcagcaacaggcgactcccattcgaccctgaagaaaccgcctggaaagactcggagtgcctcgcataaagagaggctccacagagtacacctcctctctactccgtttttctttcgcttcttcccgctgcagaatgaagtcgatgaacacatacagcgaagacgagggaaagacttaagaggcgtggtgtcagctgcgcgaggcagcaaagagaggagcgtctctactgagaaacgcgctatctcgatttttacttcattgaagcgttgaagacgtgagcaataccacagaccaccagctaccagtgacttcgaacgaagtcccagacggctgaaggtagattcttctcccggacgagctgtgtctgtctcctcgggaggctatcatgtacgcgggaggcgcagccgcaaggaaacaacgcgctgtcactgcagcttcagaagtgggtttccagcgattaatacgaaggaaaaggactaaagacctctgaacttggctggagatgagacagtctgtgtctgctggtaaggatgtctcttctctcgcggcgctcgactcttccccacagccgaggcgccgcgcgcggaaccgggagggtgtgatgtgcacaaaagcagagtttccctccttttctgccctgaaagaagaaccagagaaagccagacttaccacaagcttcgaggaattcaacacccggaaaacaaaccagaaataatggataaaagacgcgggaacactcgcagggtcgacccgctgagtacatgcgcgtactctgtacatacatacacccgagaaaacatgcactgctccctcacgcggtgaggcgcccccgggttttctacacccgtccggctcctcaatctccgactataagccgatccaaatacagagcggtatttttcttgggtgccgtgaatgcatgtagaatgctaaagcctacagtgtgagacgctctgtacgttgtcgcctcctcctatttctcgaaaaacggcctgtggagaggggcgagcagaaaccccgggagagctggaagcgaaaaacggagtctcagcgtcgattccccgcagtttctgcctttctggtacccggaactcgggtgtacatacacctgaagactcgctgttccgcacattgtgttctggcgtcgtgaacgcagctggggcagcttttcttgtgcttcgttctcgcttttcgaggactttttttcacgaactggcgaagccctttttcgcggcttcgcggaggggacgaaatgcgtgtctccgcgtcgttctttccgtggtgagaggagcgtgacggcggcaaagagtgaagaagactgcgcgagagccgacggagacagggaggggaggatctttcagatgtctcagtttttttcccgtcctccggtgcctgcccccagagcgagaaccgcgttctctggcgcatgcatgacaaaaccaatagtttttccacgttgctggtctctcttctttcctgtcattgcgcgttcgtcttttctccgtgctttcttcctggtactgcgcgttcgcttcggctactaaatcagtttcttcggtcggtcgcctctctcgttgtcctcgctcctgcctcgtcgagtctttcgtcttcagagttctgtcttctctcttcgtaaagattgtcgtcttttcccttctttttgtgccagtttccctctgctttctgcctcttcgtctctcgccgcctctcttgctgcagcaccctcttgtgtgcccatctcttcggagcgtagctcttttcgccgtcttcgatctctgctgatccacccattcgtcctttctgtctcttccgtctcctcgaccttcctctcttcgcctcctgtgccgccttccttttctgtccctgttctccgcccaactgtctcacatcgccgcctcgcggctgtttcgtccgcctcgtccgtggcttgtcgtttcgtagtcttgtcgccatccaccagca

SEQ ID NO: 3156 - DNA, 2476 bp, Toxoplasma gondii
  source 1..2476: mol_type = genomic DNA
gtacattctgaccgtgcttcacgccgttcatctgggtgcagagaaaaagtcactacggaggcggcgaccgatgtgaagcagtttctcatcattgacgccgttgccttcttcggtgtggaattgccagtgcctctctgtcgtgacgcattatgccaaacactctcaatgtaaatctagcaccatcggaaatatcaggcgccgccaacatccgtcctcgtactgccaaagggacaaccacgatttcctttttcctcgtatcagtgaactcttctggtgtgatcctaagtatgcagtcagataaatatatacaaggaacttgacaagcattactcgatttatctaaacgacaaagatacatcatgagcaaggcaggcgacacctcagcagctctgttcccacgttcgaagatctctgctgacagtgcgattgcagtgtagcgcattcgacgttgtattccggtgcacacagaatcatgaacaatattaacaagaattgcgtgctcttgtgctaagtagcttattcgtggagaaagttgaaacctgaaacggggtgggaaaaacataaaggcactgctccaaatggtgcatctgcgtacagtggccacgaagctttattttctgagacgagtcgtttcttcacctacaccattacggtctcttgcttgcgccttatccacgcgcatttttccgtacacgtacagatctacaaagttaaccgtgaaggtatttagagcattgtgctaccttgctgttagcgtacttggagcggagagtgactgcttcagaactaccgactacctcaagtccgtttcatgtaaagctgaagagccatgatcagtctgatgtgatcaagatacacggtcctgttcccctctgcatgctcattcatgttctttctggtgggtaactgccctgccaatttcccggtgtggggtcatagggttctgtcagacgaaagattgaggcttgtatctcgtcgtctctgaaacggattgttttgttttgtctgtgtacacagatcaagcgtcgaactgtgtccttgttgaaggcttgtgaggcaaagggaaaagacgggcccctctctgtcttgcactactcgggaatgctccgcgaaatatcgaagcccctatgtggcgtatgcttcctgagggtttgttcgtccgatcattcctggggcatacatggcatgacattagcgacatattcaacctacagtcgagaggttctaatcgcggacagtccagtttttcacatctgtcggaagagagattgctatttctgttgtctagcgtgtgttccacgacccgcgagtctctgtcattcgcctcaaaggcaaacatcttggaaaatgcttccgagtgccttacaaatttcttgcgggcctcaatattgcaaaagaaagttccgatcccaggaaataactggcgccactccagcgtcattcctcgatccgctttcgggttttccaaggtcagtgcgatgccccgtgcgctccctgggtgcgtgctagcggttttcacaccggcgctagcgcgagaccgaactctcgcgcagcggcctctcgaacccgtttcttgaccagagtaaattgcaaattttaaaggcgggaaaagttggtcagtgacaagtgcaaaaggacgattttcggtgtctgtacagaaacgctgctgtgcttgcgtcgttaacgtgaagaagggctgatgtctcatacctccttggatactcgtgtctgcgctcgcgccatcatttactgcacccagcagtgcaccgagacaaactcgaaggacttcgggactggtgttcttcacagacccacactcgaaagttcaagacgacgaccagctgaagaatttctcgtcttttttgagagtagggtggaagttcctgtgtggcggaatacagctcaaatgaatcaatcgactgtgcaggcctgctgctggcgaccgtctgtgtttcgacaaggtcacggctggccagccggtttgacaacattggttggagggatgcacggtttttcatcatgacgttgaaacgcttgatgtctgcgcataaaaaacacgagccttgagtgagattcaaggctctgttgccccgttcgtgacaagctgcccctgtggaacgataatcgagtccgtccttcggattccgcgctgaatcgagagctatcgacagcgcaggaaactgacaagaatcgcggcaacataccgcacggctcaaaattccgtttttgattagtactcaaatttcgttcaagcgctactgcgtgttcacccgcattccggttgtcaaataccgtgtcagttatgggtagcgcaacagctgcgcccgagtcgcgttccataggttaattcgtcctgtgccggccaaccaccctgcatctatcgtttaatctgtttcgtaccgtcacatcgtgttacgctcacttcctgcgtatcgtcaacggaacgcatccctctacacgtagccgcgtccaacca

SEQ ID NO: 3157 - DNA, 3283 bp, Toxoplasma gondii
  source 1..3283: mol_type = genomic DNA
agaagagttttccagcgttcagctcgacttcagaagggtcttcttcactccttcggcgttaaacgtcgagtagaaggtgcagcgcagggtggcagttcagagtttgacattcggaacgacagcgctggtttttttgactggagggagtctccgacgttgtgtttgtcaactcgacccgcacaacggagtcgcaagaagcaatctccctttgcagtgaaaactccccaaaaatgctagaaaggcttgctcgtgttagtcaacagtaaagagataagtgaactttctgtgagcagaggaccgatctgaggacggaatcgcgaattcgcaacagcgaaagatccacgcgggagacgattcgcggcttctctctcttacctgcacgggtccggcactccgaacaagagttttttccagcaaccagtccccagagaagacggttgaaatggtttccagaatctcttctttcaggaacccccatgggaccgatccgagtcacgtttgcgttcgagacttgtgcgtccgtttgtggcattccacgtttggtggcgggtctgccgagtctggacgcaccctgccgtcgcgagagatgcggaacggattcttctgcagcaggagtaactgtcttcgccgcggtctgttaccgggctcgtcttcgcttcatcgagaagtggagctccacggtcctgttgccacacgcgtcagggcgtcttcgctagagtgtcgcaacaaagctgggggctggcacaacttccgaacgcccaggagagaatggcactggagacaggccgcatcccccgaagaaacggcgaccaaggccggctcgttggactgcgaaggatcctttaaaagacgcgtcgaacccacccaagagtcgctgaaagatccagcgaacatttctacaaccagcatttcaagctgtccaaataccatgaaattcccttcagtctgtacggagtagacgccgatgtaaaaaaccagtcttgagaacacgcccgtcgtcacggaaaaaaacatcacgatttagatcggttgatacagaatgtcagcctggtcgtaaagtaggcgagggccaacaggtcagatggaattgcgagacctagtcctcagaggctgttcccgcttctgaagtcgactcattcctcggttcgtttccaagcagagcatggaaaacacaaaggaacctgggtcaaatccagcagaaaagtccatctcgcactttcaaggtccccgatctacgtcttccatctgacttctataacggataggaggcaactaaaggcggggtatctgtgtgcctgagggttgagaagaaatggaaaggaaagacgcgtgcagagactgggggatccggtgagggacttggtcacggtataatttccttgccggttttcatcttagtcacgtttcttgccgggcgattcctcggccaccaaacgtacacctctctaatctgaatgccgtcgctctatctatctgtacacgctcattccacgcgcacctattatatttgtatacatgcatgttattgaaggtctgtttatacctgcaagtacacacttcagatgtgtgtgtcgctgcttccttgaaatcgagtgttcttcagacacacagtaccaaacaagacagagtaacagcccttgtgatttccaggaacgcagcaatgtttcgacgctgacatagacactcttgcggggtgtgtgggttcgcgaaaccttgccgcacccttctctctgtgggttaggtcatctctgccgtctacactgagttccccacgcgtatcaatgggagctctaccagacgcgaatccagagaaagaaggctacgagctcagctggaaagcaactttaccgtggtttattcttgcttgttttcgctgccactacgaggaaactggatgtcgagcgttctttgactgtgggttttgtggcgtacgtgtgtctctatgcgccgctcgacttctcccccttccccccctgcgtttcctttgtttgaacagctgctgttctacaaacattatagggacacctgagtcgcggttcctccacagacagatgcggtgggcgcctctcgattgtggctccttcttcttcaacagaggaaaggtacccggcgccgttcgttcctgctgagtgtacatgcacatctccaggtgcatgaagcacttttcctctgctggaacacttctgcctttgtcagtttctcttcctcctcttgggctgcctccgccgttcgcctcgctcttcgcggcgaatgctgctctctcgcggtctggactgacctggtgctcactgtggagtcgaaggactcagggaacggcgtttttcgaggtgtgttccttttttgacggaatatcttgcgtctagtcggacacaacgctcgcgcgcgcacagcatgtgtttactcccagcacacccatcgtgttctcgtgctgttttctctatatgggtccattcgacgcggagacataggagagtcaaacgcgattctgaaagcgacgcaagcgtcgacatccagcggcagtcctcgtgttggtgttggggattctcagcacggtttttgaagacgcgtctttccccctttttcctcttgtctcaccgcaagactgaaatggggacttctccgccgcgctggtccacggcggaaacgacgctttcaaaaaggcgaagagtgaaccgcggcggatttttctgcactgagttctggaacctaaaggcgtcaccgggtagaagctggtggattttctgaccaactgtttcctcgttcctctcacgcgcgtcccgtctgtctaggcgtctcgctccatatttgcccggacgctcgggcaggaacgcgtgtttttgaatttctctcatttctcagagacggcctaaacgccctcacctcgtcactagacgcgagcaggctctgtggtttgcaggtatcttcctgctttggtgcgtcttatttttttggggtgtcggtgtctcgttccggaatgtcgagaaaagatgtccgggtgtttctgagcccccaaaacgcggacactggtgtgtattgttgaacagcgcgtcttcggttacaggcgtttgcagaaaagccgcgaaaagactcggactctttcgctgtctctcgcgtgcctggcgaggaggtttttgagtttttctgtctcagaactcaggctgcagtttgcgtttttcctcctagctgtctcgcgcgcgctgcggtttccccaccggaccgtcatcagaattagagaactcgactttctcgacttttgcgacgcgtgcatcctgcgctctctcga

SEQ ID NO: 3158 - DNA, 2026 bp, Toxoplasma gondii
  source 1..2026: mol_type = genomic DNA
agggaatcttcaattccgcctttgatttactcagaaaggtgaagaacattgagatggacagggaacgcaaagcccagcggcgcaagcagcgaagagcaaacgagaggggagaagcagactcagacgaatcaaatatggagaatgacgcaaagagcagtcaatcaggagaagacgaagaaggtaattctgacgcaggctccaaggaagatggaagtggcaacacttccgatgaggaaggtggcgaagatgggcgaggaaacgattctgatgaatagcagggaaacgtgcatctgcaacagacttagtcattgagtgagcactgcggttttctttagtgggagaattttagatgaaagacgatgttttagtcgggtcagtcggtctgtgttccccaatgactttcgccaacctcttctatgatccgctttcttttaaatttaacggacagattttttactgatggcgcacacatagtggtgtccagagccctgccgttcttggtattcgcgaatctccgggaggtagtgctattccacaagcatgcatcttttatggtagattagttactatcttgtaacttactaccggattggttctatgcttatactaaactgcatctggtaatgtatgctacagttcgccacgcagacggaaaaaaatagtaacaaatagacaggcaaacacctcagcgtcgaaacaattcatacaagccggcaaaaattttcatgtgtccgcagcagctctggcatgagatggtaacatcacgcttcgacaatcatgctccatttgccaatctatccatcgtctatctaagatctcctgccaccgtgaggttactgacagtgatcgccgtacacatgagcgatttcttagtcaatgtcgcgatatacgtcttggaaagacgttaactatttcgtaggcattccctctgtttagcaccgatcactacgccagcggggtagtaaatacaaagaagcttaatcgaatgtgattgcggatgaatcgcttctatatttctttgttcgtatcgactttcctaatgcatctatgcctgaagtcgtgcgttaccatcttcgggcggcagcagcatatcgatggcacagattagtacgacacaagtgtgcatcgttttctcctgcctgagcgtcatcacctcagtttcgggttaacagatctcggttcccgacgcgaatctgcatactttcctcagttttgatggtagcaggatggcgttctaccgccacttcacgcgtagccccctaactcaggctggtgacttccgtgagcaggccagtcgtgaaaaaatcttgttcccagaagttttgctttgtacgtaaaagtgaatagtctccacgctttcgctggtccaggatgcgaccaacacgagagtaggttccacaccgcgtcatttcaagacggccgggtagaagtgttgaccattttaaaaaacgacttcccccgtctcttcaccttcaaagaaacagaaaacttcatgagattatcgttatgtggactctcggtgtggacagccggcttgatcctcgtcgttgggttgctgcttctacaaaaagcagctttgtgtgcagcagctacgcagaagcggggcgcatgcagtagagggcaagcagggcttcgactcctgtaactattcgcatgattttcgcacgtcagccgagaaaacgcaaggtcaagacatcactgtggactcatgccaagccgcaaacacaattactgaagtgaagaaggcatatttgaatgcgtacgggaattggcaacgtgcgccctgtactagggaagggtctttggccgtcgtccatcttcttgaggacggtgcagaatgtgtctgtcttgtttcacacagtcgcgttgtgaagaacttctaaaataatgcgtatatgctagggtaaagatctgttcctccatctgaaaggaggattcgttaactgccgcctaccttgtgcctgtgctcctcaatgccgctgtgccaaccactttctttacgattctgaaagcatctcaaacacga

SEQ ID NO: 3159 - DNA, 1859 bp, Toxoplasma gondii
  source 1..1859: mol_type = genomic DNA
gaggtttcgagagtcggtcgcctccgacatttcgtcgttcctctcttggcggaggttcgcgcggacgaggaagggcgtcagaactcggctgagcaaaatcaacaagagatgaaggagagaaaggaccaagaatgacgtcagagtgcctcgtttttccgatgaaaatcgtttgccacatgaaacttcacttgttcatacagctgtgctgcggcaactgcactcacagtcaaaaactctccaagatcgctctgtcaccgtcaacttactgtggagtggctgaggcgaccattttcttgcattttattccagcaagaaaacgctttctctctatctgttgggtcgcccacggaagaagcgctcgttccgtttctgaaaatagggaaaaaagccctagaattccttcactcattgaacagcctctggtgaagagcctcgcgaacacgaaacctcttgtcgccttcgttcttgggcgaaaggaatggtggtcctgcttttagcaagttgtctgcatgcagttctcgattgttcagcctccgaaaaagcctttggggtgtacagacagcaggaatgagcctcagttggagctgttttttcttcgcactgagcctgcatctctttcgccgcgggtcttcttctaccgcatctagcgctttctccgtttctgtgcacttttccttttctcttcaatgaagtcgaaatactccacacgctaagtctccagatttcctctgtttaccgagaactggctggtccatttctccaaggagactgggtgtccgagaacatcgggtctcttcaccgaagacgaaaatctcaaacttgttgactaccgctctctcgctgcgacgacgcgttctgcgtcgttctgctttcctcaccaacttctgccgcacgcaaaacaagacggatagttgtgaccacaacatcttactcaaaaatgcacactgcaacgcgctacaaaatgtatgcgtgtctgtgtctacacctagcatgtatagtggataaaactgtactttcgaagtcagaaaatatctatcaatctatatatatatatatatacgtatttatatatcgttcatatgtgtgtgtcgcagcgaatcggttcacttgtgcgtcttgaatctgctgtggccgcgcgccaatttgtaagttccccctctgcaactcccgatacaaaaatctctgcagaggggttgatgtttgtgtcaacgtagtttgagttcgagacaattttccaatttttttagcagagtgtcaactttgagggtggaacggcgatacgagggtgacttttccccgagtttcctgcgtttcacgctgagggcttgtgtctgcttgtgcgcccggcggctcttcttcgcctctcttgccgcgcgcatgcagtgcgtctgctcctctctcaggtctcgccgtttcttgctgcccatctgaacggtttcctttttttctggatgttctccgaagcgaaccgggtcgcactcgactcgagcgaaatccgcaacacgaaggcagcagagacgtttttcttttccccgttccaccctgacgctgcatgcaccctgtgcgtggtgttcgaacctcacgccgtttcggttccgcgcttcttcgtttttcctctcgctttccctgttctttctgttctgccgctcgcagctgtcaagcgccgtcttgcgcctttcctcgcggagaccaaggcgctgactcctctctgcagcaggcgcgaaagctctccggcgtcgctgctccgcgttcgcctgcgagtccccgtcgagcgcgccgtttctctggaggccccgcagcttctttgtctccgtagcttccggtccgcgtcgtcgcacagtcttcagtcgcgcggaaaa

SEQ ID NO: 3160 - DNA, 3809 bp, Toxoplasma gondii
  source 1..3809: mol_type = genomic DNA
ttttatgagacttctctctgtgctgccgcctcgatggaggaggacaacactttttttctccggcggaactgcggttcatccacgcagagacaccggctcttgggcggacgttgttttcgccgttttcgctggtttcccattcatttgtcgacaatgtgtttcgaccgcattcaccgataccatttgtgcatggagcaaagcgactaggcgcctccgcgtctccagagaaccttgtgtgtagtgatcgtgaacacagaggttcggtttccagctgtccgacatctgttgggtgactgacttcatgctgtgcaataatgcattcagcgacatagtgttggttcgctggtaacatctaagtccttcattgtggcggaaaatattcatatcgcgtcggcatgacacgtccagaacaaggtgcatacatgcagactgacacagaagaattttgcagatcgattccttgtcgacacacggcaggcactgcatacctcgagacgatggcactgagaagcgcctcttgggatcacggaaaagtcctagtggagatagaccgtctgcagactgtggtgttcccttcatgctacgcagacctgcgtcacaacgcttcaggaatactgttggcctgagtcgaagaccgtcactgtactggatatagagaggctgagcaaattatttgcgtgcataacagcctgacgatggtttattgcagtatatctgcggtcgctggtcagcccgacatttgtataggaaagtcctttatcaggctggaacgcttttcctgttttcgtcatccgtgaccggaccgggcagctgaacagggagtgaaagaattttatggcagattatccttcagatctacctaccttgtccacactgtcatgaaagccgacgtcgtcagcattttactagttcatatccgatcgcttggtagctgagggtttgaaatgtgtgcatttagactatacaacacagtttgccgtgttcgtccactctcaatactggaaacggatagtggtcggatttcatgtgtcattcgtacttgtaacacatcggaataaaatttagtcgattcatgctccaggacattatcggagctcttcaaaggggctggcccacacgctgcctcagccccacatgtggaagacgttcatttttcgagtatttcgttgaggcggaaagcgagtcccgcccacaccgcttgtcgaaaagaggcctgccggagttgtcatcgctatcgaggaactccgatatcgttgttatccgcccttattctcttcaccccactcaacacagctggagaggaggcaaaaatggaccttgcatcgaaagaaaaagcccttgaaaagcaaacgacacggcacgacgccattcgcgtagagaacattagaaaggagagacactatgcaaaggagtggctcaaacggtggggtttcctgactcaaggagagcagcgagaggatgctctacaggcattctgcaaaggtgaggaacaatttgcttcggtgttattcggaagcgtccccgcacgccaacagaggctcacctatcaaggatagaacttcctgaaaacacaagttcgaatgctcgaacatattctaccaacgtgtcatgcgttcatctccactgaatatcatgaacagttttataaaatcccgaccgaaatgtttgccggcgctactgactccatggtgagaataatttggcctgcacgcagtttacattgctccagaaaaacacggttttctttcactgactgtgagacatgtctatttgtgagcctcgtacaacctgctgcgtaattggggtacagaggggggacctgtggtgtgttcagaatcagtgtggcggttgtgtgcagtcgcgttcatccttgccgagtttcttgctcggattgtgggttatctcagagaccgtgtggggtacggtttggatgcgctttcgtttcaggacgttcttatgaggaaacaaagcgccagctttctgtaagtgtgggatctcttcagtcgcgtaaccgcttctggtcagcctaggggtggtcaatatcagatgtatgataccgcaaagaaggggatcttttgatgcacaataagagtcaattgttgactagaaagtgaaaattgcaaatgcactttgttttcgatgcggcagattgcatctattgatggcctgaagcttatgcccttgcaaaaagcaaaatcatctacgcgagatttgcactcgagtgattgctgtgcctcatcattcagaaaatcatgaaagacggagtcatgtacgacgcagagaagtgctttcacgatcccaatcagtggtaccgagatgtgaaagacataggaccacagaataaataccttcatccagcgacggcaagccaagaagtcggctggaggtaagccatgacctgcccgcgaaatgtacggggggaacggagacacgggtttagtacaattttgtatgcgtgaaacgcgaggaattaccctgtataggcatatccataacctgccttgaaatgcccagttcactagctggcagcctcccgccttttccctgtcgtactggatctcaggaccaatgaatcactcgagaagtttggtgtgaatcactacggttacaaaaagaagacggctgatattcagccggcaagactcaagaacgcacagccaaatgcatcgggattgtgacactgacatcctaatagtccaacagtgtgtaatatatccgttgcagcagtttagagtgactctcccgagtctgcggtgatccggtatgtttgttcgtttgaatcgtcgtttgtacgttacatcgtttgagggtagtcagtcgccggtgtttatatcgcagaattctacaggacagtgccattgacacagcaacgcgtccgtggtcaaattttgaacaaagttcgttttagaagttgtattgtttgaacttcctgtatgagctgccatggacagtccatatggggagtcttcatcatccgctttcgttcgctccactggcaacgaagctccaaacgaacagtgccgcgacgaatggacacgtgaaatcagatcccgcagcaacacagaaactcagcagcgtccttgggaataattgtttggtgcctccggctctgagaatacggattagtccatgacactagcaaaacaaattggatgaataccaccgttgtcttgtagactgcagcaggaatcaacctaaaggcagaaagctggaattcctaggtaaacatagtatttcagtcgatacggagaacttcaaaaaatgcgcgtctgttcgggtgcatgcgtgatcaactacagtcattcgcatcgccctttgtcccatgctgcacgtgggtatttatgtggcgatcgtaacctttgttaaagcggaaagcatattgatcgcaaccatttgtccatatgacacctctcctagtcgtgttgcatcatgtgaaatagaacaagtattcatttgagttcgcgtgtgttcaagctcatccgtgacgttcagtttccagcggctgtgccgcagagcagctcaggggaaaaacggcgggtttttacccaaggttgaatactgcgcaaacgcaccacttcatagaacggctttctcaacggcatgcgtgttagcctaagtaaaacggtgtcagagtattcaaagggtgtctagtttcgtgatgctcagaagtatgatgagtcggactaactctatcgcggaggtttctgacatagtgtacgagtaactaaatagatgaaacctgcgcttttggtcttgtcacgagagtgacgaagtgcgattccgccacaagccaatcaatgctgacacaa

SEQ ID NO: 3161 - DNA, 2770 bp, Toxoplasma gondii
  source 1..2770: mol_type = genomic DNA
ttgtcgtcacggcgcagacagtttgtgtgtggccattgtcggaaataccagatgtgtcaaaaccatgtgaccatgtgatctaccggatctactccatgtctcatggtaaactgcccgtcatgtcgcgcgctttacctgcagggactgtcaccacggcctctccacaggagggagttgaagcaaaggaagagcccccggcagccacaggtgtcccctctgccccctcatcaccagctagaagacgtgccttcttccgttcccgaggttagttttcagccttctatcttcagttgtgaagtacttttcttcgaaacataccgcagcgaagtgactcaaaaaggtaacacacccaaaactgcggacggcaggaatctcttgcaagccagaggtttccgcttaccaaggaatacgagactttctggtcactttagttttcatgtaagcgagtgcgctcttccatggtgatatgcgtcttccgcaacagcggggtggtggaagaagcacgctgctcatgaggggggcggggaaaaggcaccagacgaacacgaagcatttgccgtgtttgatgcctgtcatgttccttttcagggacaaggacgattactgtgaacgtgaggcacttctttcctaacggtgtgccaatcgtcgttgtacgccctcagcggcgtagttttctcttgaggcggttctgaaggatcccaataaaatgacacgtatttacgagtcggctattctgaatgcctaagtcaacaagaaggtgcagcaagaacctagaagagacgaacttcagttggaggggcaacatttttttccaccttcctcgtcccgccccggtgaaaaccagccttcagcagtgagctgccacgtcctgtgctgcagcgaaagcaaacgtaactgttgccgccaagcaatgtttttttttctcctgagtaatgcgtgttcatttctactgccccatcgtgctcattcacacaactcgaacactttgtgtgcccatttacaatcggcttcattttcttttaacttggacgacaggaacagacacagcatttcgacacgaagcgtgcctggctgcggctgccctcactgttgttcgcagtgggactacgaaaataaacagatttgcaacactcccatatgtcatgtcacatctttttggctcgatcgtctctccctcatctctccccgcatgtaggtgctttcgctaatagcatcagtgttttcgtgatagtgcagcttacttttcacttgttagcttcttcccaactgcctccaggaacgtgctaaatgtgagaaaggaaactgacataatagttttggaagacttgcggtctcacaagaactcaccttacgtgagcgtgtcagtatcttgaaatttcgccatcattggaaaattcgacacgacttccctgcggagctaactattccagagtcaggccgtagaggcgattaattcgcgattcgccatcaccaaatacgttggggtattacgtcgacaacaaacgagactgatccatctgatatgctggcaaatgctgctctattctaacccaaagcggatagtcagagacagcccatcaaatttccacaattttctgcagcgttggccgtatccgatgtgaagccgcaagccgggctgccataatgtcaactgaccaatttgcggcaaaaatagagaggtcagaggcgacagaatctctgttacaggatctggagccacagtgggatggttttttcctatcatcggaatgagagcttgtaatctgcatatcaaggtcactcaactctcgctttcttgcgacccgcaccgtgcgccaaaagccggcggtgggctgcgcattttcaggttttgttacaaagtcaatctccttatcattctcaggaaaccaacagagaggggtgacaacgttttaagaaaggggcccgtgctttgccatagtctggtccgggtcaagcccgaagcgtccgggctgagctcggtgtcgcctgtagacattctccgtggccggcctctgtgcagtggagacggttccttttgtttcaacctgttacgaatatttttgcttggtgatttccaaaaacagagtgtgacgtggtgtgcggcttgtgtctccgactcggccagatgggttccattagaagtctctgtgacggaacgcgtacgagactgtttcgttggaatcgttcctcgagtgcgagcagtccgatgttacggctcccacgaggcaacagaggggccaggcctccaactgttgccgtcccgacccaccaccccgtcctgctgatataaacgcgggaaaatgacgcattcacctatctacgtgtgagtcgcttagacaaaaagtggcctgcagcacaaagaacaaacggtgagtcgctttgctgtttcccactttcgtgctccactgggagtggtatgacgggttctgccccgtagcaatcgttcagtttcagcgctcccggcgtcagtgcctttctttcggaaaactttcttcacatcctgctgtccaaccactttgaagttctgcccagagagtgtcgaactatggggctgcggcggaatctttagccactgcgtggcgactccgctgttttcctcgcggtgagtgattgtatggtggagcttcgtaactcgtgaattcttgcgttcttcatttgttgtttccaacgcgctccactctgcaccttaccttcatgctcagcttttcctcttcgccttccatccgcttcttccttctgcgttagaaccggtgggcgccagaagctaaaa

SEQ ID NO: 3162 - DNA, 1668 bp, Toxoplasma gondii
  source 1..1668: mol_type = genomic DNA
attccatacgacagtctttatgatgagttacagaaagcggcgtacctgcactgtctcgatggctacggtagggacctcgcttatgaggattcgccgcaatgcattaggaatcgcggcatctacacccttcagctcaaagacgactcgttctggagagaccgacaggaacttcaaagaagttctctcacagaatttgtcaatcgagaacacatcgtcaacgtatgaagaactcaagaaggcacccgcgtatccaccgctgttggtgtgccgagggccctcagctgcacaaacaagacggttactatgcaacgggatagaggcggaaggtcgcccctcgtgccctggcagtgacatttaggattcgaggaagaaaacaagcgcctttgagcagcacacaacctcgcagcgagaagcttcaatcatccctttacacccggtgtcgatcgacgcgtgtcgggcatgactggcaaatggtatcaagagtgaaagaagatgatgggcatactgtgaatcacgctctaatgagtccagaattgatgcttagtaagaaccctgtcagtaacaccgcacattgaccacaacgaaacgagtggtacgctgcactgctgaggtcgcagtgactgaaagagtaagttttagacaacggcaagactggacaactttgcatgacggcgaaacttccagcttggcgggccaacctcaacaacagcaagctcttgcgcgcgaccgctgtccagatgtagccgggagtagggagggaagcactgacgaggaagaattgaaaacaacccgtcggtaacggggaaaagaattgaatgagtttgagaagtcttcagtctgatacaaattcgagcgtgctgaaaaagctcgttcccttgtctatctctttgctacgtaaccccacacaaaagtgctggggtgcatgcaaattcgcttatcgaggcatggagaatagttgcaacgtagagaagccggttccaacacaggatgcgcgcatgcgggaccacggccctacatcggaggtatccacgctctcgccttccgatgtttttgcgggtttgtgtaggtgatgcggacagggttccagttgagcatgtaaagtgtggttgagcctatttttatcaccacttttctgccgattcttggcattctctggttcaggcgcccacaccttcagcaacctccttattcacagtaaggcactccccagcatgagtcgttttaattttgtgggggctgttgttcgaatgttcagggtgacgctttcttcgatgttatcgagaaacttgtttgttttaagaagctgcgtttgtcgggggtgctttgcggtcgatagctgatgtgaaactgcaacaggcgtccgatgccctgctctgcgggtgggaccggtcgtcgttcattctctggcgcgccggcgggacagcgatcgcatgaaagccgttggttttgtctcggagagggacccaccatattaacgtataacagatgtagtaggctgcttttctttggagcgtggtggagaagcggcacaaacgtcccttgaaaacaggacggacgagagcgtggtgcttctgggaggcgataaacggtaattagttctcgccgtctataataaatggagaaaccatttctgttcaactctattcgtatgtgaatgttatttccaga

SEQ ID NO: 3163 - DNA, 5016 bp, Toxoplasma gondii
  source 1..5016: mol_type = genomic DNA
gacgaagtctcatggaaagatggtgaggctagagacctggagaatttggcatctggacacatacaagatctgtttgaagtactacaaactcgactttatacagactacagcatgtaagtgaattagcataatgaaacaaatggatcattgaggtttgcattttacagaagcatgctacacgagccttacgcctagcccaccgggaacttcctccccgcccagctttagctctggccaagtagctgtaaaaccaatatctgtggatgtaaaaactgcgactccttatatgaatatacgagtcacatgaatatgctggcattcaaaaaagtaaaaagtaatcagcaggtcgatatcctggtcagaatggcaaaaaacaaaacggtgaaatctgaaatctccacgtactcacaggtgttttgacgcacacaaaacactggtcttatagcaacgccggaactaccaaacgtctgaaagctctgtatagtgcacgtgggtagtaaaccgatttgtggttcgttccaaagcaagaacttttctgtagctacagcgacacgcatccctatgaaaagcttcatggaacacgtgaacccgctttagataaacacgttggcacatgaaaaccacaatacggagcaccgcatgcatacgcgcacacaatgaaccggcttcgcgtgagagcggtagccgactacggttttagttcgtgttaggctactgcgatatcgtacaattcggagtattttgtagtcaacaagcctcagtaagcattggacgcggcaaagctccatggcatatacaacggttaccctaaacgggcatcacaccctcttgcagcggtccctgtacactcactgattgaaagacaagcgacggaatgccacctggaaacagagccgtacagctgattctagtccaggtccgtttaaccgcacaaccaaggaccaacagaagaccacagactacttgcaccggattctgtcttcactggagtgtggttgctcgttcagaaaaatggatacctacgaaggtttcctatacgcctcgggaactcactcaattcacacacgtgaacctcccatcacgatgacgtcgatcagttgcatgcggtgggctggattcatcgcgtgtagcggcgttggtcgcgagcggaggtttgagctagttgcttgtttacccagcagcgccagtcgtagcttgattacctcggcgcatgggatttgcatgcgatgaaaaaacgaacgctggcaaaaaaggcagaccagcattaagtctagtacaacaaacagcaagccccgaggcagacaaggcggcggtaatgaacagacgatcctcccaacacttcagccccaattgttcgacagtagataccatgccactccgcatctatatgcatattttcgcagggacgaaaacgccgaggcgaaaatacacacaaaattccactctttaaattccgatgcaacagtcgtgccgccgatcgacagagaggccgtcttgcccttgtcacatggaaaacagaatcttcccgtccaaaaaagcgcgtgtgctctcttttctgtgcgatacatcctctcattcaacctgtattttttttccaatgcgagggtgttcccttgtgcgacaccgagcggtgctcatcacagccgtatcggggtgcgcgttatgcgcaccggtggataggaccatcggacagctaaggaaaccagcggcctgccttccctactgggttttccgcagcccacgaatcgcagagtggtgcggtgaggagacgcggtgtcctaaaacacagtctaccacggattagtcacgacggtcttacgcgatgtgtgcagatggtaagggttgaacgctgggtagcggaattgataccatgctccatttgatacagagtctgtggcgaactagcggaggtgtctgataggcatggcagatagcgtggaaacggatgttcactgacgatgttgcggcgagcatacggtgttactaagttgcagggtgctgtgtcagcgggcgttgaaatagtgaattcaagagttttcattaaaacatggcatggaagagcgaccggaggtcgacagttcgtcagggggcaaatttctaaagcgggaaaaaaagtggcggcatttctccatgaactcttagtcctcccgtttttgtcgttcgttgaacgagcaacacgaaggtgacccgcatcattttaggggttcactatcacgtggcgttttgctggaacgggcaccagcgagcgtgttctggctgtcgaagtcggatgcccgtcgacattgtactagagagtgtgcaagcgtgacgaatagtggcgtctcgccattgtatccgggcagcacacggggctttgttccgaggtgccacttgattcggttaagattcttcgtgtatgcatgttgtgtacggagctggaatatatttaaagtatttttccctgactcacccgcctgcacatacatgtgcctcggaaaagtgtattctacgagttgaggacgctgtcggaaacgatttttggcgtagaatggactcagcgactgataatggggaggaacattcgcatcgctgaatatcgttgtattatctagaaacgcacaggcacggcacacaaaagtgtttgggtatggcgactcattacgactcgctgcacaaagaaggtattcgaaaatatggatacccgttacgactccgttgatcatctgatcgagagcagacaacttcgacatttctaacacgacgcggtgttggtgtcttggtggcccgaagtacttctgaacgagccatcagcggtgccttccaatctgatgtattttctcgctcgtttttctacttgaaccgattcactgacccgccatatccgtcgtgtcatgtgagaaagagggtgccaaatttgcgggtggtgtcgaagtgatgtagtcgggtaacgtgagtgtgaattgcccctgtttcatagacacacggcgttgtaatgcagcaacattgtttggcgcaatgttgtggctccccttaagtctgcgccctatcaagaaagggagaggctagttacagattttgacactgtcaagcctcagctctaaactccacgacggtctttgggttttctcgctaggtgcagtatcggtaccacgtctctaacaagctggttgtatacaaaggcgttgcagatttaagtggtcctcgcgggagaatgataaaccacaaatggagactcgaaaagggtcatgccttgtcaccaaatcagtggtttctaatcgcgagccaaatgttctgatacgggagagtcaatagcttaatatgagccgggggaggccttcaatatcttctcaatgttgtcctcatgctcatgacaaaattgtagaataacaacccaaatgtttgcaaggacaacggcaaaccttggatcgatcgagtgggtaattgacactgactcggaagcgttgtctaaacggaggagaggcaatgaagggacgcacccagtctatttggtagggaaggaagaacgcttgacaacaaacgactgacggagcacacaacttacatgcatcatcaatgtcgactgattttgccgtgctgcaggggcacgctgctcgggtgaatcgcaatggagcatccccctaaagacatgagcggaaataatccttcacttagtagtaatacatgcaaccgctaagctcttgtgagccgccctcttattcaacgaagtacatgcttggcaattcctttttttaacacaactggtcagaacacacagcaagcacgcgctgcttactcactgcgcttagggcagcagaactaccggcgactgcatcgcattgtccattttgacttgtccgtttgttgttttaccaggaagacgaaatgacagacgattatccaagattgcttctcctgcctctcggcctctgctgctcactttgtggatgtggaccgcaggaactcccgctaaaggacatgtgcttcttgacaagccgcgtcgtgtctcgctttttgctcgcatgcgctcagtggctcggaccacgcctttaacctgttacggcttggcactttgagagccccacacacctctttctattaataatacggtctccatcagctttcgccattccccttcctttgtaatgaataccttgtcctttgcttccgctaatactctgtcgggaaagtccatgaagatacaacggttagcggtcgcaagtgaggcggtttcgaagagagagactcgttaaacggccgaaagcaacagtaaactttgtctggaaacggttgaaagcttggagctgtgttattgactctgtcagtagccgtatttttgtgcagggactgaaggcgtgcagcttttatgacaattagattcgaaacaagaggcgtaggaaagattgttgtgaaggcaaaacgggcctctctccgtctgcattcaccagtccacgaatatcccttatgtggcctacaatttctatcttgttgaggttatgtactacattggtgccctgcctgtccgtcacagcccatcggtgttccgaccttacagtctggtatcgttcgtatggcgcctttcagctccatgaaagccaacccatgtccatctatgttgtacttaggatccaccagtgttgagtttgcgtgctgctgtctgctgctcgctgtgcatccgcgtatctccatttattttctcgcttctacgtcggccggcctgcacgtcgcctgcgttttctgcgagccacgctgcatcagtgccctgggaaactgttcttccgaactccgtcggatggtttggcatatatgggtccttttgttattcgtccctctctgatttccgaaagagaccgggggatagcaaccatgatgtcgcgcgttcctttccactctcctctctttgtccttcttcaggcgctcatcgaagccagaaaaccctcgtagatgcctcatattgctcgcgtccttttcgttcctttgtagagagtggacgtggtctgtgcctttaattcagactgtcttctcgacaaaaggcattca

SEQ ID NO: 3164 - DNA, 2796 bp, Toxoplasma gondii
  source 1..2796: mol_type = genomic DNA
tggaaaaagtcgtcgatctctgcggcgacttccacgcctgtcggacccgctccaacgacaacgaagtgaagaagtttcttcttctcttcctcggagacgccggggacagaagctgtctcgatgacgtcgaacagcgcgcttcgcaggcgtcttgcgtcctccaactccttgacgaaaaacgcgttttccttcactccagggactccaaaagtgttcacatcggcacccgcggcgaccacgaggtagtcgtagctctcctcccattcgcgcgcgtcctgcgccttcccgtgagtcgactgacagcgaactttcttctctgtagggcagatctccgcgacgcggccttcgtagaaacttccgcagggcactccgccgcgaaccagcaactccctcacacccgtcatgcatgcactcgcaggcaaagtccccacacagacggacggcagcagcggtgtgaaggtgaagtagtcgcgcggagagatgacgacaggctcgtagcgagtcatgtccaggtccgcgaggaaggagacagctgcccagcctgaccccacaaccaccaccttctgtctcctcgcaggcgcctcgcgagcagccggagacgcagacgcgaccgcagaggcggcgaccgccgcgggagagaggaggcctgttcggaggcgaaagctggtccacttggtggacatccaggtggagacaggggagaaggcggagaacggacgcgggggctgagccagcagagcagacacgcgctctttcggagacgaaggagacgacggagacgctggagagtcgcagcgcgccggcaggctaagcataggcacagaggcccccgccagcagccgcagccactgccctgccatggtgtgcggggatccagagatctcttcagcagagaagagagagagcgaaaaacggggagagaagcgagaaaagagagaaaagaagaacgagacaggcgcgcgacgagatgggcgagtgcgtgagggcagacgaggagaggattgacggagtcgttcggagaagaaagccgcaacgaaccggtgggagggagagttcgagaagggaggtgggtaggagggaagagggactttccggcgagtcggcaaaaagaagcgactccaggaaactgagtcctttgacttcttcctggatacgtttggccaacaaagaaatgaaaaaattgaaggaaaggaaacgactctctgttcttgtcgcgctgccggaacctcgcgccttctgccacgacgggtgttctgtcttccctcctctctccagttcagaggaaaagagacatccgcagggaagcgaaaggcgaaaggcgaaagacgagagaaaaccacaagagaaatgaagacaaacagaagaaaagagccccccttgtgtaagcatatacctacaccagcgcgcgcgcgtatatatacgcggtgcggcaccacccggcctccttcttccggcgcgagccgtcttgttcgctcgctcttccttcgcctggctgccttcttctcgccctccctctttctgtacacttgagtggagaaaactggggggaagtagaggaaatcgaggaaagaaaaatctctctgcagtggcgtctcacgttgcggaccgcgcaagcaaagcagcgcgttgccgcgcgcgatttgtcagatgccgcacagcacccagatggaccagaaggtggagtcttctttcgtggagaaggagattgaataggactttcctcgagcaagaccaggctttttgaagtgtgtctgacagtggaaaatgctacagcgagagcgcaaaggcagtcgatccttctgcctttcttcctggccctgcgcggcgcgagagaggttgcggcgtctgccttccgagcaagaaaacagcgcgcgacagggcaggtgtgtgtctgctagcgcgtctgtagagaggggcagagaggagggagaaaagcgcgtttttccttcgggatgccttgcgtttcgcctgcaccagcgaatggttcggagaccgagtgtgcattgttctacccatttcgcctgaaaggagagaaaaagctgaacgagtctcctgtcggagaaaacgtccgcgccccccaggacgagagacggactctcgcaggtgctgcctccgccctggtctctgaaaacgcagaacgtaggcgctacacacgcatctgccgggcctgcctctgccatctctctctccttctctctccttctctctccttctctcggctcgcaagcgttcgaggaagaaccctgcaagaggagagagacagcctcccccgagaggcgtctgcgtcgatttctttccagggagacagtcgacgaagaagtttctctgccagttgtgtgcagaagaactgcgcaaggctgggtgaagatgtcttgggactctccgtcgtgcgctgtcctcccttctccttcttccttttttctcggtcatcgcgcctgttctctctgttcgtagggagcttggtctgttttctctcttgacctcgaatcgctcgacgtctctcttcttcggcgcggtgtgtgaagcgtacgcaacgaccagagagcctctggtgtgtcttgcttttagcctgcttctcttctctcttctcgccgcgttctctccagctctttcctctgcgattcttctccgctcgcgcgccgccctcaaaccgccgtcaagttctcgcagtctgcgtctccgtccgcctctcctctctcttcgcgttcctctcccctccatcctccatacgtctctgctctcgcttctcttcttctcccctctcttcttctcccctctcttcttctcctggcgcca

SEQ ID NO: 3165 - DNA, 1859 bp, Toxoplasma gondii
  source 1..1859: mol_type = genomic DNA
cgcttcgagtcaggatgggagaaagcgttcggtgttttctttcgcgagagcgcgagacggcacttgctgccgagcactctggtctctctgtcagcttctgcgcctccagggcgacgccacgcgtccacgagcgagagaggctcgctcgaatagaaccgcaaaggaagaaagagcaaaaaccgggggaggaaaagccagcaggccccgccgtgctgagaggccgagaaaaggtctccggtgttaggtggagaactggggaatcggacgcagaaggaaatgaagagcgctgtcaaaggagaaggaagcagttgagaaatcgggacattcagcaacgcagaggaaggcgagaaagaagactagggcgaagcggacggtagacgagaaggttcaagagtggcgggagactgggagagactggagggcgactggagatgcaacgagtcgagaaacgaagccatcagagcgaaggatgaacgaggaccggagagaagaagaggaaccaggggacggcagtcagaggctctcaagcgccttttgacttttgtgcgctaatttcctcaacggcttgcgcagaacgcatcgaggtctcggctctcgcgtgactttgcccaccctctcttctatctggcagcccgcaggacggcgagagaaagcggagggaagagacctccctcagactcagccgagaagcctagcggcgcagagcggcaaatcgtggagacagaacctgagagttccaagtgtcacagcgctcccagcggagccagggtggctcagcgagcgaggccagggacgcagcgaggaggagagcagacagggaaggaaagaagacggacgcgagggagaagacgctcgttcaggtgtgttgccagctgacggaatgaagcgctttggggcgctgtgaaggcagaagacaccggcgttggtcggcgagtgtctcgttctctcttttctcgctcttcgtccaggtgtgagacatctttgcaccgacgactcagctacctgcgtatctccagccggttccaaggcctctcggtctctgcgcgtcttctgcccaagctcacattgtcgcagagaaaagaagcgcaaaagagagtgaacagaagttttcctcggttctcttaactcttcgagaaatagaaaagaaccgcgcccgccgaacaaaagcgaacgctgcatcgctttccacgcgcgcgcgtgcaaacgagcaaaatcgcgctgatacagttcggtcccgttcggcttatatagcggaagaagtatagggccaccatacttcggtgagagcgcgggagacagcgagaacggcaccgcgagaagagcaaagagacaaggaaaagaaggcctcgcgcctgcgtttttgtggggcagcagtcagcaagttcttctctcgggcgttttttgctttaccgtcaaatttttctcttcgttttctctctgagagaaaccggaaacgtagcagagaacgagcgaagcgtggcctgtcttcctgtgtccatacgccgccgccttcgcgtggatgtagcggagatctcgccggggcagggagagaagaaaacctcacgctttctcttccatttcgacacgcgttttccaagaacgcaaaggcgacgcgtgcctcagtctcaacgtcgtgttcgctctccgaggagcaccgcgtcttgtcggttgttttcccctcacctgtgtttttctcctctctctccctctctgttcgtcgtttgttctccctgttttcccttcttttctcggcctcatctctcgtccttccccgttcgccactcttgcttctcccccccccctgcctctccaccagacttctcgttctgtctcatagtttgcctgtgcctctgccaaga

SEQ ID NO: 3166 - DNA, 1323 bp, Toxoplasma gondii
  source 1..1323: mol_type = genomic DNA
gtaaggaacagagggacaagctgaggagcggtgaagacgaaactacaacgggagcgaactcaatggagagggaaaagctcctttcctccaacgggttagttcacgtaaagaggggtacacagactcacatacacttgtaacgtctgctgggtatgtggctgtatagacgcgggtgtatcttcgaccagcgaggcactcgtctcacatttcttcgtaaacacatgtatttgcgtgtctgcgaacgcaaagctggagtggggacagcagcgttttcaggtgtcttgtttgcgccgtgagttctacgtgatctattacgttgtattaacgtacacaaatttgcatctcacagcagacgaaacgtctggcctcacgagggctgcagacagttggctgtagtattatggacgtttcttggagcggcacacatgacccaaattgccactgtagaacagctcactgccgctcgctagacaagcatagcttttccatgtttttgcgcatcttcgtgtcaacctttaagcactctccgttcctcgaggtcttcttgtctccgttttttatggttcctctattatgtttccaactctcttttgacctccgcggtcgtctcctacctcctttctctaccctgacacacctcgctcacttcttaatgccgttttttgcagcaggaaattttctgcttcgctgatcccacctcttccgtgtctcctttctctatggacagacagtgcgtgtgtttatctaactgcgcgtgcgtcaagacggggaaaacgttcgcgacgcagtagcgagactgttcagggacagataccacggtttcgcctttgggcttcccgccgcaacctgtaagatattatctgctacaacgctaagctgtgctgaatcggcaacaaataaccctggggagcaatccacctggaaggttccgctggagcttgacttatgcgcgcgcttattattggcatcattgtgggcaacctagctttctgacatgtcccgttgttcctgaaacaccgatgctttgtcgcttaactttcgtaaatcagtgtaagaatcgaccccatgcaatgccttcgctgacaattcgtaactgtgcatcttagttgcctgcgtgtgccaattcttgtgctggctcttctcgtaccacttgggttcttatgcgggatatcgtccagccaagctggaagtcaaactgtacgtcaacacctgatggataggattttgagttgtctgtggttccacttcattccgtggagacgaaactggtgattggagaagggcgcagatttacgacgccaatatagtggctggaaaactgta

SEQ ID NO: 3167 - DNA, 4221 bp, Toxoplasma gondii
  source 1..4221: mol_type = genomic DNA
gaactttttctccttctctgtcaactcatggtgatcagggaacgctggctctcgggaggcctcggaagcagaggaggcagaagaacagaaagaagaggaagaagcagaggtggaggctgcgctcttcttttctccctttcccgagagatctcgcgcgcctgcctcttttttcgaggctgctcgcttcttctgagacagcttctgaatcgtcgtgtagagcgagacggcgagagacgtggagaccgctgctccattctcctgaagttgctcgcgaaactcgtccagcgaagaagcctcttctcccagatgcacaacgaactcggccaaatcgcggtcgttcactccccagtggttgtggagctctgtggtaatgcgggagatgacgctcaggcgttcaaggacatccatttctcaagcgtgtggtttacgaaaaaggaataaagggaaacgagagtctgacccccagtgacggagaaaacagggtgcgtcgagactcacagacgctcgaatcgtcagattattgaagcaaaacatttactggaatgtcggacggtgagtaggtaggagcagacccagaagggaaaaacgaagcggtaagttccaagttcctgaaagatatcgagtgtaacttttgaagaaacggcttccgaactgccaagaaccggtggtaccaagacgttaatcgctgcgttcagcgatggactctgtcggcaaagggaagaagccgagaaccaacggagagtccggaaacctgcgtagaaaaaacaccgagttcaccgtctacgggggacagcgaaaacatgcgtctcaacgatcgaagcggaaagggtgcgtactgttggagtctttacagtcaaaaagaaaagaccggggagaaaccggaaacctgagacaggagcaaagacgagacgctcggcgtcaacgtctcaccggggagtctgccatggtcttctgtttacagaggaaagcgacgagatggctttctttgttacggtggacaagggaaaatcgaacatgagaaaaaacggtcgtcgaattaaaaggtttttccttctaatttcaacaaaaacacggaaaatcgacgcgggaaacgcccgtgtcgactgcatgcagtctaatgaatgacggagacttcgacgaatatctgatggcgtctagcctgaagaagactgctgaaacgacatacataaaacacaggctggtcgtacagttcgtctctaagaaataaccggccatgtggcgttgtgttcattcagcaaaaagctcctggaaaaacggagacggaaaagtcggcacgcgccacggcggtgaagaagtcgcaaaagccacccgagaaaaagagaaagacgaaaacgcaggaatccgtggcgcctaaaagcagaaacactttcaagtagaatgctgcatactctgaattgaaaccctctgaagtcgacaagctcgaacttcttcccgtctgcgatgagcaccgtcagctaagcaggcgctttggggcagaacggacaaaacgaagacacccgttgagacagaagcgcgtgaagagttcaagtgaaaaacgagacagctgaagaacggagacgtgcgaggaaaccgaaggcgaaacttcataaacatccctcgttcaaagagagaaactgtcgacaccgagcgcatgcgtccgtctttcaagaaaacccccgaaaggcgggcgttctgtgtgtcgcacggtcggtcgagagtgacccacagctaagctccaagaggaaaggacgtcttgaaattctgttctgctcgtctttaggatgacttacaaaagaattactgtctgaagccactgactgccgtaaatagagggaagtctataaagggcaggtagcaacgtatacctgtcagccggtagcgttcttccgtcgacaagcacgatttcccgttctgagtactgtcagcgtatttttttgtttcctcggggctttcagaaagaaaaggatcagtcggaaagaacccacaaacggaacggtcaatcgtaggagtagcccgcatgtagctgccccgctccaaggaagactccacacagcatcgcagatctctgatgtcggcttcctttgagcacttcgtttccatttgtttcccttcaaaagagcaaaggtgcagtgaagccactaagtatcgcaagatgatctgaattctccggtggtgcgagcagggcaaccgtagagctcgacgccgggcaaatatccagttgacagtagcgctagcgttgctagtaaagtggggttttaggcgctgaaaaaaggcctgctgacttcgattatttcgatgaaaagaattacattttcgcccgtctcctccgtttttcctgaggaggatggagaaagcacaggattgctggtttagatcgtgagtgtctgcgtctacaggatactctacccctggagcgctgtgtggtttcaggagagtcgacggttaccttccagagataaaatcgatgaacctactgttttgctacttgacgatatgctcccaagatctactttaactttcactgctctgaaaagattcctgctgctctgtgttggtgtttcttccggcaagccagagaccctttattttgcagcaagagctcaaaaaacgagtcggactcggaaacgaaaagtaaatgaattgtgtagacgagtgtgtcctgcaggataccaaacgtacagactcgctactttcttctttctgctccatgtccaattgaagaaaaaatagcatagtaggaagcgcagtgtgttccacgccactacgggcagtagacagggtgcagcccgttacttcactattgcccgtcctgtttatccagagcagaatcgatcgacaagacggcatcgcaatccagaaaaaagcgagaaaaaccacgaaacacagcgagacggcacaactggccgcagcagggcagcagacctagaaaacgcatgcacaagagcgaccaggtgcgacaacatgtctacttgcagtctacttagttgtatatcacgcctcttctgagctcctttaatgggaaaggacaaggcgactccaacgcgtgactccggctgtcgacgcccaaagtgcgacacacaggaaaacaacaagaatccctccacccttttttgactcccctaggaatatcaagtctgtcatgaacattctgactggatcttgctggcatttgttcgcaagggcgcagcccgactctgcggcaagaatactcaaatggtcacagtgcggcttcttcgtaccgcatacaatgatgacggctgtaagctctctccgtgttgaacatggcagaatggcaccagaagcgagaagttggatggcaagagacacgcaacagaaagaacatcagtgagcaggaaagagcatcggcaacgtagccgcgcgaagttcgcagataatcactgcacgaatgaacgacaggcagtaaacctagcggagatgagctttcatctagcgctgttcgatcgccgccgacggtctcatctcaagtggcgctttctcatcgctatagccgctctcacaaaagcaagatctaggacgctgggaaaaagtcgtaggaagctgtccgtaggtagatcactttccgtcgttgctagcggtgtctacgcatcatggcggtcacgttcattcagacgatcgagagacgcaaagctgggccgcgatatgtatttcgccagcgagctgagtgattgtgtctgcgtcttgaaatgttcatagttgatagaaacgtgcatcacgcctggtaaagctgagaatacgaagcgacgaagagggtgtcgccctccccacatgctacgcgagccgagctgtcttgcgcagatccagacaggcgcgttgagttcacagtcacgtccacgtttgacacaaggttgtttcacatttcatttctcgcaagagccgcaactggttctgcgagcgtgtcatcttgactcaatcttcgacttagacatgctttctttgtgcgggggggccctccaacggcggcaccgcggtctatcgcaataaaatcagctagctgtttcgccgccttccagcggaaggccgcgtgactcttgaccaatttcttttcagcaaaaaagattttttgcctacccttgcatagatgtttagcaacttctgccgtcgcggtgacagcttttttagcggcgtactctccggaagttgcctggcgcccaacgcggtctttgctcagtgtacccccgctgtctcgttcttcgcttagga

SEQ ID NO: 3168 - DNA, 1803 bp, Toxoplasma gondii
  source 1..1803: mol_type = genomic DNA
tccagagtttgacatgtctttaacggaatctgcgcctgctttgaaggtatctctttctgctcccgctctttgctcggagctgcatgagctcttgtgctctcgggccttggctgcatcgcacgcacagttcttttctcgaggagactcgaaagcggcctgcggacctgaagtcctcgacgcctcctcttcgccccgacacgcgcccaggcctcgctgcctggtgcacgattgacccatggtggaggcggccagacgagagacagaatgctgtgaaaagggagatatgcgacgacgaacgtctggagagaaagcggcagaagcgacggagccgcgagcacagctgcaccggagaagtgcggatccagactcgcggtttcagtctgagaaaacagacatcggcgagcagttcccaaggtgctgagcaggactccagatccttgatgcccgcggctgtcgatcagcgagacggcaagaaggactcaaagagacaaaaatccgaaaggaagaaaaggcgaaacgtctctttcaacctgcaaagacaccaggaaagatcttcccgtgtcgttgatcaaaagcgctgcaaggcgtcggatggcgtatacgcaacggaaagaacgaacctcggaatgccttaaaatgacgaagaatcctgccgtaacaataggggggagtatcaaagacggcaacgaaaaaacgtggacggtgtgaagattggtggaaaatctgtccgttgaagtccgagaagcactgaaaggtctccgacacacgaaagcagataaagttgccactgctgccatgaagtgtatggggagaaaccgctacgtgctgctctggtggccaggggaggaacgagaatcagtcgagcattggggcgaggatgaagagacgagaaaagcatagcccgatccaccggctctgaggaaaagtatttccgttgaataaacgtcgagggcatcgaaccgcatgggagcaggaagccagcaagcatgctgcagctctcatgaaacctgttgaactacctgttgaaagctctgtcgctcccagtccacgagaaaccgaagctttcggcgcaaaagagccggcagagcgggagcagagaacgaccgaagagtgggaaagaaaagtcgacgcacaaataatatgaaatagaagctggaggagagacggcaccgatggtccgctggctggtctgcagcagcaacgcctcaatcctcaaggcgaaactttgaaggcgtgatggtgcgtaggcgacgactcacccagcggtctaggcacaccttcttctttgaaggacctgctatctatgcagacaaaaactccagggaaaggtcaacgtttcttactgcggctgtgccacaggtcgggtgctccgcgatctccgctattcggagagaaagcggccaacaaccgcaaaggaaccgtcggaaagcgcaaccctggagagcaacttgcacgccaaagacgtgaaaaactggaaattcgagagagcttgacaaacggccgatgaagtctcgggcgcgcgactcgagagctaccggtatgccacgacggcggccgcgaggcagatcttcaggacgctccgaggcgcacacactttccggcgtgttttcgcgtttcgagacgcagcgggaatccgaagtcacaaaacagttagactacgcttgacgcaaccagggcctgcaaaggggacgagaagcacaaattccgcttgcgctgttaaagcccagttatttcgtttgtcatgggcaaccgacagagaaaaaggatcacgtgggttcctgacatccgttccgcagcaaaaaa

SEQ ID NO: 3169 - DNA, 1993 bp, Toxoplasma gondii
  source 1..1993: mol_type = genomic DNA
agttcctacaggtagaaactgcctggcgatctgtgaaactaacaggtacccgagagcgatccgacagggtctcttggttggtcatcgccttagcagtgaacgcgtatcaacgaaagacaatataaaagaacgggtcacgtaaagtgtcgagtggagagtcaaagcgtaagcccttttcccgccagtcctttgctgtgcttacaacgcggaattagaacagtgtttcaatttctttgcctagaggttgcttcgttcgatacagttgtaggtgaaaggtatgctaacgacactttcacgaagatgaatttttcacctgtaggcaggagttccgatgttttcgacgtggctgcgttgttgcgtttggcttaccgtttactaattgtttagactaaacagtaggaaatcgtaaaggcgctgctgaagaggtacagctgccggacagaaaggatagactgccgtaaatcccttctgtggatagaaatgattttaaattttgcagtcaaccagccccttttggaatcgtactaatattgcttttgacgcggaaaagccttggctgtaaaataatccagggacgtttcgtcgcttccgtgcagatcttcggttgtgttcgtagtccatgggccttccttggagacttacagaagtaccaaatgactgcgtagattccgtgtgtcaactgtagatcgaatcggtgccaggatactataggctgacccaccgctctgacacgagtttccaacgttctacgactgcgcagctaccgaggaataatgtgagcatgtttgttacattagcagcgtttgcaacatggaagtttacagaagccatctacaacttccaaccaaagcattgcaggcgggctacgcgactgtgtcacaaagaaacatcccgcagaggccctgcgagatcaagtttgtccagctgtcgttatgagatccacacaacgacatacagtgtgggacaggggatatttatctctgacacaacattacttacatgctttttctgaagagtacatgctacgacttgggcttccgcgttgtgagatcatttacatcttgatgtcattttcagcacacggagatctttacagaagtataccatgatacgggaaaagttgtgggtgcacacacacatggagagatggacgatttgaggactagaactgccagaattccccgttccctgtctcttgacatgacagttgcgaacgtgacccgacggcactgcagacgtcgaatacattgtaatacactgcgtattgaatagagagaccccagaaatctgagtgacggctgtgccgaaagtcgttaccaggtgattccgttcgtggatgcacaacaattcccctgttcagcaggcctttgccaatttcggatgaaatcgtgctatcagacgcggaaaagaaaagttccaggctgagaatgagtttttgcttcccttgctgcttctgtgccggttttctgtcacctttcagatcctctagagagacaggcgtgtgatgcgggacagcagaactgtgtgcgagaaggggcaggccggaactacggacgctcagagggaaaacccttttttgccacggtatgccgttttttcttttcgtaaaaacttcccacggacgccaagtcgcggaacacacttttcaaatacggaacaaaggcgacgggctcgagacggtgcaacgggtttcagccgtttttttgcaagcagcccgtgtcactgcaggcgccttcccagatcttggctcgacatggccgccaagccgccaggcgggcgctttttcctgaggtcatcttgccttctctcgtctccttttgcacgagcagatgctataacttttacagacttctgtgtcccacatgcccccctgagaaggtcgaaaccactgtctctctgcttctctgcttattcgctgactgtctgttcgcacccggcgtagaatctgttgagccgccaacccgtccgcagtgtttcactgcctcccttccga

SEQ ID NO: 3170 - DNA, 1963 bp, Toxoplasma gondii
  source 1..1963: mol_type = genomic DNA
cagtttcatcttgcgagttgtcagccgcatacgcggctttattcatgatactgcacagggctgcgagacccgggacaagccaaccgcaggattctaaattgggatccacatacacgtcgatataaatgtcaagcaacgcgatgcactgcttgacgacctcactccatcgaactggatggcgcgcttgaagttgacgtagacgcaggaactcctgaagtagttttttgtacagtgaatctcctttcaaaagacctgcctcccgcagcttgttgtgaggaattgcactcatgaccgtctgagtccatcacatcacaggaacagcttagtcatgtttttggcacccgcaaggtgatgttgccagctgtcgtcatgctggagtaagaacaggcacaaacgttgccgcatagagttcacagatatattcatgcaaacatatatgcgtacagctgctgtgcggttccgctggctccttacttctggcatgctccgtatctcgtggtctggtatcagtctttctcgttcacgaatcaggtcggagaacagctctccattattctgcactatggcagtaaccatatcactgatccactcagcagtggaaccgttacgttcgcctcctcctgaagaaacccagggtgccgccaccaacctagggccaccgccctgcccacctctccgccccccgcggcgccctctcgagggaagtccatcagccagcatgactgtttcttattcagtcaggttccatttccactagataagctcctgacgagtcttcgattcgccaggattgttgaacagagtctcagattctacggactccgagggtctctgcttgcccgccctgtgcacaggcgtcagcacgtggttctcagagaaaaagttggtaagtggaagtggtggagccaagaaaactcaactcttcttgtttccggagagtttcctggtgtcaattccacggttctggatagtctttgttgtattaaaacacatctagaggactgagacgttgtcggtagttgaattacagacgcttcgttttccagcgtcagcttgcatgcccgtcccctgtttctggaacacaagctttgagaaggaaacgagacagagaacgacgaggagtgaagcaaatcctctgacggatttccattcgataagcaaaagagtgtttctccccatgtttcaagagcgcggacttcttgcctgcccttcgtccgttccgctaggcctctgcctgaacggctgcatgcgttgcgagcaatccgatgttgcgcatgaaacgcaacgcgctgccgtgtcgtttttcgcgagagtgagccatgaaaagctagtatggatcctcaacaaggaaggaaactgcatcgaatgagcctctattctcgaactgaactttctcgtcgctccattccttcgatgacactaccaggaatatgtgtaactcgttagtaactcgttagatcctcgtcgtgcaaacatcgtctagcttgttctcgtcaggcagccgcgctcatcgtttgtaaaattgtttgtctcacctaacccactgtatacgctcttttctagctgtctgtcacgcgtactcttcaacagaggaaaggcatgtgcctgtaagttgttagatgtacatctggcgcgtgtagcttaggtacgaagtttttttaacgctgccgcaaacggcttctgctgaatgctgtcggagtagcgagtcactagtatcctagcggatttgattgttgcaaggaaaagccgctcatcctgtgtattcaacgtcctctcactactgggttttggagactgtcgtgccatgcgggacaggcacgacgttttttagttctcttcttcgcctaaatatattcttcacgccagaaaaggggagacgccacaggaaaggcagggtcttgcccgtccgccgaaggcaaccgctttcgccctttcgtcttccaagaaaactggttggtcacga

SEQ ID NO: 3171 - DNA, 2365 bp, Toxoplasma gondii
  source 1..2365: mol_type = genomic DNA
ctggaaatcctcttcagtgcctttcgcctgccgttcgcgcttcttcgccggagcgaaacgctggtgggagtggaagcggcttcttcacgacagaagacatttttcacggccacagtcttctttcgctctcctctttcgcgagtctctgagcgacgaagaggagcagcgcaaagaagaagtggaggccgcagacaggaggagacagtcctcagagacagctcgtaagtaacgctgtcgcagacgcgcctcctcctgaaacgaggcctttttgtctttacaacgtccacctctgcactcagaagcactcgagtttccttttcgcggccacggtgaaagaagagagctacatctgctgtctgcgctacgccgcatatctcagtttcgacgccttgacgaaaagacatgtgagtgctcttcgctcctcagagagcggaggaggcgaagtgaagcgagagaagacgggaagtgcgagacgaaagtcgagcagacaaaatggcgagaaactcacaagggacctgcacagaagaagacagaaaacgcagtggaagacagtagggaaagcaacgagcaaagcggtgaacaaagcagtgagggaatcaatggcagaaggaggaacgaacagagacaagaagagcgttctgacaagcacagacgagagcgcagctccttcgagaaactcagacgccgagagaaacgaagaagttgtcaatcgaggaaaggcgaccttggaaaggagatcgagggaagatcaaagcgaaacgcgatttcgagacccgcgagagccgtcgttcctcctgtgtggctaccgcctccactctgcctgaagaatgtccattgtggatgcttgtaccctcagatgcgaaacagagcagttcgccgtgtaggacgtcgagaagcgctgaagaccaagaggatgaagcatcctactctcattgacttcctgtctgaacaggtctggtcaattcctctgtaccagcagcgtagacgcgtccttcttcttcccctttgaatgcagaggaaaagacccagatccagaacttcagtgatcccctcgtcgaatccaagcgtcctttcacatttctgcccatctccactcttcttctgtctgccttctcccgttctttccccggtgtacatacactgcgctcggcgtccgggcttccagcttttcgctggctctgtctcgaagcgcggggaggaacgagacacggcacccaggaccgggaaggaatgccggaaaccggggcgttctctcgcgggtgtttgttttttcctcttcgcaagaccgccaacagaaacgacatccttctggaaaagcaacgcatctacgccgccggctcacgctttcgaggagagaacgagaaacccactgagagaagacgaccgcgcggaaaggggtcgcgcgcacccgcagaccagcaagcgagataagagtggatcgctgcgcaaactcgtttctttctcatgcctcctcatgtcttttccgcggatatttttctcttcgcttccgcagtctgctttcttctacgtccgtccgccgcgtctttgcttgctagatctgcgaacgagaaacacaagcgtgtttgggtgcctccacctggttcttctcttttccctccaggccgagagcgagcgctcgcctcctcgcctcacgaatctcctctttctgtctcgacctgcagcaagggcggcggacagaaaagatgtatttctctcgctcaacgcccacgagaacgcagctgtctgctgttttcatcctgtcgcaaggctagctggaggccggggcggacggtctcccgttttccctccgcgccccgaggtgtacatacacccgagtcttcgtcgagctctgatgtgtacatacacctgaggtcttccccggcagagacggggcacctgctctggagcggaagtttttttcctcgattttttcgacgccgcgttcacctctgctggcgccgcagcgaagggccgtgagagacggagagagttgagtctttcctttttagtcgttcgagacgagagaagggcaattggagagaagccgatttcttcacggtgccgtcgcgtttcttgatcatggaagaagactgcggacgacgtgcgtctgctctgcatgtcgttcgggcgacagcgccacctcgttcgtctgcgcatctcgaaagggaccgaaggaaccgagagtagcagagtctctctcctcctctcacgcttttccactccttcgtcctctcctctgtgttgctcttcatcggtccgacctgcgtcgccgccggcttgctcgtcgcctccgtccctctttttgtttttctccttcgccttcaactcggagggtcacactcttctctcttctgcgttggaacca

SEQ ID NO: 3172 - DNA, 2325 bp, Toxoplasma gondii
  source 1..2325: mol_type = genomic DNA
caacaaacgttttgcagacctgccaaagaaaggatacgggcataccgttgctatcaccctgagggatcacatcatcaacgctttgttcacccggttgacgagtgattaggcaggaagagagataatgccttgggggaaagattcaactcgattgttggtccgagactgccagctgtcaattttcactagctagagaggaagaagcaggcgctggaacttgctggaaggcacgagaccatccaaactcaactcggttgcactattaatcgcaattagcagtagtttggtaagaggccgactgctctgcctatatcggaacccgaaggcatcttcacaacacccatctcaagcgagtgacagactacgagcagcaagaatagcagatactgctgcatctgtcatcctggaacgctattgtgtacacagacaaaacctttcgtgattgctcagctagtcttcaagtacctgccggtttgtccggctatctgtctgctaaggcagagcaactgcgcggaaccatggcgctattaaagcgtccagatctgcctggctgccttcgagaatgcatttgtgtgcttggtgtcgaggtctggtgaccatccacgtcagtattttaatggattatcaccggaggtttcctcttgtcgaggaacggtgccaccccagcatacagtattacggtgtcgacaaccaagaacccgtggtttaagactctcatcccacctccatcttcccttcctttacagcgtgagagctactgaagacaagcaaagactggtgatgcactggctaaaccgtggaaaagtagaggaatcaacggtggcagatgccgcttctggaacgtccaggttcacaggcagtcacagtggaaatgtcactttatcaggattagtcttcacagcttgcgcctactcagtctgggcggtcagcaggctgtggtgagacgaaaagcaagaaacactcaacccatttcgctggcggaaacaccaccgctcccggctgcatctgcgtttcctcttcttcacgctgcttgcccacacgttaaccatactacaccatttcgcataatagaatgcggacccgtgtgtcggctgtgcgtctcacttctactcttccccttaagtctgttactgcgaccggcgcctgtgatcgattgccgaccttctgcgtaccagcaaatatattgaaccaggctatgactaccacggagaaaaacgtattctcagtagatgtgattgtatccgtgtttatcgtgttcgtagtgcagccgtggtacccgacagccaagagtttgggttgacaggcagtactccacggtcggactggagccactaacaaaccgccggtttcggacagatttgattttgacacctcacaggacgctagaaaacagaactcagggaccaaatgaaatggtattacgaaccagttaaccgatagtgagttatctggtgtggttgtcccatcaaaccaaaagccgctggtaagaaaattaatccaagcatcgactgggtctacctagtggaatccacccgtctgctatttggacaacctaatcgccccacagtccctcttcttttccgaggcttccgacgatatgtctccttgataaaacaatttccacggcgtttcttctgtgtgaccttgagtagttttctcgctcgtctgacaagccggacggtgatgatctagttaaaagagcttcagctttctcagttcacaggttcgatgccctcgtcagtaccgttgcacgcatctcattcaggtttttggagcgcggtcacacagtggagtatgtgcttgacaaagtttggagatcatgcggggagtggaaactgattttatttctttgctgttgttgaacctcccgacggcgtttcgtctcctcacgcagacgcatgcggtactgtctctgcatgccctgcttttccttagacgaattattttctctcctcctcattcctccacgtaaaggcggccgattcgtttgcgaggtagacgcctccttcgcgtgtctaggcgcgttccacttcttctgtcttctctgccttgcaacaagtgtgcacattccacgttttttttctgttttctcctcgctgcgaccgtggtcgtggctcctcgttgacccgacgtttcgcttttttactggccgtgggagcttttccgcctctgcgacgtctttttttttctcgaatctttctagtcaagtactcacaggtttgttccttcccgacggtcgttaggggaaactggcctccgacaccgacaggcgattcgtagcctctcacgttctttgtgtctcgcgtcgtctcgccgtccgcaaga

SEQ ID NO: 3173 - DNA, 2491 bp, Toxoplasma gondii
  source 1..2491: mol_type = genomic DNA
ctctactatcggaggtccacccgtatgttcaactagtgtcagctctgcaccaagctaggtcaagaatgtcaatatggtacagtgtggtttccaagtagcgcagtatactattcgccggcaagatccagacacctcaatgctcatacggcgctgaatttaccttcattagtttgggctcggagattgtgccttcctcaggcaaatcttcgtcatcatccgtggtacttggtttcctccagtcgaagtttgcaggtggtgctgtcgaacgtatggccatcgaggtaatctgaagtacaagaatgcaatacggcatttggtaacttctctatgttactgaaacggctaaaccgtgggacgtctgagtctgaaaacggaagaacatgctgataaacaaggccccacggcagtcgctgtgcaaccgaattccggctatgcgagctcgaaacggccttccgagcgtttaatacaggactggaactttacaaaatatccgtcgaaatctaaagcttactcgaactggggaattgaagaagacattgatgagcaactgctcatcgacgtcggacactaaacatttatcagtgggattcgccagcaagacatcttgtagagttgcaagcacgacggagttgcgactgtcgatcgcccctgatgagttggaaggagaagttccagagcccgaagacgcttcaggcctgctgtaggcttccgcctctggtgcagcagaagtgtcggcgcacggcttcgcttgatgtgtagtttcactctcagcgctgccttcacagagtgaccctgcgccttccgcggaggggggttgactggttcctgattcctcctctgtctgacaggggacttgtttagtaggttccagttgattgaggcagacggagagcttgaagttgaccacgttatagcacatgcaaaggtcctcttcttgctcctgctgctttccagcttgcatctgcttcattgacatatgctcgcgcatacggttggtgttggcagcagtagagtctatgttcgccattttgacaaacagatgtgataatccttaggatatcagctactgacttcagtcctctgtaccaacggatcgcgcacaccagggaaacgggtatttcgcaacgcaagtggagcatgcttgctccagaaacttccaattcctgctgagttaataagccagaaaacgttggcttcctagccacttctgatacacgtcatgactcgcagacagtcgtggcaaatgcgtacaattccgtggttgacagtcaaacaccggcacgtcctgcttggaattggatgccgggcaggaaccacccggaaaggagaatgtcagagttccgccaaaacgtagacgcaccgataaagtgtagagccccaaaatgtacaagagatcgaaatgctagtgtagctcgtgtgtgttgcactagcatagtttcatttctgcaaaactttgagcagccgtgatcctggacccattccttatataggatataatcggtgtcgtaaagttgcacggggtcttcgactgataagcggcgggacaaatcctcagcaaacgattactccataacaccacgtttttctctctctttttgtaacagatagagactttcttggacccccctcaaggggccgtggggtgctatatcatatgaaccggtggtgtctattaggattgcaagctgcggaggccaggcttgttccctcgctcgtagttgtacggcccttgtcctgacgttctgcgatagtcgactcggggaaaaatgatgcaccgctggtggtgctttcatgttttcacctgattggctttcgcaggagacgttggtaactgtcgtaactgtacgaagctgcattaagcttcgctgcagcggggagccaaatgggtcctcgctgctctatactgggctagggtcttctgtcactgaagcctttctgactcttaccatatagtatctgttgatgtcatataaagacacaagcccagtcctgagtgatttgcgttttcttgaagtgatcgttgcacattctcgcgtatcgtcatccgtgtgtagtaccggtattgccttcccggacatgggtggaatttgccctcttacctcgcaggtcttgccaatcaaacacgtgtggacgttaacgaagggaacatccgtatgcctgacattgcccgcgctcggtatgttccagtggaacttctcttcaatttttatcagcatctacccgttcgtccgagtaagtcactgattcttgggtgctccaaacgtaattccatcccaaatagtattccttcaccagtcaccgactgtcagctcaccgctgcacggtcgtatggtgtcacttatgtgaagtggataaggataatttggctgggaatgacaggatattgctgaagcttgcatcgcagtgtcttggcttggttgagtcccaagcacgccagagacgcatggtgaactgtggatggtaatggtttctttagtgcccccttagcgga

SEQ ID NO: 3174 - DNA, 2156 bp, Toxoplasma gondii
  source 1..2156: mol_type = genomic DNA
gtcgcggagcagccagcacatggaagcaagagagaaacgaaaagaagcaccaggaaacctggagaagcgaggaaaacgacagggtcaagcgcgggcggacgacggaagcgaaggaaggaggcgaggcgggccagcgggaagaggaagaagagtcagaagaggaagaagagtcagaagaggagagggaggagcagtcgagagaggccgagaggagccagcggcgcctcgttcgcccttgaggtgtggtgccggtcgtcagagaggagactccgtcatcttgacaggtcgggatcgaaaggtcgagatcacgcgagacacggaccgaggagggacaggtggagggcaggattgggccttcctcgtccgccatggaaaaactgagaaacacaaagagccttctcccccgacgtcgacgttctgcagacgcagcagtgggactggactggttggcggttgaaacgcggcttcgcgagggggatcgagtggcgcgatcagactgcgacggaaagctcgtaaagcgggtggaagcaggagagaacactgtctacgtatgggtcgttcgtgagcagtgcagggaaggcagtttgccgcgatgtggagcgggcagaccgcaggcgcagagagagggggaaagcgagaaacatgagcgacgcaagaagcagctaggagagaagaacgcaaggggaaagcagaagcgcggggaaagaggaatgaagaaaactcgacaacacagcaggtggaggcccgaaacgaaagtgagagatggaaagggcgcttgtcgacgccggaggtgtctgcagaggcgaaggcctatcggctatgcgaaatggtggatggcgtttactcgaagtcccggagaggcgctcgacagcacagccgtcttcgattaacggaccagtccgcgcagcctccagtctccagagaccgcgcaggcacaccaacggagaggaaaagcgactgagaaagcgcactggcgagggagcagaagaggggggaagggaacgggtgagagagagagaggaacctagaaagagagcgcgagaaagactgaaggaaagagagcggagagcgcccattgagaggtcggggccagcgggcgcgcgccaaagagatgtttagagtctagagtttaatgtgactggaaagaaaacatctcttgcctttttcgtctacacaccagtcaagtccgcgaaacaaggaacgagaagagccgcacggcgccgcgctccgacgccgcgttatcgacggttctgtatccctccttcgcattggctcttcaccgttcgaacgacacaaagaggaagagagacgaagcgagggtgacggagaggagctaacccatgaaaggacaaagagaagaagaaatgaggaagaaagaaggcacggagacagcagaaaacgggacgaaggtgtcttcgtcacagaagcgcatgcggttgaggtggagggcgcaaagaaaaaggccccgcttaacgtccgtgcatatccagggttgcaatccccagcttttgtatccgctttttctctttctctcttttccacatctgagagagtcttccatttttttctccttctcttgttgtctttttttcctcctcgtccgacacagggcccctgcgagcaaggagaccagagtcattgccgggcgccgtctcgcccatctcgcccttgtcttcttgtcttttttcttccttttgaatctctttgtttccaactttttcttactcaccggtttcttcgcttttgtctcccctcatttcgtctctcctttctctgtctttgttggacttcgatcctccgtcttctttccggactctccgttgttctcgccgccctcacttcccctttcatacctattcgtttcgtctctcgtgtgctttctttctccttctctttccttccctttctacctccttccctctcactctctttccacctccttcttacgccttgcatctcgttcttttcctgtcaattctcctcacctttctcttccgtctcttgctcctcgtcgccttcgcctctctcgtcttcgccgccgccttcttcccttcttctgtttttcttctctttgctcactgtgtctcttccctctctcttgtccgtttttctctctcttccgtcctcctccacgtacgccggttctcctctcacca

SEQ ID NO: 3175 - DNA, 2177 bp, Toxoplasma gondii
  source 1..2177: mol_type = genomic DNA
cagcgaacgctcacctgaaaagatccggatgattctctcttttccccagtgacatatccgtatctctatcggcatatatatatatatatatatatatatgacgatgtatgtctgagtatgggcatacgtgccactgggtagtaccccgtgttgctgttctatccctcgaccttgtatatcaatgtcgagtcgtaaagcataaacctgaacatcggacaacacaactccccgtttttctttcccacctgtggaatccaacttcactgaggccctgtcatctgcttggggggactccgcctgcaggacttcgatcctactgttctcagtccggtttcagaagccagacgacgtttggggtcactttgtgcagcacggaggccgagctcacactgcaccggggaccgagtctccccagatgcacagatggaaaaaaacatccttggacggttcgtacctatttaactcctcagtttcagttgaggacccctttctttacagcttgtcgcgttacactgggagcataccgatatattcgatgtgcgaagcagagttccagagagctgactaaagaatcccaagacgagcgacaataacactgctgaaatgcataccagtgcgtgtcactagaacgttaccagatgttctccactccctaccgaattgataaagacagctaaatgcgtcggatttcaatattctaccccattacggttattgctcgctggccgcgtttgactcccaacatatatcgcttgcttcttttgtggcacggtggggtccaatgtgctctcatgaacaaggtgggaggattttgtgtaccttccgagttggaatcagaacccctggtgctttttggtgcagcacaacttcgaacttcacagcttttcgccgtggtcgagagtccaaaaaccacccgttaactgccggctccctgcactgtcccagctccttgcttatccattctttcagctcgtccacataaacctcagaggacaatatgaatggcacgttccgcatatcacagaagatgtatcgatgtgtctaatggccagcagagattttgacagtgtccattggtgtgacagttcagggttaacggtttagcgtgcagacgttgcggtcactaggctcacggcaagtgaccacgaggtcgcatgcgtcgttccgcaggggggagaaactgaaaccacgttgctttgtttggcggagtgtgcgcactcacttttaaacagatctcaactggaagattggggtctctactctcgcagttcctggcactcaccgtcagaatcttctggagggaagcgcatgcgcttcggttttttccgactccgcatgtggtccaacgggaaacaccgtgaactgagagattgctctgcaacgtcgcgcgcaaatcggcgcgcggcttttccttcattgttctgctagcgcggttagggtattccttgccacggcgctgtcctttatcggaagcgctttctcttctagttgtagaacgaactgctgcttttattttacactgcacctcagtttcgatgtgagacgtcggtttcttgaacccgcctcttgcgtctgtgcccggttgacggctgtcctgaatacgcgagagagaagggctgaactctctttgttctttagtgaagttcccggcttttctttttttccgagcgttccactttggaaaccgtgcgcctcatcgtttccctgggagctccaagttcagcacaggtcgccctccatccctttttccagccccggatactgtcccgttgtcttgttcatttctcgtcctttcgtccgcgctttcttctctccgattccaggtttatctgcggcttttccctctcccgacgaggcttgagacgcctctgtccgctctgcccgccttcccggccttccgtcctgaaccacggtttcgtgccttctgaggagcgagtggtcgtcgttccgcgtttgctgactgttccctccccccccgtccgtgcaccctcggcctcttcttcctcgatgccgaggaaataatcgcctccagtgccctttctcaccaccgacgttttcgtgctcagggaaccctgcgattttttggacgcgcgcgcgccgcgaacgccactctgggcctcagagtgtacatacacctggttccccagcttgttgcggcgcgccccggcctaccgaaa

SEQ ID NO: 3176 - DNA, 3714 bp, Toxoplasma gondii
  source 1..3714: mol_type = genomic DNA
tatatgtatttgtgtataaggcgcaaaatcgattgtatgagccgatcgatcaacaatgtgaataaaagaagactggtatctggattgagcagcacagaaagtcgagacttctatacactatccacagcactaaagctgttgaatccggtatcgacgtcccgccgcatagttccatcagctccgcgaaccattatcgatctcacaaccctttaaggactagcctaaatgccgcctgaaaatctcaataaaagagacctgactctgacctacacagaggtacctcagaaaaatggacttaagcagtcagcttttgagagtattagctatcttggacgggaaacagtcacgcaaagactgaaggataggtcgagccttcgtttctgtgtaactccagccaatagtgaccgacgaaaactctatcagagtcgccttactatgagcggcgtcgatgtggtctgtcagctccttgagaactttggcgacaccggccatattgttgttcgccaaatccatgtgcatgtctttgctcatcatctggagcaaagattcaaagtcggctctatgatcatcgtcatcgtcttcttcgtgttcgtcggtggcttcatccacttccgcggccccctgttcggtcgcagcaacgacggcctctgtttcttcaggcgtttctcctgcgagcacgcagatggagtcgagtgaatgtaacatgtggggagagggagaacacgaaattacctgaaaccccgagaaaaagtcgttcccgagctgcagcccactgcacacaagcgagtggcatgttgagaggaggcgtcgggagtgtgttttgagaggaaatcggcgacttatccggcagaaaatgcacttacccgcttcgatcgagtgaggtgcgacggagaagagcccgaaaagggcgagaaaaagaagacagaaagcaaacccgcgagtcatcttgccagttgatgacgcggaaaaggcgacagagggcagctgcgcgtgcggggttccacagaagaagcggtgcctcttgcagcgtatccacttacagtaacagaagaataaaaaaggcggaccgatgtatctgggaaaatctgggagatccttaaatcaacggcaaacgcgcagttctgttagcgccgcgccctcacgaagaagtcaggggacaagcgcatcgacgcgcaacacgcgacgcgcacaacgagtgaataaagtggaagggcatgtttgtttccgtggcttcagcccctcgtccactgcagcctttcgaagggatagccaacgcgacaaacggctgcccgcgtagcttctttttcaagcaactggctgcttctaaggccgtttcgctcgtagagaggagttgcgatgtcctttctagtgacgtcagagtgatccgacccgtgggtcatcgacggtgttacggctttttcgcggtcgggcgcttgaaatacggaaatacgaacaagtgcagaacgttatcttgtcaactctggaagttcgaacgtcatgcgttaaggatccatgaactaaagggtttctgctgacatccttgtcgaggagaggcatagtcaatgcggccaaatgtgcagcgggaggtgcgcaggcctggctcgggttacgtggagaatcaattctctgaatgtgcagcttgatcggagaaagcctagtcacttaacgacagtgcgttgcaaaagcctctatgctgtggcaatttctgcgctcgcttcgatgcctcgtttaatgcgtcatcaaaggctatcgctgactatctggacagagggaaggtgttgtcagaatgtgaaaggtcgcagcacgggcaagctgtgatggctgtgttatgaatacgggttggttcagaagtcgtttacccaagaactaacgcgattccgtctttccacattgcgtcagaaaggcgtgcaagtagagtggtcaatcgacccctgcaaaggcagtcgtgtacgatgctgtacgttctgcaaatcaggtaatttttccagtggtacgtttgagcaagtgctaggcagcgtgacgtcgttatggcttctattcactacactgagtaatatcgatagtaagcaggtgggatagccaatgcttgagagcaacagcgtcaaaaccaacaggtgatatgagggggtggctcgcgaggaatagggaagtagccatgaaagaagagaataaaccctgacaggtcaagcaggtgcactgattctgcgatctaccgtacaggaaagctgagatccccgcatcatggctgctgggatagggcataccagtgacgcgacggatcgaaccgtctagtaccgtttattgtaccgtaccctcgctttttagtcgacctcagcggttatcctaacgtccaacatattccttgtaatggcagtcatcggcgggaggatggtcttcatcccaaagttttgtttgcttaaagcatcaaatcataaaaggtgccagattcatggaagacacaacatcctacactactgtcagtgttagggactaccatgattctgcagattcttccctcgccaacgccaatttcgttgggctgtggaaacaaatgccaaaggcacaggacgtcaggaatacaggactcgtggaagcgacgctgactgctagagcaaaagaatctgacggcggctgctatacctgtgttcttgtcccttttctaccgttcctttctcaactactcattgctaaagacgactgttcacagtattagctgttacagacaactacaacggctgtgcacacgccgaagacgctccacgctcgtctaagcgattctgcgtccacacactggcaaccacctgccgcgtacacattgtcaacagcgaagagctcttgtcagaacagatgtaaggtgcctcagggttctagacgcggttccagattgtgaagaattgtctgacggccagaagtcagccacatacactgctctaccttgtcgatgcgatgtttacccaccgtcaactgcatagatctcgacactacggctggttcacacatgttccatgagcaaacgtctaaatggcaatggcaactgccacggattcgagctgttcttaccatttcggatttcccgtgtatatcgttgcttttgaatcacccaccccgccgtctggaaacgggcgtatacgcgcacgggaaaacaggagcctcatgaagaggtatttcgagcgaaaggctacggtacttgtatgtttcagttggcgtttctgcatgaggattatcaaccgtgggaaactctttcttgtggcctccagggtctctgcgaatcgattcccccccaaaagggtgctgcaccgttgtccacttcgcgaaacgtgtactttccctcgaagctgccaagcactcaggttttttcgtagctagcattctctaatcatcgcggccgggactcccaagagcgcgactaaattttacgtaggcaaacctttctccacgcaagcaggtacagatgttttattgtgccaaccggaagttgggcggtttgtgtcgcgtctcttccacggggacagagacgcgaatccgtgtctgcatttagtgacacgcaaagttccctgtttttcacaaccaacgcatacccggagtttcgtcagagcaaaccccagtctatttttttgttgccgttgaaaaatgtactcacgccgtggaacgtgtagcgtccactgtttttagacagacatcagacaagaagatcctgaactccgttttctacaa

SEQ ID NO: 3177 - DNA, 2413 bp, Toxoplasma gondii
  source 1..2413: mol_type = genomic DNA
atgtaccacaccaccgacaagatgcatctcagtgcaccacaagccgacatgatggagtgcctgattcgaaggaaaatttcgtccggaacagtcgaaaccgagaggccttcatgtgccagaaaacgtttcctccacggaacaagtttttcagcctacacatccacgttcttcagcgctgaagaatgtgatctgctgcatgagttttctatatatcagagaagggctctccgaaatcccagtgtcatcagtgtacagaattgtgtcatttacgtgaggttgagttggtatataatgcagcgtaaaaatggtcgctcatcgcgtgaacgagaatctcgcaaatagtacagatcacacgtattcacaccctggcaacacatgacgcgcgatgaggcatacaacagcaaaaataacgttgaccatatacactttcgcccgtatagcagtcttcaggtttccccacaaacgaccgtcgattaattgagatgatgtgcctcaaaaagaacagatcctcaagagatgacggcaagcgatccatcaaggacaaaaaaggcaccatctttttttcccgaggaccacttaagaacgcgataaaatctaaaagcaccagtgttctagctcgaccaagaaattgctcgtgacccgaaagccaacaaggctcctgtcggttcccagagaacgtgagaatacttttcagacaacgtgagaactctacgttttgctttttggcccgctcgaaacaggctgcgctgtccatatattggccgttaatgagtagatgttgacagaatcgttaaattgacacggccgcacactctttcatcaggtacatggaaagaaacgacaccacaagcaagcagatattcactccatgagaaatatagcgacggccagctggctggaaaaacgactgccgtggcacacttaagacgaagatgttctgtctcattcggttgcctctcgcagagatactgcttctttttcgctgttgccaacatttctagcaatctgctgatctgtaggagaatgcgctgatcggttttcgtgaaaacggcgttgagatatctggatggttcatgatactcacaaacttgtagatttgctttttacgctttttggcctcggtgtcccctcatctacattttcaacactggcgttgttggtaaccagaatcagctgcgaaagtttttgaagaccgggcagcaaagaatcctaccactggtgacacagtacttgcatttccattgcaacatgtgtaactgagcgtagtacgtcccaaaagcgactggggggaaaattctttagtccgccagctggcttaacgagccttgcaactgcacactcttccttcaggttctctagtgccttctgctttagacaatgtctgcacccccaaaggttcgtctacaaagacgtcaactttggtgggcctgcggtgagacacgtgctctactacagcagactcttggccagctcaggtcaatcaggcagcaaaccggtaccttttctttctttctcccacaggaaagatggtgatgttttgattcccacttcagcgatgcgcacgctgtcaacggatcgttaagaattctagcaacagtagacgatgacacacatgctgatactaatgacctctggcacccagcacttcgctgcattcctgttgtcacctgttaagtgcgatggaattatcgctggtcgccgcaaattagcgcacgccttcataaggatggcaccgtactggcttcgcttctctcgtgtcaatcttgctcagcttatccaaaaggaacgaaaaaaagcgtttcaaacaaattccattaagcgctgagcccttcaaatgacattcagtttacttgatgaacggtccgtgcaacggcaagtgtgtcggtggaaaaaatatacagctaaaggcgactctctatataccttcgcacccgccacaaaactttgttccatttcaaaaggcgtagaagaacatcatttctatggcgacctcgtcgggggagccagcacgacaatatgcatgttcttgtcgctttacgatgttgcgggcggactctctgtcatcgggtccaagaggagtcggaagacatcagtcgctcgccagggaacgcacgtctcgtgagcctgctaccgtgctttcctgtactccgtaaaaccaccacttgctgagggttcgtgaatcctagttttggcgttgtgctgaagtggaatccccttttggttcgctgtttcggcggcgttgattggctgactctccgttacgggaattcatatccgcgtctcaggaggccgcagtgtgctcagcgctccggtgaccagtagagtctacgctgaaggtctgtgcacacgttctcttgcggacaccagtcttcaacgattttgcgtgttgccattctgctcagaatcgtcacca

SEQ ID NO: 3178 - DNA, 2000 bp, Toxoplasma gondii
  source 1..2000: mol_type = genomic DNA
acagagtacgacaacatgtgcatcccgcttacttgtgttttcctctaagcagccgctttcttcggctgctggacaaaatgacaggtttacgtctccccgctgccatctcgctctcgtcagccccctccagcgcgctgccttctctcagctctgctaccgcctccgtcgccgaagcagaagccgctgcctgggaagggttagacgaatcgccgtgtttccgtatgcctgcatgagtcgctggttgctcgtcatcgtcacttgcgtcctccccagatacctcggacgagccagcagaaccagcgtagtcttcgtcatcttcctcgctgtcactcccgaatgtcatgtccagcaaagacgccatcttgacacggaagtcacgtttgaggcgcattcaacgtgcacaagtccaacgcaggtgctgcaggggtgtcgtacgactcttgacttggctgtcccctggaatgaaacggacttcccgactccatatgctcctcaaaataaacagccgttcgttgccggcttaaccacttcgcccagaaaggttacgttggacgaaaaatcgcgagtcagccttttacaatgccagtccgtgaagcaaaaacgagaggaagttgcaagtctctggtgtacacggcaagcgcttcttaaacgtttgaccgacggtcctacatacacgcaaaagagaaagtgctgagaacagagcccgtgtacgtccagatcatgaagacgaaagatcccccactgcataatagcgttttccgcatctctcaacatacacaaaactcgaaaacaaacatgcgaaacgtgtctcgatggcgaaaacgaagaaaaactcgtgaagcaggagtcgcgggccaccaacggcgaagacggccttttgaacgagtggcgataattacggcaaggaagagagcaaagttctggcacgatacagaggaaaatataatttcacaccgttctagaatgaagaaaaagggcgggtcacagctgtctcaaatcccaatagctctgctggctgccaaggcttgcctccgtgtctggagacagttaggaggggcaaggtccaagcctagaaagcaagcatcaatcgaagaccttgctctatatgcatgctgcttgtcatgccgatctaaacgcgaagttcaaaaaacatttcttttcgcgatggtaatgtagaaactttgttttcctggctggcagttgtcagttgtcttcgcgaggaagcatgtcgcatgcagatccgcatgcagccatactcaacgaacagaccgtccgacagcttggcggaacggtgtactgaacatcgagatgtagaaaagaaactacgagtctgccggtctgctcagcgccaagatcctccaagtgcttttctgtggtgcccgttacgcgttttcgtacaggccttggttacagtgtgcacgaggaggcgcacatgtcccttttccttcaaatgtggttgggcgtttctggtctctcctacaggagaattctcggctaaaatttgtgctcgtattgtggtaggacacatctgcaagattaagactatggaatcgactgcagagaagaacgaggagcgcgccgaagccttgtcggactctatcacagggcccttgaaagtcgccgacggtatccagaaactcaggcaaattgggaaagcctcatgcccactttgaggaccgcttccctgaaaggatggccgtcttcaccttcctgtcatatccgagactgcatgcactcttcccagtgaaaaagttatggaccccaggcagtaagtgatggccaaacacccggtcgctttcccttctttctaccctgtcataaccttgtctgcttgtcatctcacaactctttgttgccttcaccaggttctctcggacgttaagaacttattgacgtcttaatttttttcgttgttcctttcctccttgttctcgaagcccctggtgacagcctctggactgcgactccggttccgcgcctcgccagatccgccgccagca

SEQ ID NO: 3179 - DNA, 1800 bp, Toxoplasma gondii
  source 1..1800: mol_type = genomic DNA
ctgcggttaaaactcgtgccacatcttcgggaatggaaaagcggtgcccgtcgaccaacgttgccttttctgacaccaataaccacagtttcgtacgcaaggttacagtttgtcagcaatggtggctgtgtgccggtgtgtctggccgcgtgtcgcaccatctgttcgaggcattgacagaaagaagtggccgtgtttaagcgtttttgctctctgtttgaccggttgtgaatgcgtggaaattcccgtgttggccattgtcacgattcaaacatccagatcagagaacttttcaatgaattgtctaggcttttctgaatcggggaagacgctgatgagccccttttgggccatttatcttgactatggaaatacatgtatcgcctctccgctagtagtctgcaagatgccagtttacccttgccagaatgaaaccgcccattcctctctctgcttcgctgaaaaaaatacctatttcatgttcccttgtttgcaaagaacgcaacagatctttcagcaccagcactctccattcaaggcggttagttaacggaatgctacgtgactgctgcctaccggatttcattgtctacggaggcgcagcttactcctcttacagtttccatggttttcagaggcactctggggactgtccgacgaagaaattctcgttacaaacacctggccaccgtgaaaatgcacgattgcccccgtccattcccttttgaggatcgttcgttttttgtttcgcattgcttgtcagtgaagggctgagtctggcgcgtcacacgctttttcacaagagcaacatggcacgacgaaagacattccccgtgtgcatgtttccttgaaagctccacactgcagatatgagaatagatcgaaacacggctcttcgcctttgtcgcgcaagttgaggacatgtttaggctcttaaattggcctcttaccaccgtgatggaattgagtggaacaatgtaacggaagccattatcccctctgcttcgacgaaatagccactcactcaccatcagctgccttgttgcgtaacgactgtgttactgtactatatgtttcacccttgaaaagaaattgatcccaaagaacctgtgtcagccaagtggaaacgaaaaaccacgtttcctacatacactcagtgaacattccagatgagagagcggcccgttagcccttggacggttttcgttcctttttcgtcagttttccagctcgacatcgttgccgttctcatatgagctcctaaccggaacatgagaaaatgggggagggacgagagggtgttgtcaagaatccaatgcttttcggttttgctgggcaggctgtcttcgggaaatgcgcctgttgaggagctctttcccatgaagcaaacgaggaagaccctggaaattacagccacagctttgcttgtcttcgtcccctcgtggctttcgcagaatctcctcgtcggcagtgccagcgctgtccaccgcgaaactcgctacgcaaagtgtacctttgaacgaactcgagctgagagaagagagcgcgaaagcgacagaaagagaaaaagtggaaagcacgaagtcccgacttctttgcctttctcagttttctctttttgctgaaggagtgccgtcgagtgcgggaacaaagacattttcgcgttcctgaggcactttttttttcaccaggtctcgaactctttgtggggctgagtttctcccgtcgcacaaatcgattgtgtctctcccgtctcctccctctctttcttcaaccttttgatttttcttttctccacaa

SEQ ID NO: 3180 - DNA, 4727 bp, Toxoplasma gondii
  source 1..4727: mol_type = genomic DNA
tagcatcgatcatcgcatctaacaccgcttggaggctacatgcatgtagccaccagacgaaatatcggacgaagcttcacaaagtgaacctttccatggtgtatagtggtaaccggtgtatatttgggaaaaaacacctctgtacctgctgtgcaaaagccattcattttggtagtctcctttttgattttagtctgcgcataatagttaggtctgtctctgacggtcggtttgtttcgaacactcgcatcgacggaatccagttaaggtcgaagcggagtatgaggcattatcttctctcgcgagaaagggggatctacgatcacctcttaattcgctagctagtcttcgcgtgtcagagtgctcctgtgtacggataaattttggtacgtagaaagagcgaatgagcaaacacgaagccatccacagagcggaaaactggtaacgacgtttatggaaccgttttcaagatgtcctcgctgtcatccaatacggctgttcatcccagaagaatcagacacctcgcacaaggtcgtgggcttcctcctcgtcctacgtactgaaaaacgtctgtcaacatattgtcggtgctatcttgaaacttcttaatcgatgtttgcatacattaccagttagataaccaatggagctagattccctgctacagagagcatcttccttctaattataggtgctggcttctccggtcccttaggagcaatggagcaacaaatcggaagaaaagaaggcagcgacaacaagcaaattgcattgtctcagcagaaacgcacaacgcgctgtctgtagacgttgcttactcagctcacacgttacgtctgacggtcaactatctttcctaactgaatcttgctcaatgaagagggaggaaggagccgacatggaagtgctgatacaaaccgacgactgtaagtcccagttatatgacaggatgtgagactcctgagatgtacctgttcttgttaggagggtggctctcccgaagtgtaagcataacacaaaaatgtctagagaagacaaaacggatggaaatgaaacaaacaacaagcttccaaaaggggagaacgcggtctgttatgttgtgttcttttaggcgaaagcgcctgggtggcaccggacctgttgattacacgtagtgttctcagctcataaatgtggaaataagaaagggaagttgcggttttcgcttttgttttgaaggatacgagctccagactgccattgaaaagcactgagggctctccagtttttcgctgggtctcggggggttttcattggcatccgtttactgtagaacgggatagaatctgtcaactcatttacgctctggaagcacgcttacaagagtcgggtgccgattcacgctgacctcacgaacaccaccggcatttgcatcgtatgtgtgtctgtacgctttcttgttcgttttttccatctgattcagccacctttcttgcggagttcgcgtcgtccagtttctgctgagaaaacgtgcagacgttagacgcctggcagtgagctaatctcactacgggtcaagaagtctgttcgctcctcttgctctgtttcatcgatccttcttgagcaaatcaactgtattcgtttttgtgtgtcggctgaggatcacggaaaacaaccccggtcctctgaggacatttgtttgtccgtcgttcccgtgcttctggttttgacagctgagatcgcaatcctagacaccaggtttcttcgcacagttcacattcgttgctttttttgattcattaaactcctctaccacctttccgactcctgtagtactcgtcctcccggtatgtcgtgctcttgggttttttccgtttttttcctccgaaggcagcgttcaggcttttgaacacttcaagaggactggcgacgatcttgtccccccgcctgctttcctttttctgttcgagttttttccttgtcatctcggaaaagctgctcgacaggcgtccgctttcctcgccatcagaacgctgaacggtcttttcaacgccacagactcgctttccacaggatatcttgcgctctgtcgggtctacgtgcatcgctgcattgtgcactgcggtttccttcaccttgctcacaaccttctccctaggttgcattctgtcttgctcccccttccttttcccggtttcatttgtctagttttccgcgtctgtcggcagctttctccacggtgtccgttgtggcacaaaatcggcagacctctagggaagatgacattgcgtgcagaacgccaggtggaatcaaggaaggagagaaaccgtttcctgagattgactaccgagccggtttttcagaaccgaagaaaggcggctttcctcttgtaccgagtagacgcaaacgccacaggcgcgtttggcttctgcgagtcttggccgcatataccagaacacagaaagagtgaatttttgtcgcagaatggcaaggcaagagagaaaaaaaaagccttcatctccgcttgtggaggtcagaacagctgacagcggcgacaagtggagaaaaggaagcccgtccgggaaggaaaatctcacaaatgcttgttccgtttggtttctagcacggatgaggcgactgctcgttttaccgccgtgctcggtgatccggcagaaacgagctgcgtttctgagactttcttctttcttgtttctctctcatgctgtcattatctcctgctctctatgtgctctcccgtttcgcttctcacccttttcgtgcagctctccctcctatttttcgttttcttccctaggtgtcatacccggtcttgccaatccgacacctgtgtttcagcaatccgcctcgtctgcagagtctgccgggcaggcttcacggcttggtccgaaggcacaaagcttcagttccctttcacgtcttgaagaaactccctttttctctactccttcagcctcgaactcctcagctgcccccttcctctctgccctgtctgtggaaggacacacttctccctctcccgagatgcaatcgcccgtctctccctctcattccctttctcgttctgcctcttctgaatctcctcttttcttattatcttcggtttcgcctcaagagcctctctctcccagcttttttattcaaacccctgagcatggacggactccaagttttgcccggaaggcggtcgggccgccgcgctcggctccaggtggcgcctatcgcaccagccatacaggcgctactcgaccttggatgtggtaaagagagaacacaaaaaccgtataaatgcaaataaatgcgcgcgaggccacgggaaggtcttgtgtgcacatacactcgcattccctttcactgtcccgctttcttcacatgtggtccagtgtcatcgggcctgtctctctgtaaaaagaaccttgatatttttctataactgtggatttccaccgccttttcgattcgcgcttcctccccgcatgcctgggtacccccaaagaatacctccatcaatccacatgccttaccccgcctacccaatggtcttctctgaagagtgcctgtgttttctgtagacatccagcgaggaaagggcgggacgagttcgtgtcgtacccgttctgcattcatggctcaaaagatgtgttctgaatcgggcagtggtatgagctaaacagctccatcaacaaaagccgcgttgaagatgatgaatccaattgagtgtggtatagatttacaatcttgcaaaactgacgagaattgaacgcaacattagccggacgctgacgcttctttgactaacataacatcatagaagatctagctgcattacgtttaaactgccccccgcaggcaagatagaatgccgtgcacagagccattttactgcgacatcagaggcgtagtatcattcaagaaccggcaagaaaggcacacccgaattgcgtgagacagagcgacgacagagtgctttgtcaccctttttcccgcttcctccacaaatctccaaccggcaacgatttgcttgtctatcgcaggatctgtctcatgtcctgttgtgcaatatagagactgccttggcttcctgtgctttgagatcagtctaacagagaggaggaaagttccccgctttacccacttgccttgttgctcctcgctgtctcagggccgcggcatctctcttttgcttggcaagtctcgtcgtctgggtccttcatcgtctgaggcttcggcgtgtggcccatcgcctgaagcagcgagtgggcagctgctttccgcctcctgtcgtctacgcctacggccgtctcttcactttctttcctctcttcgcttcctgctgctggtcagcaccactgcatacacagaaattcaatctttaccagataccccccttaaacaagtggcgtgttctgcgtattccgacccttaccacagacgttctggttgccactctctcgacctcttttccatcgcatacatccgcccccgtctgcactgcgcgttccgttcgcttccctctggatgcgttctaccttgtgttccagtcttcgtttcctcatttcttagtcaatatgccttacaggcttcttttccccccctttgccgcgcaaatttccgcaaagtttttctgtgtcttcacagggtctcgttgctcttccctcaacttgcgctgctcagccgtgtgttgctgcacttgtacgaagtggcttgtctccactggttctgggctctca

SEQ ID NO: 3181 - DNA, 2118 bp, Toxoplasma gondii
  source 1..2118: mol_type = genomic DNA
atgatagaatagactgagctcaaccatgacagacgtgttatcagtgtggttctctcgtcgaaacattccacgttacagcgcctgacaatctatggcggcaccgagcgtctcagcgatgtgacatgtttgtgatttgaagaaaaatatgtgtactcagcgatgtgacatgtttgtgatttgaagaaaagtatgtgtactcagcgatgtgacatgtttgtgatttgaagaaaaatatgtgtactcgtagacacccttttttggaaatcttccccatctctcctgctgtacgtatatataattggattcaccggtgtatcaatctacgagcactaacggagctgcacgcaaatggaagtaatcaattcttgtacggtttgtaagtactgaagcgcttttgtatattcggtttgagtttcggacatgctcattccttggacggctattcgtacttcacaggtcaatgcattcgccattcacggtaccatcacttggccaccggggagtgacggaactcctgtcgtgaaaaacatcatcgcagaaggtgctgcaaatgcagcgaacatgatatgtttgttccgtggggttgctgggacgccacctcgaaatagataaactttcaccggcgtcacgacatagacggagaacacgcgcagtcgcgcacgaaggaattcgcgtgcggctgaagtgattcgtgaacaagcccagggtgtcgtgatccagaagatgaagcgcggctctactcgcgtggtggatcgatgacaccgtcggaacgcccgacacttctgtgacacaaggtgccgatccaagaaggagaaccttctgaaacgagacggtcttcaactcgcgaagggaaatatgtccacggacgaaacaagaggaaaatgagtgcatgcaaccggctttctgtttacctttgtgattttcccacccgtgagagttcgtctccgttgccgacaagaagagaaacggcgcttccagtctctgaaaaccttgatgtgacgatgcgtcactcttgcttttcgtgctggggttctccgtttcttttttcgtattctagactttgttctgcgtcgtgttttccaagcgagactgccgatggaaggaaaggtcacctttgcggcaagcgtacctactttgtcgatttcctcgtcttcttgctacgtgcgtagccctgtccagcctcctgtctcccccacccccctagaaaaaacaaacacgcttggccttcgacggtctcgtgctccaatcaaccaggttaatatgttccttagacagaccacctcgaaaacaccaaaaaaacactcagtcaaccgtctattctccggcctctttcgtgttttatggcataaacagaagtgtaagcctgcctcactcaaggttctacatcaaaacgcgacgttttctgaccgcctggtgcgccttaacagcaacaccagtttctggtgatactctatagagtcatttgaaacaacgacgccttcatcccgaaaattgaatcataaggaatcacggtcgctgctgttatagagcaccaaagcttgtccaccttggacacattcggggttgtcattccctccacctctaaccacaaaccaattggaacgcacttcgtgatccatttgaggtggaaggataccgaaccttgtgctcttcataaaaaacaccaggaacgtgctgcattttcaagaagtcgcacacctaaacagcttccagatctcttgaaacacacgaagaacaagatgtcttcttcagcttcttcgaaggtcatggccatacaacaaagactgtcggcctttgttgtctttatgttccgtcgagacgtagatcggtggcagtttcgtggtgtctgtatggggcatctggagccagagtcggcatcctaggtcctgcagcttctgtatccgtgttgaggcaacgtgaaaaaggcggatcgactaggctgttgtgtcaaggctcgtcatgggtctcacaatcagtccaaaagaagttgggtgtcagtaccgtataacataactgaagccagactccgcgtcgtaggcattgtccgaagtcgtaggtaatttgaattttcttcggaatagcctgtccgtgcaggggctgagagaagcccagaaaaga

SEQ ID NO: 3182 - DNA, 1567 bp, Toxoplasma gondii
  source 1..1567: mol_type = genomic DNA
atttctccacacctctggataccttgatataacctgttagatgttggtaggacgccgcgtaggatattgaaatccaaaactgtcagctctcttaagaagcagtccaggcggctggtggtgtgcttgctgtagtcatcaagaacttgactgtcggtatttcataactggagccgccgactggaggtggtttctgttatcgtcccgcctgcgcagattggaagcaatgcgcactctagctcgtgatttctacaattgctctgaaacagtgctatcagggatcatttctgcacacagggaacacgaaagaaacagagaatacagctagttcgtggcaagtgtagcaggcatgccaaaagacctctaggttcgacgccgagcagcatccacgataaaatttactggtagattttttgtgttggtggaaacagctttctggcgcggtcgtgagtgtataattggcgtccaagatttccacgtcatactaccagccttctattctcacgtgaacacacgagaaaaaccagggaagtatcattcgcagatgttgtcacaccatgccctgttcgttagtctgtcagcggagacagcgatgggcgtgttacgccgagtttcaggatcctaggcgacagtatgctatatcaagatatattattgtttttcggaccagaagcgtatattcgaatcttacgtggcttctgcctctgttcccatttcaccagatgcgcttcagaaaagctgaagagagccgattttgtgtttaaaccgtgaatcaacatcacggtgcagcccttccgagctcatactcagatccaatttttgcaatggggagtctgcgaatgccggtctagcggttttctgaggacggacggacagtgaagcaaacgacttgtgagcttcacctggtctgcttctagcaacagaagtgttctgttagactgaaacgaaggtgtcgcttgtcccccgtttacttgcacatattatcgatagatatcagtgtccgtccctcggctccatgtttgcaacaccaaacccgcagggtgtcgggcgaagaaaaactccgttctcagccgggggttgttgcgccgcgtctttctgctttttggttttgcagacaataggaaacaagaaacttacttgcagcgataacactttctacgcacactgctacgcaggagccgggtggtggcgaatccatccctacggcagctctcttggaagcagctgctcccttgttgtcttgattttcttctctgttgcagtcagcatctaggtatgccacatttacctctctacagttttctaaaaaaacgcttgcctcactaggacaaaaacttttaatggtttgcggcatcttttgaaaacgtgctcgtgatgtgcatgcgtccgttcgagagaaacgttgcgacacggaggaagagtcctgtgcgcctttccagcttgtggttccgcattcagacagggtgagaaagtcgcttcctctcgtgcattgtttgaacttttccattgccgtctctttgtttgtcttttctgcgacctctgttaccatttcctagcctcgacttcgcca

SEQ ID NO: 3183 - DNA, 3656 bp, Toxoplasma gondii
  source 1..3656: mol_type = genomic DNA
ttttaccaagcctcagtgtactcgagaagtgacagcaagtctgaacgactcgaatcggagctgcaagcgtcattccatgaagagggaaatatgtatatatatgtatatatatacatgctcatgtggttgtctggggagtgtgcggcttagggaaggcagagtaaactctcctaagtaaaagaggctggaagactcgtggactttttgcgtttcttcgttgcccctcgtctgcgtactgctgtatcgcgactaagtaacttggccacgttaccgtctatctcgcaggcgacccgagaactttctgacagtagactacccgaacaaggaagggtttgtttccgaccctttttcctcagcaagaaacagagaatcagccgaacgtttgtgctcacagataagacaaatgcgtttcattggatcccggcgaagataccggttctgagttgagattttcggtacagaccctgatccaattaccctcaccttcgatgaagggaaatgccacttgacgcgaacagtagtttctcgtttatgtttcttgtattctgtctgaaactgtaagaggagagctgttaatgatatggtggcaccgtgcctagtatgtccaaaacagtatcgtgagaagaatctgacacgcgggttgaccccagaggacccgaactcgatcactatcgtccccgatccctacatcgctggccaacagtgtgagccacaaccgcctggctcttgaaagcgaacgtcccaaattagtgacaagccacgacaaatttctaaaacaccctctctgtagcaactccagtgtggcaccccgtaccccttcggggattccgcactcgtgatctgagaaacatgcttacgtggaaaccactcacaaaagctgacacacgcacattcctctcggcgccaaacgcgtctacccattctttccagctggctacggccaaaactcctggtaggagaaatcgctactaggcaattgctggtgcgcggctctaacgcaacactactgtcaaacgcataaaacgccgaacaacagcgtggaaaccaaaacatgatgtgcatttcgaatggcagaaatgctgtctcgagaactctagcaccttcgcactcgtgccgcggcaaaaacgccagaaacgagatttctgtacaggcctactcagcgcctttctctgtcgacccgttctgctgagcgtgtcgtcttagtgcctccgcggaaagtgcaaacagctaaatttccgctttgggtgtccatacaccgcgcggctgcagttgtttgctaagaaaaatagcaaggtgcatcatagtttcatctgtctttgcaactgcctattcggtgcacccacgcggacgaccaccgtaatatgcaggtgtcttccgtggttttgtccggggttcgtcctggacgggggtgacggctaaaagaccccgtttcgcggtgaagccgcgatccaaccggcgaatcgtgaggaaaaaaatgcaccgtttttccagtcggccagaaacaagagcggcttggtttctcggtgcgatcacgccccacctccagtgggttttgccggggcatgcgttttggtggcggtggtgggaggaactagccagaaaacaggaggaactagccaggacgggggtgtggaggaaacgggttacgacgacgtgttcccctacggtgtcgcttgcagcgcgctgcgccaaggtggggaagacgcgattggtcggtcgacacaccctccactacaatcgttcttctggatttctgcccattttacgcaaagcaagaccgacctgtgcttttttgcacgcacgcgtgttttcgcatttcagagtctctggagagagtgtttcctccgtgtgtcgacaaaatggtggccaagaagtccgcgaaatccgccaagcctaaggcttccggcaagtctggcaagggcaagaagaagcgcgctgagtcgtacagctcgtacatcttcaaggttttgaagcaggtgcaccctgagactggcatcagcaagaagtccatgatgatcatgacttccttcattgctgataccttcgacaagatcgcctcggaggctggcaagctctgcaagtacaacaaaaaggacactctgtcctcccgggaaatccagaccgccgttcgtctggttctccccggagaactcgcaaagcacgctgtgtctgagggcaccaaggccgtcaccaagtacaccggcaagtaaattgcgaaaaaacgccctccacgtcatctagacggggcaaatggcgcagacgccgctgaatgattctctcaagtagtctcggcagtttacacttcgtttttcatggctcgattttgcatcctgtgcagtcctgtcataaccaacttaggcttcactagaagccaccaaacaattttcccacaggggtccaatgctctgtcggtgtcagcaccgatgagcaccaatgagtgaaaaccagtgcgctgtgtcgtttgtctttggcgacacaacactgtcttagcggggtaaccaatcgcaaggccgagaaacagtgttcgggaggaggaggtggtgacgtctttttctgacatgaatccggagcagggagtgacctaatcctgtcagaccttgccgggtatttgacagtgctctcagagtttaccctttctctccccattcgctgggattgcgtgtgagtggtacgattccccataggcgtgcgctgcaaaattcagtgcagctgtttcctaatttttttatcgtcgggtcttgcgaattcttctgtgtagctcttgcggcgtgtgaggggtccggattttttttcttgccgtaagcacctacacacattgttgcagggcagatggtaggccgttttttgattcgtcacagggcttttcgctgagtgctccgtcgcttcagtaattttcacaggggacagacaccgccggaatcagagatggcactgaatcttctgaaacttgtcggaactccatggtgtgtagggtctggggtgctcatgtcaattcatccctcttctgtaatttgcttcatgtttataatgtatcgactgaggtgaaagacctcacacaccaaatgtttacgttgttccgttccgccgagttattctcaagcgtaggtcttggttcatatgttgtgtgagtcttattggaatgcatcggtagagtgagtgttgaatgcaggttcgtaggagttagagtgtcttttctcaccctccacaaagtcgtcagaacgcaccacagggttgcctaagtagtggatgattctgcaggattccgcagtagcgtcgctgttcacgggctatcataacgtgcataactttatgtgaacccgttttggtatgcttcggtttgaaggctgatacatcacgaaagtctcgtatttgcgccacttgcgctgctgaccgctgctgcgcaacagctcttccagttttctgtgccaccatacggtagagcactgacaccgtgttacgcaggtggcgcgggttcatggaagatataaagtgcgtcacgcatgcgcattgactttggctctgcgaggttacgtgatgctagaacacttggaacctaacggcggccctactcttttccaagaacagcaaaggtcatgcttctctccaagaattctgacggtgaaatcagaaaagctggcagtaccacgtcggctctt

SEQ ID NO: 3184 - DNA, 2619 bp, Toxoplasma gondii
  source 1..2619: mol_type = genomic DNA
catccagcacttctatggcctccatcatgtcccgtttcgagaagaagctcaccttccccatgactgaatcaggcgcatccggatccttcctgacctctgcgaaaccgacatcgccaatgccccgaaaatggtccttcaggtcttgccaacttccagacggcgggagcccccgaacttccagcacgaaacggccgcggcgaccagccagacctcgcggcaacgcttcttccccaaaaccatcagggcggcttgaacgcgctaggggaatttccacgcgcagaggcgctgcgccgcgcatgcctgggggcggccgaccgtgcagctgagcaattgcgtctctcgcgtcccgcggatccgcgtactctaagaaacagtacccggcacctgacacctgaaaaaacatgaagtataaacggagtgtgaaacagtgcccggcacccgacgcctgaaaaacacaaagtataaagtgtgacacatggcttgtcccgtggtagctggagttgcaaaaacaaacgcaccctgcaacggctaacttttccgcggcttgcgctccagtgggatgaacaccttggattccacgagggctgcaggtgcggactgggagggagaaatccaactaagcacgggtgtatgtactgaaccccgacgcacggacacagattccagcagtgtccagtcctctagagaagcacgtggaagttcgctgttcttgcagacgttactcgggtgtgaaacatacgatcttggccacggatccccattggtcctgggtactcccacttgtgggctcagacgactattcccctccatcgttgtcaaaggttcgggaacgaatctcgagtttcctctcgcaaaaacaccggcttcacagccgctccgggcacacattcatccgtttccgttaagatacgtggcactccgcatgttgcctacacattcgctcactgctgcagtgtagagcaaatgtcctttccgatcacggcaacattccaaccgaacatcaacagcgccttccctttcacgggatccaacacggtatgcgtcgacctctctcagcttgtgggggcacaaggggaagcacagcagtagcaaaaaacacgttgcaaacaagtgtctgtccaataaacagagtctcgtttttgttcgcttcccgtctggcccgaagcatgagctagagggcatgctttggagtcactagggttcgacgctcctatggggaagacaccgttggcgaatttgatatgcagcgtaccgttcgtttgaattcaagtttgatgatctttccgaacttttcgaactcgcgctccacatctttgtccgtatactctccgggtaagcttccgatgtatattcgtccgctgccaccacctccggcggcgcttctgtctccgccgaacattgtctcacgttctggaccgtgtaagatacaattatcagactttcctgagtcctcacccgcattaaaacattacgtttgtttggcactacctttccaaaaaggtgacctcggccgccgccgtctgattcgacaccatccgcagcaattaatcagcacggcagtggcgtcattcgtgcgttcattgaacggtagaactgcatgtgactcaaaaagactgccgcagaagtgctcgtgaggatcgtggcgaaaacagggatatcactgccgacacgaacatgccgtacaaccaggcgtcagcgcgttcccccgtgtaagccgctgtcacacagaggtaacgaattggctacaatggacctgtacaattcccgctacctcgtttctcgtgctcgtttgagcaatgcatgaagactgaacaatgcacggaagacaggaactgcaccggcctacggacgcgcaacgggtgtaaggttcaaatgaactccggacggagaggtcgaccgcaagtagcacacggctctcgtcttcgaagcgcttttctgcagccaccaagtgagtagtggaaagcaaaagtgacgccaaaaagagcgagtgagtgtggaagtagcgaagatgccacacacggcctctccggaacacaaaaaccgttacacgtgactggtggatgcggtgtgtgcgggtgtcaaagggtaggagacgcgcctttatacggtgagtcaaagaatgcagtgattggacagtcggtcaaccaaacacacactgaatattcgttagataacttcctctttactcgatttgttggagatagcacagaagataggaaaagcacctcaggacgggggggcggaacctcatccgagctagcatttcgaatatacaccgccggtctatctctttacagcggtccagtcaaagcgtgctgttgggtgacatcatcaaggtcaggggggcgcggctttttttttgcgccagacactgaggcgcgcctgctgttgccgaatttgttttcacgtgcgaacgtaccaattcaggatcagctgagtgacgcgcagcgtaagtcatcgtcaccacgaacaactctgatttcctggtcgatacagccccgccttgccgcgagagctcactgcgccccgttgtcccgttgaaaaaaacattcaaatcaactgcggacggatggttctcttttctctatgtttgttttccaggacacacaggcactttta

SEQ ID NO: 3185 - DNA, 1875 bp, Toxoplasma gondii
  source 1..1875: mol_type = genomic DNA
tatctcctcaatcacacgtatacgcccgaatccatgttgccaaatgtaagagcttctcatactcgaaaagcatctgcatatatacgtatacatacatatacatatatttacatatacatatatttacatatatatatatatatatatccgtatggaaagatagagacttgtagatgtaggtggtggcattttgcacaggaggaacggaacctgtaggtgcatgggtgtcagttttcgtgtacttgtggttcttttcacacgcaccgagacgcaagcttttgcgcagagttctgcacttacggaacggagagacgttctccacaggtttcacgggcatggtctccgagtttcgcccaaaagcagtcggccgcctcgagttccttgcggaggtcactgacaacgcgcattcgcgttgaagggtcctcgagctgtgcaaggacgtcgacagtcgacgcattccccttcttttcgaaagcagttctctcgggaagaagcggtgttgtgtatcctctcgaagcgggagaccttccggacgctggcgctacggagctcccggggtggcctggctgctccatggttgccgaaaccaactgggtggaaataaagaaaaggcagaagtagaaggagaaagaagagggatgaggggaacgagggaaagggagcagaacggaagaggaggaagacagaagaagagaagaggaacggagagagaccagaaataaaagacacgggaagcttttctcggagggtgaccggaaacgacagtggaggaggactcaccgcgagacacgaaaggcgcccaggtgcccctttttctcttgacgaacggaagaagcgacgaacgaggtacaaaaacgacaaccgggaggaacacggtcgaataaaaactaagattgcacggtttgtgtgcggcttctccgctactgcttcgcaagctaccctcaaacaacgcacgacactggccagcgcagctccggttcgcaggtcgcttttcagacgtagagagaaaaaagaagcaggagtaaaaaggaagaggcacgcaagtcaaaacgcctggcagctgtttgcgtttcgaggtgtgtcgcaaaatcaacgagaaacccaagcagcacatgtgcacttgaaagaggttcgattcaggaccgcctccctagcagatagagaggtgactattgacaggaagggtaccgcagacttctcttgtttactggactcgtctaccaacgcaatgcggcacaccgttccagtcaaaacggtgttcacgaggtccgtcagacgactccgaaaaagaatgtgtagacagggtcctcgggtcttttcttgtttccaaaacgcggtggcgtcttgttggctgttccgtggcgcggcgagtgcctgtctgaggaacgagatccgcctgccatttcgctgccggaagttcagcgtttacaagagatcggcgctctggcgcatgcaggccgcccgcagacaacttttcgcggaagagctccggcttcacgaaatgatgcaactccctcgaccggggacgccccgcgtttttccggcggtcactttgcagcgacggttgccacaatttccgtttcttttccggttatttttcgtccgttcgaatttggtgaggacgcttctgcggaactctccccacacccgtctgtcgagacagcacctccttcgccttcgcgtcactcccgcattttgttcccacccgccgttctcggtgtgtcgggagttccgagttgtgcgctcctgcagcattcaactgcagagaatcctttcttccgggcgacgcaggtctggttccgcagcgcgcagcgttcgtctctgtttttttgcccttttctgtcggccctttctcctccgtttctccactcaaga

SEQ ID NO: 3186 - DNA, 1457 bp, Toxoplasma gondii
  source 1..1457: mol_type = genomic DNA
gattttctcaaagatcattgggtgcaacgcgatatggcagtcgttgcgggccaagaaaacgaattctacaaacagggtgtacaggggaaactgctcgcacgcgataatttttgaaatggaagttacccttggggcagtgctgcttcatcttgcgcaggcatagggatgtttagtatccgacacgatgagcctccgggtgtctgtttatctgctcttcagctccagtgtcggatccccatccgcggagatagagtacgaagcggacgatggggcgaccaaagtggtcatggaagaggagaaggaaacgctggtgcccgtggatgacgatagtgatatgtggatggagtaggagcactgacgctttgagcagattgcgctggtccagatcgcacataccagaacgtgctctgttttctattggtgtaacgaagcagggaaaagcagcactgaggtaatgcagaggaagggcaattcgcccgtcaaacggaacctctacttgcagatctgcatcaaaggtctccggacagcagcacgaatccaccatgttggaaactatgcgcggctttattcggtgtttacacaatttgtttctgttcgtgtgcatcaatttctagcctctcttgtctatcactgtcaagcgaaatgtgtgacaatctgtcacatcgttagcactttgcccatattacgtcatatcgcgcctgcggaactgcgacgactgcccacggtgctgcagctcgtttagtcgttttgaaacgaagcaagacaacactcacgtatgtttttcagatgcagctaaaagcctctacaggtgctacgtgatttgtgttcgtcacagtgtgcgctgtcctgtgttcaataaatcggcatttctgacgcggcggcactccagtttccagactgtttgtttttctcggggaatgagtcggcgtatgccagtgtcgtcagcttcatttctgggagttttccagatgaacgaagtgaatttgtttcagcttgtctgacgaacctctcgcgtggaattcgggacgttcatgcgatgccgaccattgacgcgcgttcgccaatctgctcggtgaaaaaccgggcattcgatcgacggtgccgttcgttacaacttccaacttattcttagtcgatgcagtttgcgaccacgccttggatagcacgctgcttcaagatacgcgagtggcagcttgcgacacacgtttgaacttagtaggagaccggcactacgtgtgcaaagtcctgcgtttagttctacagctaagaattcagttgtacaactggcatgcagcaagcccaggcacctgacatgtttgagcaataaacactccttaagttgcgccgatgcaagtctccacacctcggcggaaccgcagcgtaaggctgtggaacggaccgtgcgggatgtcgtccgcggacacgccagccaaatgtggtagataagaaacacggaa

SEQ ID NO: 3187 - DNA, 3916 bp, Toxoplasma gondii
  source 1..3916: mol_type = genomic DNA
agtaagacgcgcctggagtctgtttcctctgtttctatttgatatctcgaacggtgacgcgtttgcagcgaaacgctcgtgtgtacacggactttcgaactcaatgttggctcaaatacttcttgtttaactacgtttgtgtctgccggtgatatgccatatcgacggaggggcggagcacccgtcgtgcaaaatactgacactgaccagaagaaaatggcatgcacaggcaaacacacacatggtttttccgagaaatcggcactgcatggtgcaactcatgaaccgccttcagatgtaacaacccctcccgaaggagatcgtactgcgccatgtagcaggacgtccacaatcggaaatattcagaggcgggactggcgacctatacacagagacactgatccaactatgtattcgcgtggatacaggggcgacaaagggatgcgacgcacacacatcagttccaggggaaaatatcgacagccggttcagtaatctggatactccatgcgcctcttgatgtatgactccttacactggaaagcgaaataagtgttcgagttttagttggttcactcatggaaccaccacaggaaggccacgcttcttgccttctgtattgtttactctcgctgttgttgggtcggcgtgtgttttgtcaactgggttgaaggacgccacggacgcttgccttgtgccgactccagaggaaccttttgctcttgaacaccacgccaggggtgtccccatagcctgaagtttttttaactctttgacgctttgctaacgaaataccaagacctctaatcaaccgttctccgaaacccatcctgctcgcccacacggttgccacgacacctcgcggccgacagttcccggatcgttattttcatgcaaataaagcagacatgcctctaccactgagacagaccctatgaatttgccttttgggtgcccaagatatttttaagaggatatgacacctgagaggagtggaagagggtggcccggttcgcggcgttttaggtgccgcgaagaaacagcccagcgagggtagcgttccaagatcatcgcaaaaggcgacttttgttgtttcaccgaccatgttctgcactgtcgtgacaacaggtgttgcaataagaaagcaacacagtagggaacatgtgcccctttcctctgtaggaaagcataactacacgtacacgcaaaggcgtcaactgtttccgacatttgctgagtgcgtgtacaggcaatcaatgctcataacagtggcatgcgtgatgacgcacctcttcgatatatatacatatatatatatatatatgaaggtgtggacgttttgttttcagttccgctcgttgatgggttgaggctgtcttcttgactgggaccatcgattgtagtttgggaatcaagctcagctctaaggttcagccattgcctgcaactcccaaatgtgaagagggtttccttcgttttcaaaaatcatctttggggttcaggattttataggtaactctctgtttctggaatatggaagaaagcaacattcacccacaaactgttcgagcaacagacctttctgccgcctcctttcggctgtagcctaaccgacacggagcgtgcgactgttagtttgctcgtccttccaccagctacacttccagctgtttcccgctctgactgagtgatttcttccatgagccacactgccgatggctgacaaacgattagtgtttcagaaggcctcaactcttctgtgtctttgtgtcacaagggtgtaggaacctcatgcatgaagaaggatgtagctgcgatttgaactgtcgtgacaaggcaagcgtccgtgacagactgagagaagagaaacttccgcaacaagacggattcgagtgtcgctgtgtacagttcttgtttcgtgggcaccgaacaggaggcatattatcaccacagaacgaacgagcgcgttctacagtccgggtttcttaggttcaaagggcgagaacggagtgtgcgcttgccagcaccgattgctcggaactcgacaaagctatggattgcgtctgctatacgcctaacctttctttaagcgacgaacccgcccggtccagatagactttttccacctctgggttaggttcacgcgaaaggcaaagacgcgaaagagaattcaagttcgtccgactcactaaccttccttttcaaatgtgtttgcgcctctccggtttccatttcgtggaagaagccggcgttgctcgctttctttcccagtcgaatgcgacaaaacgaccagagactcgtgtcttttggcgagtttcgtgaggaagacagttccttggtgagtcagttgtgcgtaaacggcgagcacggtgggaccatcaacgtccggcaaaacaaacatcttaccgggaaaagccaagccacagagaggcactcgcttcaccgaagtggcactcgacgtcctctgtttttctgtccacctcaccggtgagcaacggccagcagtgtgccgcgcaactccgatcgcgttgttctcgcagcgttttcgcgggaacgaaaccgaccatctgtgtcgaggccgcttagatgcgttttgcactttttctttgcctctgcgacttaaacgaccgctgcaccgtgctgagcacactgccatttcttttatgactccctgcgcgcggttctgaacgagcagaaaaaggggagcatccacgcaagtgccccgaccgacttccgcgttggggccataatccccccgtgtaaaacgggtgaccggttaccgctactgcgtttttctcgggcggctttctttcgagagacagcggacgacacccaacgaaaagacggcctttacgacacgatgctccatctggaacaaaagttgtgaggccccgcttttgtcgctgaggaaattccttcgcgacaaacaccacatctctcacctagcgccgctctgtccccccagagtgcgcacattcaccgagacgctgcgtgttagacttcctcgttttctcagactttccacttttttcctcttcggttccttgcagacggaaccgcctgcctttttgtggcccgttcgggcggttccacctctgggaaaactacggaccttgctacggtcgctccctgccggctgtcgaaactgtcggtttgtttcggattccttgtctcctcggtgccttcacgcgaatcctgcccacatggccggcgtcaactgtacagaactacatttccgtcgctccccttcgcggccgatcaaagaactggattagcgtatccactgtgcatgttgtatgcgtacggcagcagttctttgtatgtcgcgctccgaataggtttgctaaatgtgactctgatagccaacacacgggctcggccctagagtgtgttttgtgccgcggctcttcagattattttttttgtcacagacactctcctcgcttctcgccgaggcaatgagtcgcctttttgctttgcttttgcgagtttgtttgccgctgcgtcagcatgggaccacagctcaggttgaggacagcgataaagtgttttttgtgagcgcgcctctccccgtctaatagtggcggttttcccggaccttgcctgatttctcactttttcgcgcctaggtctttggagtgcggccgtcgcccagttggggtctagcctcctagatacccaacgctccctttctcctttcgttccgcgcttgtcttcccttttgtctggctggaacacgagggcgcgccgttctcgagagcgaagcgggaggaagcatggaggctctctggatgcctcgtggtcgctgccgccgccttccaagtcttccgcctgtctcagcgcggccgctgtcgcctcgcaccaagaggtaggcagcgactccctgctagcgagaggccgagagcgcaggtctgca

SEQ ID NO: 3188 - DNA, 1492 bp, Toxoplasma gondii
  source 1..1492: mol_type = genomic DNA
gaacagaacgaagctagcggcattcgtgcaacttttctgcaatgaatgtgtacgagcatttgtctctacagactgtctgcccattggctttagcacgcaaccgcatgttttgcgtataccggttgctggaatgtgcgactcaacagagttcagtctctttcaagctggcacacgtcagggtctcgatgccatgataaacgcaggcgaaggagcggatacagctcataatcctgtgttcccggtagacgccgtagaaaaaccagcataatcgtgtagtcttggactgtgtagactggacctaaactacttaattgttgtcagcatcctgtgacctggttatcgaagcatcattttcttttaccaagcgcaacaacacagcgctgaggacccgtgacctgttgacgaatattagtccaggggtcacttcagccacgtttttgcttagtgcgtacaagcccgcttcctttcgaacctctttaagaagcctcgcgaggagaagaaacaccattggtatcagaagggcagcagtctgaagtcttctggttggcggctctgtcgctgggctaaggcactttgctgaagccctgtcagccttggacattcgacagcacacgcacgtccacatgtcgatttcgtaagctcggtcatcgcgtcgcatagttcttgttctatgcctctacgcaacagctggacatttgggacttattggagacgtggtgtttccgtcttcagcttgtgcggatccttggacaaatcctgcttgcactggttgagccacgtaaacggcacagcctcaccactgttgcaagtgtacaaccgcagaacaatagtgcccgaactgctatcgtaccacgagagaacagaggatgcagaataagcgatcaactatcacattttcggaaaactaggtatcttagtcaaagagtttttaccaccattcttcctggagctgcgtcgaatgacgagagcaccttcgccttcagaagtccacggctgcttctgcaagcgattgaacgtatggtgtttcgtgcaaattttcatcagtttgccgaatgattacaatttcagctctcacaacctggtgtcataattaatttcagtcagatgagactagattttgcaagtgatgcttttcacagtgtgtgcacttgcacaccagattgattgtgtattacaagatagagtggcgtatgtgtccaagccactgaatccctcattctggctctgtattgtctaattaaggagctgtgaaccgatattttcggataagtgagactcgtggcgaccgagccaacactacagtgcaactcttgggacacaagcatggcagaggggctttgcagtgatcgaaatccaaaagaccaacatccgagccctcgcttttgggagcttttaaaatgatatttggaattgctgaaggcagaaatttgctgcagctgttcacccagacaacgaactcgacaaggcggatccgtgtccgaggctcgacgag

SEQ ID NO: 3189 - DNA, 2182 bp, Toxoplasma gondii
  source 1..2182: mol_type = genomic DNA
aagtctctcgtgtttagacgatgggcaccaaactcagtacatttccttttacattttttgtaaaggcaacacgaatgcacggcagccaccacaatgtgtactcacccgaaaatacgcccagaatacctggtatcagtgcagaacacagtaatgggacgttcgccgtgactcgcacagttgatggtgcagtggctgccggcagtgggttattcgtgacagttcaagagcggggtgaaagcaataggataaaaacagcggaaaatttacggcactcatcagcctcccttaccggcgcctgagcaagccgcacgcctcctgagaatgtgggtacccacggggtcaccggacgaaatgccgagctttggcggtcgacggatggtgacgccatctggcatgagcaaagagcctacgactggctccgcaagcattggagaggaatccgatttcttcccttctgcggaccgactataaactgaagacagtgaaccgaagatgcctcgcgttgtgcagcctctgcccagctgcggagtgggtgcggaacgtgtagaggaaggcgttcctctgggcgctgaggaaatggttgatgtggcaccacgccggcgatgtatgccactgctcagcaaagaaaccgagatatctgcgtggtcatccagtgacgagtcgtacggagacgtgtcgggcggctgaagtttgatgctgagctgctgtttgggttcctcagagttactaacaggtgagcacgccgcggtggaagaatttttacaaacctcacgagctgcacgcggccccggagtgggcgccgtgtgctgctctactttgctagccatgtgaaaataaaagtgagcgacaccaggaaaagaaaacgtaccactctacttcgacacattcggttcgtgcgataagttactcggtcggggagcctacgcgtaacaacagagaaatgcaatgtccccgactaaaggaaattcacaatgacgttatgtggaaagaacgacaacgggaaaaggttttcgaactcatggaacgtaagatggcggcgatccccctctgcctataaaccgctgctttgattcaggcgggtagcagaccactgacgagtgccaaccacgaccgatgttgtttaggcttaattagtgcttgtggtgcactccctaatgacgacgagctcaaacatgacagacagcatgtgcatacgcaccacagcagcaatacacctgacatggagagtcaacgaatatgatgacgccttttgctccaccagcggattctagtacctcggccagttattcgggaaagttatgcagcattataaaggatagtgtgtgcgttggaaagtgctcgtcaagcattgtagatatcaatgtgcacacacagtcaaactgagcctcgccctttgttggcgagtacgcatgcccgccgctgcagttgcatgccctttcccaacgatgcatgtctggctttcccgtgtttcctcgtgttcgagcttgaaaatcagcgagtatcgcgaccgggacggccccttctgtgttcgcccgtagccaaatacgttatgccggaagtcaaaagtacaacaaagtggacccttagtaatttcactcagttggctttatggtttataagcaccctaaggtcgtgggcgaggtgctcgccgcaacactgctcagcatccacagtttctgcgcacttcctttttggatcgataacatccagataaccatgacaacaacgccgtgtttcgtaaaaaagctgaagtccagtctcatttgtaccaaaaagttgactcatcttacaccgcagcacctgattttgccaatgacaacagtcattttcggcagctgttttcagacgtgagtgctttgtagacacgatcgttgctgtgacgcatccctctcagctcagactttccatttctacacgaatccctcatcactgggaagcaaaggaacacctggtcccagtgagcgtggggatgagtcgtcctctgagtcagcctacgtgtctctgtacgtttcaccaagcagtcaaacacggcagcgtctggtgcgtcacaggtaggtcacctgtatgtacaccggatgcaacggtcccccgacaaaacactggataggtatggtttgagagtgttgctgcacagttcccggggtagaaaacggaagtacagtggagcactgcaggactgcaa

SEQ ID NO: 3190 - DNA, 3053 bp, Toxoplasma gondii
  source 1..3053: mol_type = genomic DNA
gcaacctacctgtagatccctgtactctgctcggaacactgtggttagcggtgcaggcaactgacaaattgaaggtcttgcacctgtaggaagagttgcgcgaccttggggttgcgaaccaaggtttcgcggaacagagtgccagatttgggagatttgacgaatttgaatatttcgtatcgtggtgctggtagtcttctcctccctcatatgttagtctacgcggcactgttaggactacctatatggacgatggtcgattcggtaatggctaatctatacccagtggtatacaacatttcactcttttgttgctttaccagtgctatcgtggggccctttagtcaggataggtatagctctcttgctttttcttgccagtcttatggagggaaaaagcagtctgttccctgtccctggctctcgcgcgattcagaagaacccgccgcagactcccgcttctgtagttaaaaaacaatgctcgaggaatttccgatcgagggggagggggccagtgaaataaagagcgaccgagagttctgtgaatggttgcttcttcgaagttgggaaaaagttcagaaggatgcgtttcaaaatcctacaccattaacgttggtccacatcggttgtgtgtatctcggcgtggtgggttgattccaaactcggaggctcttgattgtgggtcgccaggaggacctctggaagtttatttttctaggcatattggatgtttcgtccaaagtgaagaagtagaacaaacttgagatgttacagcaatctgaagttgcgtttttacttggattgcatagcactttattagaaaaatctggtacctattaaaagaggtggatcggtaattcacgcgcaggccaaactttggacatgactttcctcacagtcaagtccactcgacacagagacggtttagtgtttctgcatctctgattcctcctgaaagaacgttagttgtttcaccagaaaagcaattctcatcttgaaggggggtccgccacagatacaacgtatttgaccgcatgtgccgagaaagacaccttgtgtcaagtttcgtagaagctctttgccaatgaggaaaaagggacttttctgaaactaactcgcgatttggaggttcgcaggtgtatcctggaaacgtctgagcgtgtaccggcagacttttctggggaaaacactcgaggtcggtggacgctttcgagtgtcgcgttcgacttccgttttcttctgattctctgacacaaacctgcgacctactaaagtgttgtctcaaacaaagaatgacagagaaaccgctgtcactgaagttcagaggtgaacgcctgcattcgacagtcccatggcacatttgaactcatgaagagcacgaaaatacactcttttggaacccattcgatctttaaaaaatatggaaatctaacacacccaatctgtcttgaccagtccagtggcgtcgtggtgtacacagcagtcataaagaacttgattgtctgtgtctcacagtaactggagtcctattgggcgtctcaggaactctggtgtctctgttgaaatgttgtgcagtccacgcaccggaccccatttttcggcccgcggagcgtttacacaaattcacgatctcctggaagtgagaagagtacaacgtattgtagcgatgatgtctgtcgtctattcatccgtgaacatgaagacacaccgcagcgaggtcgagtggatttcaaacgcctgacaaagaaggcgtgaacagaacttgaatccggtaaaaacatttttttccagatctacaccagtcgtacagacgcagtctatgaaactccccagaagaagcctccttctacggtttggacctagtggctttctcacagttcaagttaagaagtcctctgcccatagcttcgtcaacaaaggtgaaaacgaggttcccttgtctcggccacgaggcttgcatggaaaagaagatgcaccccctcccctctctctagcgtcgtccggagtctaccatcaactcggccttgacaaagaagattccccttttctcttcttctgcatttcatttatgccacagcgcttgcctgtgtgtgcacgcaactttctcctttggtgtcgagatttaaaacatgcaaaaagaagacagaaggagacacgctgggctccaatatctgggctgaatagccgtccatctccacagcgcctctcgctgggtttcccaacaagtttcgccatccgctaaaaactttgttggccgttctccacgggaagaataaactcgaaaaaaagagttcgcttgcgtgcttccaacctgtcttttcgcttttgaaaaccgtgtctcgtctgtctctcagtgtctctgatttgtgtctcctcggtcgggtgcgcaaaatcgaattcaagcggtctcgcacaaccatcgaagccgttttttcgggacttttcccttctccttcgttaaactgcagaaaaccgacactggcgttcattttttcactttttctgcctcggcctgtcctgtcgagttgccgcttccacacgttgaaacatcgagacactttcctttcacaagacagagaggagactttgcgcttcgtcttctctcgctttcttctcttcttccctcctcttttcttctcccttttgtttctccctctttctccatccccttccacgcactcagctgtctctgaagcgttgttctccgccacaaacagccctctgtcgtccttcccctgtctcctgaattcccccttccccgtccgtctctgctggggctcttcttgtctgctttttggaaaggcggacagcgtcggtttcacgaacatgcgtgctctctctccgtttccaccttttccctgtcgccttcgctcgctcgcgtctcggatttcttctctcgcacaaacggaccagcaggagcaggagagcagagggcctcggggcgcttgagacagctgaggttcacggcagagcacgactggacggacttatcagagagaactgtccttgaaaaagaaagcaaagcgccatacgcccagagtcgagatggcaaa

SEQ ID NO: 3191 - DNA, 2629 bp, Toxoplasma gondii
  source 1..2629: mol_type = genomic DNA
caagtctctatcctccgccagggtggatgtttcaatactccgctttgttcgacaggaaagaggtggactcctcacggccgcgccgctaccgtgtacgcgaagagacaacttagaaaagcgtactgcagtccataagggataccgttctgaaaagagagacccagccttgttgctttgtttgtacgtttttcctcggcctactgcggcagtcctttcgaagagaagaaagttcagatccgaatgtctctcagctaaagtattcatatttataatggagtttcactcgaatgaagaaactctcctcttttcttcttgaagtcgactggacgttctgcgccgacccttcctcgtagcgccagctgtctcattttgtgaaatccaggatcaccacaagcagcgcgatacgcatttctcgagactccttcgtgaatccactctatagagttgacgtaggtagataaagactgaggtattcctcacaggcgactgcacacacacatgtctgtctgtagaattttcagtctgtttgtccgggagctttccgctatttggacggtgtgggggtttcgtgtacgttcttcgctgagtgaaacactctttgaaaacttcctgaaatggaatttcgattctttttctcggttcctcagagtgtcttcatccgcatgtctcgctttagcaagcgtgctgaaaggcacgtccagttgagaacacgaatcgaatttctcttcccgcacacaaggcgtcaaccccagtacagcctttccgcacacatgtagcccttttccactttttgtggggggaaatctcctgagaaatgttcttcctctgaagaggagaagcgagaccctacgtgaggagaacggcacaggaactctggcaatggcagggccgaggctatcgaaggcgcagctggaacaattcttttacggcttctacctacccggctttccagtttaaggtcagaagtccttcgataattatacagtcttagcgtccaacgcaaatgacggagtatcgactgagtagtacagatgcaagaatcagcttttctatgggtgtgtgcccgctagacggtctattcagtttgaactgagtcgagcggtgtcgcgacatgcaaagtttgtcgagaaaatcaggagttacgtgtcaagtgacgtctaaaagacgagacgcgcggaaggcgtccgtgtcgcagccgtttttaagttcttgtgtccacgctttgtcactcctttccgcaattctcaactctagccagatacttcgcgtgtccccagtgaacaaccccacccgagggtacacgatctctggttcggatgctgcttctgtcggctgaaaaggccggcaaatgcagaaagtgtggagaaaacaaagcaaacgggttgtaagctgcacttcacggaaaagggtcgcaaggcagcaccgtcctcaacacggaaaatgcgaggaatgtaaatcgaccattgccagtatctgcacaaaacacgcgactcacctgtcaactgcaacggttgacgagacaggttttgcctcggtaacatcacaagacagaagtcatttgactcggtaaactttctgaatccccttttacgcacttgctcgcgacttcctttgcaggaatacgaatttaagcaaacgttccaccattaagaaacgaagctgcacatctcgatcatgtcaaaagacagaagttgtttgactcggtacattttctgagtctcctaactttgttgctcgcgacctgctgtgcaagaaagcgctagcaagcgcacctacaggttgaaggtgaccgcagtcgttgcaagacgagaggacactgagtgttgcgtaaaaaccgttttctcgcggtagctagctgagggagggccctaagctttggatgggaggcagacggaggcgtccgaccaggaactgaagaggaatttctaaaaggtgtctgagatatcctcgcgaagcagttggccgagcgttttcgtgcggttcctatacgtcgcggcaagcgtcccgagcgctggcttgtccgccagggttttgctgaagcaccgtccgggcgcgactctgcagtcgcggtcgtcgatatttctgcggcgttttccgacagaccatcttcttcagccttgtgacttgttgtacactgcggagaaaggaaagagactctagaagttcgtctttccccgacggtttttcgtaccccgcgaccgggtgtctttgctgcgttgactcgcgagcgacgctgtaggcgcgaccagccacgacaagggcgccggtcgcgcaatttgcagcggtttcgatttcgccgtcctgtcattggcaagaacgcttttgtttccacaggatttctttcttcccggctgaccctttcttgctcgtttctaccgcgacatttacactgcgtcctcaaaccctctgtttcccccgaaggaaaaaacgatctggagaaagccgcgctagttgccttgccgcgatatctttgcgtgggttgaacgcgtagcggagagcggggccggcaacttgtgcttttcttttcttgcatgtctcaacgcctcgcgaaacccaagtttcccgggggttttctgcccttgcagctcgtgccgcggcgctgccaccttgccaactcgcgtgagaaaga

SEQ ID NO: 3192 - DNA, 2422 bp, Toxoplasma gondii
  source 1..2422: mol_type = genomic DNA
aaagcttttctccagagacacgcgagcagcagggaaacaaagtagcgtgagtgcgaaaaaggacgtccatagcagtctcggctcagtaccactgatggaactcggaattgttcgatatggagtggaaggagtcgaaaaggtggtttgttttccaaaaaactcttgtgtgcagactgcgggcaagtcgcacgccggctcggggttcacgtagacgggtccggtcgtttctgagcagagcagctgagtaatattggttttcgttcgacccaccaagaaggtgtggccgggctgctgagttccggttcgtgttttcgcttggggtctgccaacgcagaaaggtcgaagcgttcgtagcgaaaaggcgtgtctgccgaaatcgactggaacgccgttgacgctctgtccagatttttgaacatgcgcgacgccctccggcaaaagttccagtctttgctctgttcgtggatccgagtcgctgcttttattgcgtgtagaagtcgagtgttgtgtgctccggagaattcgaccagaacagttttgtttcactcggaagcacctgtcgtggcactctacgttttgactcggcgtgctgggtgtggcagttcaacgcgttattcagaccactgggtccatcacaaagtccaaacgactggcgcgtccatgtgcctgtgcgacgagtcgcaaaacgcgactttgttagtggtatctcctgcagaaaggccgatcacggtgtgctagactgtgtccgcgccggccttttcagagtgcccgaccgtcggggagctacgcaggagcaacgtagagatttgcgaggcgtgtctagactggctagaagcgaacctgctggttgtgtacggaacaccacagttttagttttttcgccgcgttatcatccatatatatatatatagtcggagttgttgcccctcctcacgcaaaacaattcgcgatgtgctgaagccgcaacacgacagacgaatcttgcattgcagtccgccccagtttttttgcagtgaagtccctattgacgaagacgtcccattctcctgttctctcacacaggcatccgccgcccgagcacacggacgttgcggtgttcgtcggctccttcacactatacgcaccgtgtcgctgacgtaacctattggccatcttcagttatagttgcgttcaaaagaaggggaaaacggttctgaacgcttccgtctgctggttgcgtcagtaggtccgctcggccttcttggcatgcgcgtgttaatggacgcccaccaacctcctgcgaatatttgtgacagcagatttaggaggttttctcgagtttggaagtctttttgttctttctcgtggtcctctatttgccagagtctgcagaaggggacgggtaaggctctttttgagttcctgtctctccgcagccggttttcacacgccaatttacgtctgtgattttgcgcgccgagggttgtcgcgtcttgctctgtctttgcccgattctagattctcgtgccgccgcgcttgcttggtctgccgctctctcttccgaatttctgctgctgtaaatcggttgctaagaagcggtgcatttccttcttttctccgcggccgcacgacagtacgagacggcaccgtttccgtctgactgctcgcacagaagagtctcggtgcggtccggaagttcacttcggagtaggcgggacgcccagagtgagattgagattgagtctcttttctccaaggaatttttctacttcgcatggcacacgctgctgactaaggcctcgtcgccttagactgagaagtgaaacaagcaccacccgtgcaagggttgatcgtgtccatctgcgtgtttgcgttgataaaagccgctcgttccgaaaggttttcctagcatccactttccaggggaaattcgcagaaagcagagctgctggaatgtaagcagagataatatgtatctgatgtaacattgaagcgattcttcgttttccatcttagggatggaaaacgtcggcaaaaagggcacctgtctctttccagccgacccctttcggcggttcagcgtgttggccttttgttctgatttgcaagccaaagaccgccgttctctggggcggctgctccaacctcgagaggtggagcaccagggttccgtatttagatttgatttgagttctaagagtaccctggcggaaatagagctacgcgtgtgtttcagtacttgcaggagcaaaagggaacccttgtgcgtttttttcgctgcaaaggaagccttgctttcgtcagagtacaagggtcctgtttctttgagaaaaccgcacgcgttacgcgggcgaagaacccctgtccgcctcagtgtccgttccacttccgttattatttttttcctttttcgagcgtcctacacttttgcgagacgaggaga

SEQ ID NO: 3193 - DNA, 1081 bp, Toxoplasma gondii
  source 1..1081: mol_type = genomic DNA
cagtgaacacactgcaagacagacgtacgcagcttatctgcaacctcacacaaccttgacgaagccagacagatatttacacacaacaagaaacgcaaacacacttataatacacacactcctgtacgaatagacatacaccgccacacacacacaaatatatatagccaagcacagatccatatatatatatatatatatatatagatagatagatagatagatatgtgtaagtgtttatatttacaagcgtatctatacaaagagggcttgggtatttcgaagagagacggccctttctgggccgacatataggaggtgcggaaaaggatgtttacgaattttttctggaatccaagcacgttcccttctcgatgagagtgaaatttcgaagaccagcgtcgtgaagagggagaaagggaggctgttcgaaggaggactagaaacggagacagttttaggagacacctgccggccagaggaagaggggattcggaaccttttttttctgctccctctcaagaacagataagcaggcagcacatctcggctgcttcgtcgctcttccctctgccgttccagaacacagagagagagcaggagaggcctagaaagaagagaggaggagacataatgaaaccagaaagaaaagggaagcacgaccggagacaggagaaagcaattggttctgtttctgttgtggagaatacagcttgctttgtcgaggtcttctttgctcacgtcgatgcatgcgcgcatgcagtgtgacaaagaagctttttcccggttcttctcaactctctcttttgcgctctgcaggtccttctctctttttaaaatttcttcttctctcttcttctttgctgaattcttcttcctgcttttcctgtcttcttctctggtgtgttctttcgctgcgctctctctcctgttgcctttctcgtttctccggccgtcgtttttccctcgcctttcttcttcgttgtcgccattatttctttcttcgtcattctctgctctttcttatccgtctctccttttcttgtctcgccctagtccctctccactccttccgcggcaa

SEQ ID NO: 3194 - DNA, 1755 bp, Toxoplasma gondii
  source 1..1755: mol_type = genomic DNA
gttgcatgcagagttcagcctacactttcaatatacatattcgtcgaatgatcctaggacagtgttccagagttgtgttactttcttcgaagagctagagtaacctccatcgtctggaagacgacgtttcaatgcgtcgcgccctaccgccgcatatgactttatctcaatggttgacaagcctcctgtcgatcgcgacgtatttttgcgatcgttggggtgtccgggcatgcattttggcttctagaatggcctgtttcgatgtgagattagtgtagtgtaaagcgtgtcagtatccgccagtcattaccgttgctacactgtccaaattacttgcggaggtcacaagagctgtcattcctggggaaaacatagatgtaggtacttgtaaataggtagtgaagctcaacctctctggcaatttttgagatttagagtcgcagtccattataggaaaggctgaccggccacgtcccgtcccgaaaaaagcgagactggtgcacgcagcagatgggtatgtgggacgcggtgttcgttgttctccactgcattcaagcacactgttgtccgctactttgacttataggacaggtttcgagtcgtcctctgagaagtgaaatgagagaatggatcttcaaaattataacacattgccagtacagagtgaaggcagtcgaatccaaatgcgtcatatctaaaaggtaggaagtgttcttgagccttctttgagcagttgaatcacttgcgggccagactaaagaaaataactaacaaaacgggttcgcttgtgttgatgttctggtcattgtctggacgtgggcattctggctgccccggcggaaccgattatttattttccaacagctagtatgctatcgctgaaacctaaagaagccagtcgttcatgccgttcacgtgtgttgtcagagtggaatatgtcaatcgcggtaaactggaaattacctctctaaacgatacactagatacgcagtatttccacacttgcgtgatgagcggtgcagtcccacctacagtgcttagttcccctgggataacaagaagtatacgagggctgaagatgtcactacgtcatcaataaacgttaggatgactatgtagtatatgcgcttagtctaaactgtgaagaggactctctgtgagggcagacacgttggtgacacacacacacacacacaggtactacaccgacgcgttctgagagttttggtgttccttgctttaggcagtgtgcctcttatttgcaagtgaagtgggaaaatctggatgccactggaatggactgaagaaaaaacaagagactaaatcttcacaactcacaatttcagtcttggcgtatgcctgcctccgtgcaagtctcctcttcacgttactgacattacagtcgttgtctttttcccgtttcattttttttctacatgaatgacctctgatacctcctttctcaatatttacttgaatcttcgcctttttttatgttgatctgcgtcgtgcagtcgagtcgcggatgtcggcattggtgacagttttttctatgtgatgctctttgagcaggattggcttcgtgtcggtgtcagtttatatatccgtccgtgtagcactcaataatagaaattatgcgccgatagctgtatatactttcacccatcgtcttaggtagctttctcctgtcgtttcattccgtcacatagtcagtcggcaatttaaaccactttcgcgagagtaccccaagaagca

SEQ ID NO: 3195 - DNA, 4928 bp, Toxoplasma gondii
  source 1..4928: mol_type = genomic DNA
ggttgtgtgtaagcggacgagacagtttaccgttttcttcttagccgcacaactgagggccttcgccgacaaataaaggataccagatcccgctggacaagggagtaacgtcagggtgaaggagagaatgacggaaagaaagaatttgttggacgtttctttccatgtatgcagtctccacagggctacaggggcatcgttcacgcaattacaaatgaggtagcagcaagctacacggagttccctccctctctaccggaatgtacaggctttgaaaacttgaagaacagttatagcggcggtgatgcgctcacccctaaataagtatcgaccgccaacagggaaagatgacgtggtggactctaaaagagcgacagttttggcggatcctacccgtatcctttttgacctgtccttccgcgtaggtggccagtaaagtgtgcgcctctgaatgcagatcgttgccgtaggctcccacgctgctgatggcgctttgttctgtacacacactcccgcagtccgttcatcgaagggtggctgccaccaccggatctgtggtgccccaactgtagacagactagattgagaccggaacggtaggacctccgaaacagtttttggaaaagaaaggctggtcacgccgatagcaatcttcgtgagtctttcgcgggtttgatggagtccgagagggccaggtgaaatcaaacccctcacgaggaaagacattgctgcaccgcaccgcttgtcatacgggccctttgaaggcaaacatttagagctttcacaccacgtgtcccgtgaaaagaagatatttgggcaatgcaactggtgtgccggctgccaacatgccaacacaacgacagtagttcaagtggcagctgctatttttccacatgaagtggacagtgcccgtcacgcacaggagcaggtatttttaaagtgagttacccaacgaacactgcggaggaaaagaacttgcattaatgtgaggcccgagcacattgcttggtagtatcgatttctgtaacgggcgtcttatgcgcatgctgcatgcggccgctgccagcgcacggcagacgaaaaaactgcgtctccacatccgcaacacggctctgaacaccatcgaggccctcagtccctttctttctctgtgctttgcagtgttgttcaggagaccgaccggagtgtctcctctttaaaaaattagtgaggaatgcacaaccacgaaaactgtaagctccagcggggtggtagatgcgatttcgaggaaaagcgaacgtctggcgagctgctgtctgtacatcgcagttctcaacaacctatgcccctaggtggctacattgctgcacgtagcacgccgtgtacgtgcatcgccaatagagtcattccagaagagttgacgtgagccactactgatcacgcagactggagctgctggagtgctaactggattagataacgcggaaccacagtttcagtctcaatggcttcgtctgatggatcagatgtggagactcaaagcctcctgaacagcggtgacagaaccctcagaagctggaaagacacaggtgagtgaagtgcagctgccatctcgtatttgctggtggtcatatgccggtggtcgcagtattccctggaatttcatgggacaagtcagtcttttaccttcggtactgaattcctctactgcagcccatgtttgtaggtccattgtatggattacagttgcacagatcatcatgtatattatatcatgcgtgctatcgaggagctacgaggtcaggttgtacacaggcagtgcgcgtatgacacttacatagaaatgagaccggttcagccgaacgaacggacgctcatgctcctgggtgccgcttacgcacctgctttcaggtttgtacactcttcgccactgcctaacggatcatggtaatcgatgccgccatcagcaattttcagctctggagagttgttacccctctgttcctacatgccacaattttgcacttagtgcttaacttggtatttatcttggtgggtccttcgatttggtggatggcaataggtatctaatctctactctctacagcatatcagccttcgtctggaggaacgatacgggacaaaaaagttcctggtgacctactttctttccggtgagtttccgaaaagagcgtggaattagtgatgtgcacacttccttgccaacagctattgtcggaaacctgctgtctatgttgatgcaaccgtgggccttagtaagctggtcagttaaagtaacgtacacgatccggatgaagctgatttcgtgtgttgcttgacagtcggtgggtgctagcactgcaggcttcggtaagacttgtttccgctgaaaaagaatggcgtttccatcacaggacatgccacaggtatcattggtggcatggcggcagaggtcagcgtggtctggtgcaagctttccgaagaactgaaacgaatctattctatggacatttgcattctcgctgtgttgatatactttttgtcgtttgggcgaacaggtagaaggttcagtacttctgttgagcgaagttttgctgcactaaatttttgcagtggatacctttggccatctaggagggttcctggctggcgtagctttggtctgctactataataaagaaatagaggacctgccgaagtaagatgcgtgataccgtattccgccaaggatttcataattgctgttgatatacaggtggttccgtgtgttgttctacggatgttccgctctctgtgccacgatacttgttgtatcacccccccttttgctcctacgctacccataccgtgtagtaaggcttgttgtattgcgagtttctgcccgttgtccacatttcttcaatcaggcggctaccccgtgacatttctcggatgtccgactacctcccttggccactaaccgactacctgaactacgcgcgtgagcacttctgcaagtttctaattcactacagctgcctagctgcggaaagcagtagctcgtatcgaatcagaggtcgtgccaatatgactgttgtgcagcaagcctaagttgtcggcgctctggtgtattctcgtcgcaactggccctgccccgatgccgctggggagtgccttcggcaaaaactatcgtttcccaaaagtaacaattgccatacgaaactaactatgaacagctcgctaagagagcgtctcttcaatagaggagtctgcgcacctgagagcactgcagtgttgttcccttagcaaactatgacgcttcttgtaccagctcggcactgttgcgctggctgcaatcattttatttgcatgagcaattctcgcgtatgaagagtattcgttctggcctactgcagcagacatgcacgtgccctcctcaactgacaactacagcaaaaacgatatcttgaatgccatgcattgtgccccacttcacgccctctgtcgacccttgtcgactggacagctgtgactcccaggcatgccaatgcgataccgagcgcttgcgcagaactggtgacggttcgggccttccaccgaggagaaggggggggctccacgttacaaaaggcactcccttgggctctccagtaaggactccggtaggaaccacttgaaaagttaccggcaagaccgtccaccaggagctgaaaagcttcagctgggtgttgctgaactgtgggaatgcaccacaacagtggaacctctcagtttgaacgccggtagagtcctgctcggcgcgacgcatctcctgttggccgctagcgctgccaactcgtgccaccacaccgaatgaccgaatgtgaaactgtacggaccctcccagctccatccactgcacgacgacacccttgcctgactgcgtagtcgatccaagtacaaagcgacacgcgagcaacatgagataaacgtatctgaccactctagtttgccttggcgagtatttttttgacgacatgtgaggtgtctacttttggaacgtttccagcaagcggttcaattgaagagacgcattggcgttatttcgtgcagcttccgtagctcgtcgagcgtcttgatcctcagtcgcagacagcatctcagtttccttgtggcatgtgagcgaccgattcagtcaccgaacgggtttttttgtcgatacgctgcgtgccaacaaattcaggcttcattgctaggtcgaatgagccactggatgccagtcaagccccgattcgtgacaactgcgagtaacaccattcgttcataggaagagccagcctttcaaaagtatctatcgtcactcccccccaggaatggatgcgtgacatcggcagaaagtgctggaaaagtactcgtgtcactgttagtggatttaacattttcgcgtccatcgacgatgctggaccttcattttccgtttgctgccgtcacggcttctgtaccgtttgctgcagttgctgcctgcgtgtttacgcagtgttcctcgctgagagcttttcagtttttccattccgaggctcagcctctgttgttcagagctccaattcagaccctcagcgactaccaaacgcatgctcattcgtgtggctgaaggcccgtaggtcgccgcgacgctagctcgtcggacaaggcaacagcgatattaacttactgactttaggaaccgtgacccgcgttcagggggatcctcacaacggccgtttcaccttttggtgcgtccgacagcgcagacgggcgttcctgtatgaatttgaccagaacttaccgggcggactggcctgagtgtgcattggcagtttctcatcgtgcggtgaaaccgccgagcatgctaacgttcttcttggaagctgatgccggtttgtcgaatttggttttttttttcgtttcgcttcttctgccaactgacagcgtgttctgatgccccgccggta

SEQ ID NO: 3196 - DNA, 2111 bp, Toxoplasma gondii
  source 1..2111: mol_type = genomic DNA
gacgcagagtagtggacccttttcgtttcagatttcaggtgtacagacactcggacccgaatggtgcgcttggcccccctgtggctgacgttttcctttcacagcatttgccaggcagaagaggcagtcaaaaaaccatgcagacatctcaggggtctttacttgcatgaagcagtacatgggaaattgagggatcaaatttttcgagactctcgcactttttgacagacggcacttgagtccactggcagccagatacacggggagggcgcgcctcgtttgagtgagtgcagaagccaggtgccatgttggaaagaggcaaagcagccgtcagactcacggggtcgggcggaagatgaattttcatcagtccgtaatatgctttgcgtacatgtcccttatgagaggtgcttgttttacggcgagcaaactaccgacactctcgtaattcttcatggctcaggtacagcgtatttcattgggcaaacacggtggcgttgctgcgcttactcttttccgaaaaaacacccgtgattcggaaattgtctatttctacttactagtataaatttgcctctgagcagcaagcacagactgctttcgcatgtgtagcctgcgcaacctatgacgccggtgatgaaacttttcacgatcgcggaaacggctcccgtactcccgcgttcgtttaagaacgtaagagctcgggtaccgttatgtctagggagaggccgagactctcgctggagggagtatgtcgagaaaaacgctgatggtacactttttcccagtgtcacttcgtgacagctttctcctcagtccacggttggccttttctctgcgcgagtgcattgcgaacgatcttcagaacacacctgtgtccgcgatgcataaacctttcagcagcgggtctgtcacggaaagaaagcagtgggtcttgcgccgataggctgcaatttatttagatccgccgcgccggacacacaggtcgcttcttacttggtcacggttgctttatgcgttaaattctatggttttcgctgttcgaataactgcatgaaagttcgcagaaaaactcgtggcaaacgaatgtgaaattcttccgaacacagaaccaccgggcaggattaggctacaactttctatctgtatgttggcactgaattgtcgactgctgtgtccgccctgaacgcacttcggtcggaacttgtccgccggattttggtacctgcagtgttcgattccatagcgcgcttacgacagacaagaagaaacagcatccactcagagccagcaacggtttactgcttcggtgttcctcagtgttaccattctaacatctgctgttgtacacttacagctgaaaagctggctgtcaacgggggagcatcggcgcgcggacagcacccggtgccgaaagacgagtggttgaaaacggtatttctactaaagaccctctcaccgacgcaaccatcgttgttgtggccttggtctctttgaaagaaacaataaaaaactgcatattggcaagtcagaaatttctacgtggcatttgactgattccacgcacgttacctgtcagcagcgattgacaatgtactgaaacgcatgatttcttcgtcctttcgcggtcacagtttgcgacatagagacagagagttccggagcagattttgctgacaattctggtgctcagtctcgaaaacgagtgtcgctggcatccggtgaaagccagctcccaacgcgcgggacgaaactacgagttagacacggttcgagcgacagtgcacgatgaagacgcgagtggccccacgctcgccatccggaacgcaaagtcgagccggcccgttttcgggctcccgtccacaatttcgccgcgagtccgaagaagagctagttgtgtctgacgcagggggacgccgccgagcgttgcggaaaaacagggaacccgaatccaacgtgtcttgcgcgacaacttttcctgcaatgcgtcctgtcggtcttttcattcttgtgccacagttcgtttttctttaaagagtggagtgtctacgttttcgggatacccattaacactgcggtgtcattgtttgacgaagttgacacaggaacca

SEQ ID NO: 3197 - DNA, 2007 bp, Toxoplasma gondii
  source 1..2007: mol_type = genomic DNA
gagtttccgagaacgtcctttctgtctgcacctgggacttctcgagtgactcaccggaggcaacgctggggtggagcgtaaagcgttgcttctgcgggggcggagaagaagcgccgtccccacaatggaggcacagtccatacgcatacacactaatataaaaaatgtcctcgagtctatggagtcatacaatactcttaaatccaatatatatatatatatatatgtatatgtagttgtatcttgtgggtgcaggcgtggacggtgagagggaaccaatcgcttcaaaggttacacacatggattgcgttcaataggatagagttgaactgtgtaaaggtcgcgcgttgtggtttcagtttttgatcgcaagcgactgaggtgacacaaagttgcggttctcgcctctgtttcccagtgcatcgcgaagagcattgtatggatgcagctgggtctcctcagctacctttcagtgaaggcattgcagtctctgcacctcttctcctctcctgggaaattgttcgatcacgttgtttttcagcaagactctaaaaacagatccaccttctctatttttcgacacaaacacaaatgcaggcagatacctacagagacatgagtgtctgtcggtgtgtacttgcatggggactctcggccatccccgctcctctccatgtgattcgaactggttctgggcgtatgaatacctatctctgcatgcaacgactcatcaaatgcccgcgcgtatttgttgaaccattgctgctggcgctcgctgcatccgtatgcattgacatgtacgaacaagtttaatgcctgtcaagaatgcaatgacgaagctcctcccagggtacacacacacagccagttgccgatgtgcacacaaccccatatatatatatatatatatttatatgtatttaaataaatatccatgtgtataaacaatatccatgtatatgagcaagagtcgcggaacgtttgtgtcaggcaccgtgtttagaagctcagaggcgagagcgacaagtgaagagagaggtaagacactgaagccatggtggcgaagaaacgcagcagaacggcatccggcgagcaaagacgacgtctgcggtggaggaagtgcattgcatgcggcggactgaaaatcctccgttttcagagcgagggagttgatttctccggtgaaaatgagaatggagacggagaagaaagcagacaagggagcgggtgtgcccaagcgtctctcgcttctctcgggcaagagaaaagacaggctgctgcatgcaggaaaggctgcgacaggttttttgcgatttccagcctcgcttggagcattttctgcacaaataagggaggatactccgttctgacatcacgggtggcttcctttcttctatctcctcggagacctgaggacttccaccagtgccgcggctctctccggcgtccaggagaaagaaagagaagcgacagagggaaaagaacgagagaacgaggaagaagaaagacggaacgacatttttgcgttgttcgtgtttgaatcgcgtctccttttccgtcattttcctgctgaaactcgagggaactggggggacggcttctcttcgtctttctgagaaagcacctcgagaaaagtcggcagttcctgacttctctctttcctctcttttctctcttttctttcttgtctccgttctcttctctcgcctgtctccgttctctttctttttctttcttttcttgtctctgcttttcgttcttttcgttattctctgtccaagtctcccgtcacgctctgaaaacagtctgtttctcctgtgaccgggtgccttctcactcttcgttcctggtgttcgcgtctccccttcgttctgacctttccccctcgtcctgctttccttctccgaccaaggcgtctgcggactgcatgagactctggagtccgcgtcgctcttctgcctcgacttcgttgccgcgagcctcccaagaaacgcgtcgctctgaaga

SEQ ID NO: 3198 - DNA, 1539 bp, Toxoplasma gondii
  source 1..1539: mol_type = genomic DNA
gagaagagaaactggcttcgtcgaagagggaaagaaccaagtcagacaccaagcgcgcagccgaaagaatcgcagaaaacaaaggcaggagacatttttttcgcagattctcaaaccaaaagtatgcaacacaagatgtgtgaattcaggtttatagcgtagaatttccaacgtttgacctggtgtacagacactggccggagtctggaaaagcgtcgaaagagagtttttcctgggtgtctaataaaaggagagatccatctcgagcaacacagagatgactctgagatattttccagagagaggccgcaagcaaaccgtagaaagtgaattctttggacgaaccgctcgaacacggtcgagaatcaggagggcatcgcacggtctgaatcttcagtcacggtctatactgaaaatgacaagacagtcagacaaattcagaggtactaaaaaataccacaccatcatatatatgcacataaatgtgtatcttttccgtttcatataaaggtcgaaaagtacagcaaggaacagagatgcgtacagcacatgcatcagataccccagacatacatatatatatatatatatatatatatatatatacatatatatgcagacatgcatgcagacctagatggtatatgtgcatacaaacgagtacagatatatttgccaatttattacattttcttcagttttagaatccgcgtaatgtgtcggaactcttggaaaattcgtagtgtgaagaagacagcgatgaacgcgtttcttggcttttctgtacctttccggctggttcgcggtgaaattccggactttccggatgatctcgatttcgtttgttttctcctctgctagcaaaggagaatttgtgcagatcagtcgatcgcaccctgaaacaaacactctccaaaaactcccacttcttcaccactactcctttttctctggactgaactgtcgatagatatgctggcggcttttctcaacttgaaaatcgcgtgcatgcgtatctgcatgcgctgccggcctctgaggcttcggtttgaacaaacttctctctggacgaacagcgattttttttccgccgtctcttcgccatcagtttttcagacgcaaacgcagaaaggagaaacggaggtatctttctgcagcctcagatttccccgagaggtccacttttttttcttgctaaatctacagaaataaaatgaaggaatttcctcagattcgacggagtgttcttcaggcgaagaagaaggttttttcctctttctcggcgttcaacattcgcgccagaaggcgggggaagagaatgtaaaaacatctgcgccaacgccttttcgcgaccaccgtcgctttctttttctcgtgtctggatactctccatcacgagctctgctgtgttgtggaggtcgaagaaagaaaagcggaaaacaaagccaagcgaatacagagtcggtgaaaaccattttctcattcgtcgcgtacacaacggtcttgaacagctggggaacgcccgagggcgttgtgcga

SEQ ID NO: 3199 - DNA, 1749 bp, Toxoplasma gondii
  source 1..1749: mol_type = genomic DNA
cgcgagtccgctcgaggtattcatgtcgaggatcttgcgcttcgcgctcttcaacacactgttttgctggacgaccttatcgagcgcactccgcccctgcgagagaatcgcgtcgagcatcgagtgactctccgcgagcttctctcgctcccgcgcaaagctcagctccgacgcccggttctgcaccacactccggccgcgacgcgagtcgagcagcgcctcccgctgtcgcgtctcctccatctggcggcggtggacggctccgagctgcatgttcacggcgctctggaccgcgcagctgtcttccagaagcacagagatgcgccgcttccacagagcgacttgctgcggaggcagagacgccttctccccctcgaaaatgcattccatccgcgcgacgtcgcgaagcagctgctgagtcagagccaccagccgctgctgcacagcgaccggcagcgacgaagaggaggagcgtgagacggctgacggaacagaagagctcaggggggcagaagccgccgaggaagactcgagggacgccagaaccgagtcgatttgcttccgacaggccatgcaaaggggatacagcgtcgacagagacgcctcggaaggtgcggggtccatggcgagaagactgacagacacgcgaaaaagggagaacaagacagagaggaagacagagaggaagacagagaggaagacagagaggagagagaagagaaacgagaagacagaggataagacagagaagaaggcgacgaaggagactcgaaacgcgaggaagggcaagacagagaaggagaatagagccgccagatgagtcgagggcagatgagtcgagggcagatgagtcgaggacagattactgtgagacgaagaagaggtggaatgagcagacagcagagaaaggtagaaaaccggaaagaccaagcagaagaataggaggaagacggacaggagagaaaggaaaagacacaagggaatgaggagagcacggcgactcgtggaagctactcgggaggagaagcgggtggccgagagctggaaggcgctcttggatcgcttttctccaccatcgtcgcggccgtgtagaggcgcggcagagaaatctgtgtttttcagagaagaaagatggaaaagacgaaacaaatatgcggagctcttttgtctggcagcgagacgggaggcctggaagtccgacttttctcagatgcggcgtgaaggctcgtcgtcgttttttctcgctcgcttggtttcttacgttggagcagaaaggaagttaaacgaaatttttctcttcgaaactcacactgcgactggagtcacctccaggaaggcgcaagctcagcacccgcgaaaacggtgcgcagcgacgagaagcgcagcagctgtttcgagtgtttctcgtgagagggaaaaaacaattgggcgcgagagagaaggcaaatcgtggaaagaaaacttcctgtagcgatcgcggatgcatgcaactcgaaagacaggagaaagtgagaacgagaacgacgatgccgtgtctctctgcgaggactgcaggtctgttttcggccggagagacgcacgcgccggaaaagaaagagtcgtccgtttttctttgaaaaatatcacaggccgtctctaatttcctcctctgcgcttctggcctcgcgtttttttctctctcctccttcttgtgtctctccttgcctttcttttcttgtcggtcctcctgaacgccccccagcttgacca

SEQ ID NO: 3200 - DNA, 2085 bp, Toxoplasma gondii
  source 1..2085: mol_type = genomic DNA
tgcgaccgatgactcgagtcacttcctgaaacggtagtgaagtggggcgaaggaacttcagtgagcacggaggcatcatggatcaagattgagggccagagacagacggatgaaacagagtaaaagaaagcgttggcagccaagctcaggaaagcacattccgcagaaagccctgttttttgaggaaagagaggagaaaaacgagcgagtgaaccagactgaccacgcggacggtgtcacttgaactctgagtaacctggatcccctccgcgacagccatctcggtaaccagggctctttcccctccggcaggaagaatttcggcctcggatttccctgattcctcaaccactgccttgaccaattcttgctggacaacagaacagaaacaggacacaaaagtccacagttgtatttagaagctcggccttcgacgcattcctcccgtgtacggtaagtcttatgcccccccgaaggcaaagaaacaggacgtgtacgcacgagagaccctgtcccttttctacaggatctaaaacaggagctgcagcatgaagttagtccaaatcaaacggcttctgacggcaaaacatggcggatcaggtgcgggtgaaacttccgaaggcctttggataattgtggtggcttcctgagaaggcaagtcgcgattctttgtttcagccgtaggtttttcggcagacgaacgggctgcatttgcactcagttggcgtttgcggtccactaccgctggccgcttgtcgcacggccatcaccagaggaacaagggtgatgccttatagaggcactggaaatcttcgcggtccattcctgtgatccagcctcgcaaatgggatcaagctgttgaagcaagagccctaaaatgtgtatgccccccatgtaaagccagccacgaacctagacagagaatcgatacaaacacgctttccgccgaccgtatttgtaaagcagtgcctcatggccggtgttgtacaaacaagcttacgccgagctctgagaccttcaccgcctccgcactctgttttagttttctgcgtgctcgacgagcgcgaacgtttgccccgcccagagatggtggagtcgccgcggcaagtgtcgggcggatccagtcctcgccgctgaggaggacggcgaagaacaacaggaggagacatctcctcgaaagaaaagcgaacagccccatgttgctcgatcccactgcattctacttgctgggccgttcccttgacctgatggtgcgcatcgtgtctgtcgtggcagaggttctcgcgtcgatttgtgcggggtgccgcgtgaagccgggaagtccgacctaaaacattcggtgctgttctttggaagcttagcggaagctcaagatcacttaaatggcgtaacacagaaaagcaagcggttcggaaatgctatggaacgaatgtcggaacgggcgaagctccgagagagggatttgagtcatcgttgccggcggtcctgctacggagtgtcttgacacccgagcggctgcctggaatcttgcacaacaaccggggttctttcgtaggagcaaaacaatcgacaataaaatgggcctcaactgcagagtgccctgaacgaaaatatatttccgcggggttttacacagagacaccgaaaccttaccctaccctctgcctctacggccgcacaagacagacgactctgctgtccggcacgggaccgacgtcaattcattttcctacgtcgctttgcgcctccgtatagtgagggcccgaaatggaaacagccgtttccccgcgtttttgcagaaaaacagaagcggtccaaccactcctcgcggcacgtgtcttgctccgctgaatgcgagccttgctcatctaggcaatccagcgatccggtctactcagcgcgtcaagtgcgctggccagtcacgagaccgctcgaggtctagggcacccgccgtttcaaagataccatgagacgtacaaaaaatcggatcaaacgctagcctcgagaaatgaatttcttttctctcgccggtaagactcttgagaacacgatttaggtgctttgtctccgttgtcagctacatca

SEQ ID NO: 3201 - DNA, 2262 bp, Toxoplasma gondii
  source 1..2262: mol_type = genomic DNA
ggtcaaatgtaatacatttgacgctaacgcacaagcgcgacttcgatctcccccaagaagggctacctggaaggtcatgttatagatagaatgcaactgcaaaaaaagacaaaacagacaagaccacctctcagtcggaccggagtggtattccagtgaatgtgcgtgtgctgctgcactgcgcttgtagatcggttccattcatgaaatggttcgacttcgaggtaagcataacccagcatcacaacgcgtagggggcactgtatgtctggtgcaatccctctggagcggcaaccgaagtgcgcggctatcgataccatggttggcagaaagcagtgcaggttctcacctgtagaggatcatcatctcgaggctgaagaacttcgaccggtttgttggcaaaatgaagtccactatttctctcaatgcaaaattgctgtacgagaagttttctcagtcctcgggtgacaagacgatggccatggaaaagagcctgcatcttctgaagaagcagatccctgcttcctctgtcatgtgtctggctgacacaggttttcagaattccgctgaaaataatgtatttgtctggagcgacattctgtattagtgcgcacatggccgcagccgggcttccggcgtcaagaacaattccgtcaggcaagaacagggagaagcacagaaggacctcagggcaatctgaaaagtaatgtcccaccagaaaagcaagttcttcagcccgcaaactttgtgtgccgtaatgagcaacgatactagtgaaggatatgagccgctctggctcgcttatgaacctcttgaccaggaaagtctcaaactgccgccatagaactgggaaatcctgatcctgcttggaggccgctgtcgttctcgggcccactgttgtgcaataaacgctcgagcgcgagccagtcgttccttcgtgacattggcgggggacgccgccatcagaaagccctcccattttgaacgccgagttgagatctcagattagcatgttgtccacggtcgagtctataaccgtaacccgtcgccgtaacacaaggctaccggtgccaaaagaatgtacgcaaccagacgacctagtcactcaagaccgtttccgggattgccgttttaccaccatatcagacgtactattcgacgggccaataaggaaatggaagacggcacggccaccctttagacatcatttctcagttgctgaaaaaaaaacttcgacttaatcgccgtctgcttgtccagtagacgcttttgtccttcggcagttctgcaacgcagtactggtaaaggacactgtctggctcgcattccaagggcagctgtcgaacagccgggctgaaagaagctagaacgacaacgcaactgtcactgaccccgcttcccactctcagaggactcctaaggacgaatttttaagtgcataccagcatcgccaccgttcaacaagaacaaagtggtaatatttagcgtgagtcggaaaaaatggacgtggacccagtgtgaaacggagtcgcatgcatcgacgtcgtccgttccagcatgcgctcgctctcatcggaggtgtcttcaccggggggtgctggattagacagcctacctgtgatgtcgttcaactagctgaattgcttgattttccgcagcgcgaaaaaaggcatgatacggtgaatgtatgatcgatgctcatagataatgacagtggtctcttgacggataccggacgaacaaccatgaatataattcaatttggttgctttgagttgcacaggagacggtgtagtactgacagagcagcaagcggaataacgcattaatcagcatcctccacgttgaaaaacggtttctgtaaccgaggctgcagctggttgttagtagctatccggcacagtattgggaaagattcgttttcaaatagtatggcagataaggaacagtggtgtatttagcagtgtatcaggagcgggcattattgttttgcctcgagagaacctcgtagtcaaaccgctaagcgaagaagcatttcggctcacgacggaaataaagtcttatattaagagagccagagaaatgacgctgtccattttcggtgcaatgctccctatcagccgcatgttcgttctggtgtatggacagacgcttgtggccaagagctccagttaaacaacaaattggatgcctctggtcgacactagacctcccttcgtctcaaccacactgtatactgaggcggtctgtagcatacgacga

SEQ ID NO: 3202 - DNA, 1419 bp, Toxoplasma gondii
  source 1..1419: mol_type = genomic DNA
cttaagagccatccgtggagacatttcggaagggtgccagatatttataggaaacaggttgcccatgccctctgatgtccgtcgccatgtttccagcatcaagttcttttttcagacccccgtcagaacacacggctctcgcatgcgctggaggaaaaaactgaaacctctcgccttcacggcaaacaataatcgtagttggacacagcgtttggggaggggggtaggaagaggctgaatgagcacaagttacaggggtcactgtgacacacgtttatgtgaatgggtcctcctactgtttaccacctcaggaattaaaggattatgaattcgctgacacctggaactgacgatgcatgttgaacccgactaccatatagtgaaacccctctatcagcacctatactctatcagtgctcttaacatggttataattaccctccatacctacagttaagtattacgtagtagctgaataagcttgcactgacaagcaatggcaaggcatggtcggttcgtgttctgctggttcactatgaagtttatgcgcacacacagagcaaagcattaagcttttcaatgagacatttgtgccggagtaaaggcaaaagccatgcaggcaggagagcttggctgctttttgtagccgacagtcggatgcttcaacacatgcactgtacctacttttaaaacgcgccggccaatcaggcaggtttctgctcgtcctggtaacacaaaagagacgcagcgtctgcctaaaagtgatggaccatgtgcgtgtttgccgccacgtcgctgcatgttttcagtaaatctctgccccaataactggcgcgagcgaaatcgttcttggaacaaccgctgtcggtgtacacacaccaaccatacataccttctgtaatcccggaaaggcggaaacctgggccgagccgcattgctcgcgtccacgtccgcagatgcaataggcgaaaaaacacgtgtttcattcgccgaaatcgaaaagagcactaatccttgttggtttaatttatgcgaagcgtgtgcttagcagccgggggtgctagtcgcagtcgcatgcatgcaagccacattccgcttgcctctgtcgctcgtcgaacttctttgctcggctctcgccaggagacagaaaatacaaccgccatcctcgaaagtgctattcttgatctttctgcacctggtgggttgtgtaacaaccagtgtaaaacactcctgctggaatctgatttccttgcaacggccgacaaatcagggcacctgggtgccgtggaggtacggcccattcatctagatccttctgttcacgtacacgttttctcatctcggcatgcatttccacttctccagcaaacatccctttcttcctctgttgtgatccgtgagtctcggcggtgcacacga

SEQ ID NO: 3203 - DNA, 2272 bp, Toxoplasma gondii
  source 1..2272: mol_type = genomic DNA
tgtgtctccaggtggaccatctgttgtaattatctattccaagtatctattgtctctgcacaaaggatccgcgatccatgcgtgtgtaccatggcgtgacagcagccacattcgggttacacgtgacaggaaagaaagctgtttcctggtccttcacaagcacgccgttttgcagacgagacacgtttttttcacgacactttagttaggatttacgtaggcggaaacacaaaatcagggagacagagttcacgcagcagggagtcgtggagacagccagaggttctgaaacgtttgaacggaaaattataaaatagtaacagttaggtgagacgccgaggcttggcacctgtcgcgcgtggggtgtatgtacagaggaactccaatgggcagcattttgcgggcagtgtccatggtaccattttagccacagtgcgggccgaactgtggacagatttcgagccttacgattcaatcgaaaacgactctcagcctctgtttcgtgttttagttccacaagccactcggaatttgagaaaactgggcctttgtcacctatgcctcaaagcactttacatagactaggctctggagttcgacgaatcgctggtgctattccattcccgttacttctacgcagaaagctcaaaaacgaagcgaattcacgcttctgtgccttgccgcagaagacagtgtttccgagccggcttctccctttcgaccctggcttgacagaaactgacggctttctactgggttccgtctagaatgctgctaccatggaccgcttcgacctgacttttggcagctcagaaacgtctccagtgatacagaggacgcagacgaaacctttgggtttccttttcttccgtaagcgtccagcgactccaatgatgcggtacaataatcgagtcttttaggactgctctacaccaccaccccacaccccagtggactccttaggagaggcataagtggtggatttcaatatcccacggcattcaggtcattctacatcgtttgtgttctgagctaaacccgttggatctcaataccctacgacattcaggttattccagtagctaccttttacgttagccatgtcccaggctaactcacctgtccatataaattcagaaatgaacagatgtcgagcctttgagtcgatgaggttttttcactgtaacggctgctcctgcaaaagcacgggcacacggctaaaaaaaacagcgatttccacggatatccaacttcaccgaatggaattttgcccgcgtaaagaaagtccatcgaggcttttgtgtatatgaaaagagagtgtcactgatcttttcaagtgttgtgtcggattcaagtctcgagctctacacccgccacatttttgcgactcttcacgcatctttgcggccagcgcgtgcttttcccttggtaagcctagccccacccacaagtttccattttccgaatcgtttattcgcctcttgttccacctttctgtcttttcgtggtgccctctcagccgaggaccttgtttcttaccgatgcagacgacggacttttgtcgacgacagagacttcccgagggcgcgcatgcagacggtttgtcttcaaagtgactcgcgggaaaaggtattttgactttgttttccctccgctaattccgcttgtgaacattgttcttcttcaacaccatcttcacgttttcctgcccccaagactttgtttttgctcccaaagcctggtggcaaaagcacaccaacaccgggcaagataacacagtggccgcttgaaactctgcgtggaagcgtcttccgttgactgtcagaagtttttccctaccgattgtttgttccgatttcttctctctttcgtcctgttgattttttggcagacattttggtgtgccaccctcgacagctctcgtatccataccttgcgcatgcatagcagcttcgagtgctcttcgccgcaacgaccctcaggtctcctcctggtctctctccccatgcaaggttgatactctctctgaaacagccttcgccgtcttgccgttcacgagtcttccctcttggggggggtcccccactctgcccggcgtctgccgtgtcttgtctcctgtctcctgcccttctgtcgagccgtatcgcttccatgtgctgctccttcttcgcccaggagaacagaggggacgtctttccccttctgtgtgtcttccttgtctgcgtcgtgtgagagtgtagctccccctcttccttctcctactcaagcgcga

SEQ ID NO: 3204 - DNA, 2538 bp, Toxoplasma gondii
  source 1..2538: mol_type = genomic DNA
gaggttcgtccagtcaagcatggacttcctcacacgactcgagtctctctgtcgagttcgagccgcctggaaagaaatggagccaaggcgccgggagaggacagcacagggagagcgtcgcagacggaaggaggcgagcaactggcatcgcgcgccgggacatccaagcgcagggcatccgtctgagcctcgcgcatgcagagaacgcgatcggtctgaagtctcttctgcctggagagtcgatttctctcttttccactgctccttgtcttcttcggcgcctgccctcgaagtatctctcttctccccttccgacattccgaaggcctgcgagaagtctcgaactgtgttcgacctcaacaacgtttccgtggagacgcttgtcgctcgcgaaaactcgatgctgacctttggtcgagactggagagtacaggtgaagtgcacgtttcgcgacgctgagggcaaagcagcgccgcgagtctggaaggaggctcagacgagcctttttcgtctcgaacgcaagcgtccatccactctccaaagaacaggcctcgagcggggggagggaggggagggaggggagggagggcaacaccgtcgagacgtcggcgaaccgtccacctcctccaggactcgcgaacgtcaactgaagaaccgaggaggacgagtcaagcagcctgtggggatgtctcgctgtgcggcccgccgcgcgaaactatggcagcaaagacgatccactatgtcacttcggccatctcttctcgttctttcgatgtccagaagaagcctggctggtctctccggcttggctccctttctgcaggcctcctctgagccttgagtcacttttcggaggcgcctgcgtttccgctgcacctggagacgcttcaaagcgctttcgctgcttccttttttcgcggagtctgaacattcgactttcatgcgcctctgaagcctggcggcaccgcctttgctccgtaggaggctcgcgcaagagagagcgcgagaggacggcgcgttgcttctctcaggtttttctcacccgccgctgacgggagggagaagagcgagttccgagtcttcagcaatcgaaacgcgttcttcctgcccagcgaggacgcgatcgaccgcgagcgcacagaccggcaacaacggcaagagagcaggcagttgctcagcaatcaccgacagcaggaaagacactggaaaagaagaagacggagggagattgggcgagcgaagcggcgacgaactggcgtccaggaaacagccgccttcctcttctgaccgacagtcccctgtgtcgcctccatccctgcaggctccagcgtccgcgccgctgtgacgtccggcttgatcctgtcggcgcgccgcctctccatcgggtgtgagatgtccgttcctgggagaaggaagatcgagaaacaccgaggaggcccccaccgcctcgcgcgcgctcgcgaagagaaacaagcgaaccttcatcagcgaaacggagggaagctcgacccagcgagtgacttcctctctcctatttgagcagtctttcttgttctcgctgcttctccctcccttcttctctggtgctctcctgtccttggtagtcttttccagagagtttcctgtttgccgagaggcgacagacactgtgtggaactcggttcaacgtcttggcggccgacgtctcggtcttccagagcgtcgggagtcccctctcgccgtgacgcggagaaggagcggagaaaacgaggttccaggcaggaacgtctccctgcgcgagaagaccaggacgcaggacagagcgaaagctggagagaagaagaagacgaacagacggcacaaaactctcgggaagtcgaaagcgaaaagccgcaggctctcgtggtgagtcgtccggagacgagacctcggctggtgtctcgcgcgcgccgccgttgcgccgttgcgtcgttgcgtcgttgcgctgtctacatacaaacgcgaggctgcagcagggaaagcggtcgcaagacatgcgcagagaagaaaagcgttttctgtttcctctcacacctggcagagaggagacgtaactgctttcaacgacggaaagagatccgcgaaggtcgcagaacagtcctgcgtcttttctccgaaacggatttctcctcagggggtgtctctcttgtgaggacgcggcaaggaggcattattaggggcgcgcgaaagcgcatgcgcgccaggcggcggagagttgtgctttgcgtcgacgcctcagtccttctctcgtctgttccttcttttcgacaagtttcatcgggagagtttttctcgcgcgcgactcctctgcagcggaaagggcagtgtcaggttctctcgcgccgggactgtccggcgccgtcgctcttctgtgtctccccgtcttctgcgcgtctcctctgcttttttcgcgaagccgcgcccggttctcctcggcgcgactcgcagctcttcgcggccttcgcctgtctcgccgccttctcccgcttctggctgtgagtctccgcgccttggtggaga

SEQ ID NO: 3205 - DNA, 1298 bp, Toxoplasma gondii
  source 1..1298: mol_type = genomic DNA
gcgaattgcattctgcaggaagtccgagtcctctttggacaggctgcgcggcagcgttccgtctgcagaaaaaagtccaagacgaaacgtgcatgcagtcgggagccgccaggcaacctgcgagtgaaccaagcgaacgatcctcgctctccgagatgctgtaccgcgcaagtcgagaggcgcctgtgggggagaaaggggatatggggggagaagcagaagacagcagcaagaaagaaacagcgaacgaagacgaaaccgagacagccaggtgaaggtgaggacgagacggaggcaacgagaaggagaagttgagacattgaaacgcaaccttcttggtgtgtctggagttctttcgcggtcctcaccgtggtactccatggaccatcgatagaggccgggccagttgatgccgctgttcgccatagtggagaaggaatttggacagacggcgtctccgcagacgaaaagaagaaagaagaggaagccgcagaggtggagccagagaaagagagagagagagctacgagcgaatcgaggagagacgatggaagaagaaaaccgaaaaaaacggcaggcgaacgcggagagaagcgaagctgaggacgaggcgcagagggggaggatcgagaaactggcgagagagaggattctgcgaaaaagtcggaaaggtttttccaacacttcgaactcacacaattcacgagtcacggccgcaggaacagcggagagaagcaagagatatacaaggaagagcggagagtgcacgcgtttcgcggtcttgagaagaagagactgagagggcaggaccgaggagcgcggaatcgcgcggaatcgcaaaaagaaaaggaaaaggttcatgcgtctggggcatctccgcgcgcagcccacgggcgcctgcttctcccctcggtcttctgggagccaaggaaggaaagaaggcagaagaggagacgaggaggggtgcggcgagcagggaaaagcggagaaagtcgaatgtgagtgcggtccgcagttctctagcagcagctctccttcctcgtcgctgctggagaaaagaaggccggctcccgagactcaagaaaaacctggcaagatgctgttcggtgcgtttgcagagaggcgcaagcagagagaaagccagagagcagagaagggagaaaagaaaaaaagggagaaacggtaaagagaaaagggagaaaatcgcacaagaacagcatgtgcacgctgtgctcatttgacgagtgcaaaatggactcaacagatccaagcggcgcgcccagctcgagaaaagggga

SEQ ID NO: 3206 - DNA, 3153 bp, Toxoplasma gondii
  source 1..3153: mol_type = genomic DNA
gaagaacgcatttatgcactccgtcacagtctacgttgtgacagtcttctgctgcaattgatttgttgcacttgcttcagctgcgcctcaggaagaaaaaaaacgcgtcaatttcaccccgacaccgtctgtcgaaaaaacacatccgtcggaaaatggcagactagacggttcgacttctcctgcagtcctgaatgtttccacatgaaccatcttctagctgacacaaaagtagcatgtgtaatacgacgttgaaaaagagctccccgaacaacgcgaacgactcatccgcatcgcttcacgccttcgctggcagtttgcctcctgtgccaacttccacacaaaatccagaagactacggatttcacactgtggaagaagcaaagtcggtcctgcatgcaatgtacatttgtctaagtccggaacaatgcggttagcaacgagaagcaagacttcggacgctactccgggtggaccatgttggttggcccttcatgcccaactgctatgcagtgtatggccgtctagccgttcgcctgttgacacgcgactggagcgaaaatgtcgcaatgggtgtgtcctacgacaatgccgatcgacaaacacggcgcacctttttccatttttgcatgagctgagcgtagccagggatcagaacgacatcggtcgctgcgtacgcgtagatgccgaccagagcgccaatgaaaacgcggcgcacaatgggcatcaacacggttccatttccgtacgacatggtgacgcagtatggtggaaacgaataagtcggtgacgagtgccccctacgcagacggatgccgcagtgaaagcagttttttccgacaggtgggccggccgagaagacgggaacaaggaactcctcctgggggaacgcagaacaggaaacacaatggattcccaaaaagtgtgcgatattcggagatgtgaaatgacaaaaaaaaacaagtgagagagagtcggaaaatttcaacctgcattcgtacgaggacaatacatctatcaactgcatgcaccaggaatcacgtacacctctacacgagtacatcccatcgtgaataaaaccttcggtgaagtgaagctgcagaatatttttcctcgccgaacaacaaaaggaagtgtcgcctcatcaacattgatttttttcggccgtcctgatcagtttttgcgcgggtagtcagcgacttcctcgccacacagctcgtacgggtgctggcaggtttggacagttcatctcagattgcagtgctgagtggcgagaagcggtgtcgcctctctgtttccgtcgacgagtcgaagaagaaatgggtagcaggccacacagctcatgtgaggtgcagagcaaccttcttcagcttatgcgtcgctgatatgcaacaacccggaagatacgataatcgtgataccaaaggcgctgggtagcatcgtgagagcatcgttagtttcaagatatagtgagcaggatctcccataacttttgttggaatgagtggatttctcagtttcgatcaattccaaatggtgtgtggtgatcaaaagggcttagccaaaagaagtctggggaaggaagaacagcagagactcgagacaaacagttaacgaccgcagcggatgctgcccccgagatgccgtggcggaaaacagactgtagaacaaccaccacagtgagttttccgtctgttgactcacctcaaatcgcttctcggattgccgccagattccagatctgagctgcataacattctctgagtcaggggtggtgtcccatcggaaaagtgttgctatagtcggaactcgcgcaaagtgtgcatttctcagatatacttcatcgcgagaaatatgctgcttgggtgctgggctccagaaagtgtgcttagcatacttttgattgccagcgcttaagacacaaactgtgacgccagttgtgttagccagtgacactacacttaccaatccatccgagcgcggaagaagagagacacactctgcgtgggtgggtagaggagaccgcccgagacgttgcaacgggaactgaaacatcgatataggatatgtcagtagaccaaagagaagtacaatatcgcaggcgacgtcaaaacgaaagctccaccactgatgagtcacgagtgtcatattctgccgaaccgcggagtgctcctctgctgctgctagtcggactacaggtaccacaacagtaacttacgcgttgtctacgttttcagttgccgctgggaagcttcccgctacccagtgcattgtgaggaatctatcgaaatcacccctacctcaatcacagaaccctgagcggcccttgacggtaatgcccttctgtaagatgagcgtcacagcgcgttcaccacctcgacgtccaacaatggcactgcgagtgccccgtgaacaaacaccaacagtggaggaacagatgtggacacggtaagttgttggctcagcgacaagtccacaagaaatgaatgaactataggcatgcgtgcgtgtcggacgaacgcttgccgctgcatcttctttgctgatgcatgatggctgccagctcccgttctatttgcgacagctgaaagatttgccttgaacaagcatcaaacgacgtctgcagcactgggccaccacaccgggcggctagccgggccgaggcccatggtccttgtcttgtctcacgtgagtaccactttcgctagtctcaggctgaaaaatcccaagacgacgcggtgtcgcatgataggaccggcatcctatttcaaaatcattttccgatattccccggaaaagaaccaggatatattgtcatttgcgtgcattaatcagtggtgctcttccacgttctttttcgacatgcccccacaattggttgggcgaacgagcagaacaccttgttgaatcagacacgccacagagtatctgtcaaaggtggccagtaggaggtagttcggctgtgacagcttgattctgcatgtttcacctctgcgcagtgtcaatatatgtggtcaatttttcttttctttagtgcagttcaaaatcccgccgtgctgaatttggcttgagggttattgtggtgatttgagacagtcatcagtccttccagtatcgatcgtttgtggtagctctgtgtagtcgacacaaaaa

SEQ ID NO: 3207 - DNA, 3562 bp, Toxoplasma gondii
  source 1..3562: mol_type = genomic DNA
gctttgtggcagggccgccgtgacactccgtcttcttccgattttgctgcgggtggcgacgcgtgtagtcaggctgtgtccaaaggcagagtccatggaggagagtttttcgccaacccaacgcattgccaggaaatgtagactatgggagacacaatctaggcttgaagtagccttttcatacacattatggtgaaagtgcaatagtagtaaaacgtatagcatttgttctcgtatccgactaccaactggcgtttttatttcgccatggtactggtagttagtcaaattccaggcggcattgtttctgagggtgatgagatcccattctccggcgcacggaaagaaggctttttggtgacagtgggaaaatcatctatatactgtttagttacaccaccgcagatacatcgtgaaactgtcacgcgctccatattgaaacaatgcaagtcggtatatgggtccgaacagaaatcgtatgctcaaggttgatgtaatcacagccatccgatataatcaagaatgcggtggggagaccaatcgtgaccgcgaggaaacgagcttcagaggtatttttacgtttgcaagcacgaacactcggcaaggctcaagcagtctgctgcaacggattcaaagtagtggcacgccgtagtggaatagtgaggctgagagaccatatccttatttgttgtggcgggggagtacgatgcgtttaactttcgatttttcacttacgtgtgcgggctatgggcgaaacagagagagtagacagaggggggcggggaactgcggagaggacgtgaacagcgtgtgctggcggaaaggtacattgcatgtaagccagcgctggttaggaagtattggtcgagcagtatgctggcgttcgtatgctgaaagtgtctttgaagtagttatatgaccctgttcaacaccttttgtggtatccccagctctattatttcgacatacgggatacaattctgcacccatctttacagaaaatactaccgctaacgcgtgttccccccactactcctctgaatgcgttgtcactacagagcatccgtcgttttcgaagacattgcctgctctgctgccctgtacctgtgcgatggtagcggatcccatctgtgaaagtgaagccagcgtttaggaaattgtagaggaatctgttccctgcctgatggcatgatacatatgagatgcagcctttttctccctgccgtacacagctcgattgaacatgccgcatagaaacgatagctacttgtcactgtattgttttgacaacggtgtccccactctcttctatatcggcggcggtggaggcattaccccttcaaccaggtgctctgtaggacttgcatcaccaacgaggaacgctgacttttttggatgcacgccgaagcaagggtagtgttgaaaccccctgttcaggtgcaccgtttgacacatctgattgtgactgcctgcggaggaaataacaatccagtttcaattgttggcgaaggcgctggcttcgatttttcagttgcatcttggaaaacgtgtttcccacaaagtattcgtctggtgaatctatggcacgagctttttactggctattacagacatttccagcgcggcactgcacttccatgtcccggcgggaaggccgtccgcggcgtgtgccgttccatttagaaccatttacatctacggacaaacgatttcagctatcagttgatcaaatatcctgtattcagctatcgtgtatcaatggttctccgtgccttcgtctgcatcgtctataacttgccagaagtgtacacggatactgagctctttcctacacccgacatgcacgtgggaacgtttaaatacgcgttttatgcaaactcactgcatcatgtcacaacgtcggacaaggtagaattgccttaggaaaaggaataaataggatgggcaagcaaggtaccgtcgccgggccgccgcgaaagccttctccttcttgctggcacgatcgggttcgaagtgtacgcgaagtgactctgtctgtcctttttgatcaacctcagaatacactacttttcgtctaccttgtaaagtgcagcgcgcaaggcgtgcttgagctcataactatgagtaagaagtcagagctccgccccaaagtcctgttcccttgcgcgcatgcacaccgtgtgcttccggttcaagtatccgtcggaaagacagggttgtcctcgcttttgcttcgacaaaagcatgacacttcatgagcccttctatctgtaccacgagtcgctgcaactggcgcgttgttagcagcattaagctgattctttcaaacaatatccaagctcagcaacgtcaacgctgagagtctcggacgccccacttcacgctcaccgctagccccctttagcggacgtcgcgaggagaccggaagaatgagcagggagaaggaaaaaggcgctagagatgcaaagagtcaaaggaccggaggcagtctgagcgtttgttccctggttgtgtcttcagcgtaggacaatttttttcatctgtcactcaacccgcgcccgagtcgtctgccactttcttagtgtaccacatccgttcagagtccgttgtcactttccggactttttcttccttcatcgacggcagctcgcttctaacaactctttacacaaggcaggtctccgggtggcatcacttgcttgtttccttgtggcatttctgttcagagggccccgtctcgttaactcgggagcgtgtctcccgcggtggctcttcgtggtgtgcagctgcgctggacccgctcgcgctcccgttgaaaaagcagattacttcttttctctttgactgacttccctcattctccctctctggatttcctgcacagagagccccagaaactggacatcttattccaccgtcgcgagtctctcacagctgtgctagcgcgacttgcttcgcttttttgtgccgtggttgctctctcgctcctttctctgttgtaagtcgtctctttctcggcgaaagagggagaaagcaaaagcggaagaaacgccgcacaactttaatttcttttccgcggtggagacaacgacactgaagtcaaaggtctctcctgcgcatttttccgaagcttgaggtcggcggccgaatccgacgcttttaaaggtaactttacggttcattttgaggtgtcgcgtgtcttttcggggttcaaagtcttgctggcgtgcatcgatgcgttacgcgcgaggtcaggcgatccccgcctccgagaaaaagtattttatggtgaaaccccaccctcggagaactctgcttttctggattccttcttcctccccttctgtgccgccgctctttcgttttccaaccggttcgacgtcttctcttctaggttgcttgcacagactgcttgtgtacctccgtgccaactgctccactgttttgcttcgctgtcgccctacctcctctcctccgctcgccacgcagatttcatagctcctgtctccatcgtctgattcacacagtcattctcgcttcagcgctcgtccagcaaacacca

SEQ ID NO: 3208 - DNA, 2118 bp, Toxoplasma gondii
  source 1..2118: mol_type = genomic DNA
cactggttccctgtggtgttgttctatgaatgcgaagtattctgtatgctcccttttttccaagtttctccaagaagaactgtccccgtacctatgttaaccgaatccgctaggatcctgggtacacatcgttttccacagaaaagagtccgagttttctccagtgttttcggtagagcttttcgaagtcgatctgttgtgttgacttcaaggggatcgacatggccaccggctttgaccctgagcgcgctggccgccgtcgtgagaggccgcagcgttcctctcgccggatctgtgcgcgttttgtgtttttcacgacccaacatgcaaagcattttggtctcttcttgttctctcacgcgagcttttcattttcaacaagtgggtggcgacggcggggtgccgctctcggtcgtactttgtcattgtttttccgtgttctttgtttggtctgcttgtgtcgagcagcgagaagaaaccgatttctcgttcaaagggaactgctttgttccatctgtgcatgcaggagtgtgagcttgtgaaaagaaaacagatcgtccgaaaagactctccttttcagaaataaattgcctgttcctgcagtccccgggcctcaccaccacgcaaacgcctcagggctcattcgcttcgtgcttgatgacgaagatgaaaaggaatctacatgggagaacagacgtaacaacgaaactaaactcacacagtccaaaacagaagattaagctgcgcgacgtttggaactgaaactggctatttttcaacaagaatggataacaacgcgtttcgccttgtcaaagccttccttcttttgtgtctctcccaaaagcatgcgcccatgcggaggcagtgaagaaggggagcgaaacccccgttccggtctggacctcagcgtttccggtttgtgaggccggctgaaatttcacagttaagatttcgacgactatgagggtgacaagactttcttttctcgaaaaactggtgctgtgtggaaaacagtgaaacgcgcctgcagtcaatcttgttcttctctttgtgggcgttatcctcgatacccccccccccttccccccaatctttgctcttggggaagcacagaggtggagagaatagggaacgcagagaacggggaacaccgcagcagtcaggagcttaagagaaaaaggcagaaagaaggagatacacagcacgctgtagatcgaaatgagagaagaaaataaaagagtgaggagtcgagagaaggagatgagagaatgattggccgaaagagcgagagaacaagagaaagaagaaacgcgagagaatggagagcttcgcgacgacatctgctggttttttcgcgcggtttctctcgtctctgctgttgccttgcaagatcacttgcgcaacggaaacttgcaagttagagcagttgtttgtcaaaaacgcgttcttcgaagaaccgttctcgtcgtggttctctcaaggcctctcagggaccttctgttctcgcaagaatgcgcgctaactcctctcgaggccatcttcagagcgtctccgcgcatgcagagcgcgagacacacttggtttcttggagagacgcgagaagaacattggacgacccccgcgtctgcagttcgctctcccttctgcccggcgcaagggatcctaaataattcagtcgtcagccgctgatgttggaaaagagcgcttttaagattaaagagaggaatgccataaaagttgtgaagacctgcatgccaccgttgcatggctggctgtcctcgcccagtgcgcgcgcatgcactctcgaggctgcgggcgaccgcaaagaatgcggaagcagatttccctgatttccgaaactcgtgtttccggtttcttttagaaacggaagactcatattttttcttcatctccaccctgcactggagactcttggattcgcgatcgtccacactctgtcatgtgccagttgctaccgccctgcatctgtcgttcttgctctatctctgtgcttccccttctctttcttcgtctctctctgccctctcccttccatcttcctctttctctcgttctctacgactttctcctccgtcttccctcgttctccttccaaaa

SEQ ID NO: 3209 - DNA, 4460 bp, Toxoplasma gondii
  source 1..4460: mol_type = genomic DNA
tctgtatctggacagatccttttctggtgggctctggatgacaagttgcgagggacgtcgaaaacgtttcctcatcgttctttcgtgatggtgaaacgaaactcatggtgccaattgcttcccgcagaccggtttgctcgtcctagaggcggagagggaaccgctggggaatctggaagcgggaagtgcgactaatgcgtcgaatctgcatgcatgtttctgtctacaaaatctaaacgtgaggactgaagtgaggacatcaactgcagcaaaacatccctcccagaaaagagtgtagatactagtatacggacacaaaacatcaagcgaaggtaccttgtgcgttgagtggctgttctccatccgcagagaggagacaaatctgtctactttacgttttcttctcgcatgtggaggtttcgagtgtaatatgagggggtcgagaggaatgaaagagaactggttacaactttttgtgtttgttacgttttccttcacctctgaacaagagtcaggggatctgcctgccgccgcaataaaaagtaaggaggcgtttacgtcgaggtgatcattgcttgcctccaaaggaaatgcgtgtggatggccttttttatgctcccaatttttctctgtgcctcggttttgaagagtactcacacacaccgaagcgctaaatataggtgattttttttgctagactgcgagcggcagacgctgcactttgatttttctcgttgatatttgcacttgcttaattttccaattgtcttcgatcaatcgcacacgggttatcatttttgtcctcaagagattcgaacgcattgtgcccgggcggcagaggaaaagatgccatcagctactcgcgatttctcagtagctccatcaaggtggaaacgcagctccttctagtcgtcgtttccgccttgatgcgtcggactcaattgggtattcgttgagcgcatgtgaggactcttcagcacatcgcttgccagaaaacagccacccgtagaaactgtctctcccgagtcgtatgaaattatctctggcgacatcggtcaggcgaaatgcatttctgtgcacccgtgctgtagtatctcgatattcaaaagcgcacaaatgcactgctaccagccttgcacacaaatcagtgccaccagccttgtcaactgctgcggcgcatgtcatgcttaggtaagctccggaattttgggaaagactggcattgcgacccgaccagtagcaagctctgctcgagaggcaatttgtagagatgttttgagcagtttgatggtgtgtgagaagaggacacggttggggtcctctgtcattcgagaacacgatccagcccttagaaagcatgacttatgtcggcggcgccccctttcctcgggtacctgttttgtccccaggatgagcaagcaccgcttgttacactcggcagatttgaagtgggcagtcacgagaaaactgatgtggccagtacgctccaccatgttactgcactctcatcacccgcgattctctgcaagaacagattcagagggtcccacaattccctattccacgacacactctcgcagcagtgccacaagcacaaaagggtttgtttcgacgcatgaaatagaccgcccctccagagaaaacctgtattggtgcagccattcaaagcatagcggggcatgatcaacgactgcctgctgcattttcggagttggggctcttcaaaacaaacgacgtgagatggctttgccacaagatagtgctaaatgcctgtttttccatacgaggttcgttacaccgacttcggtgtcgccctgcaaaatgctgaccgcttcccgcattgtctatgatcctgccagaatggagtcaccctcatgcccccacttcccctcgcgagtgacagggcagctcgaggtttgacatgaatggcagaagagttcactttccgaacgcccactcaagattacgccatccatctgccacaaaatattacgcgcctccgcttccactgaagtgctgcttgcggtgtcgcctaagccctgaagtttgcgttttctggtgcttcttctgtcacgagggtgatgatgtaagactggtcctttgcctttgagtcctctatcgcctcgcatctgaacgagaatgtttttgaaacagggacattttccggcacgttgagtacagcaggttcttttatgccgtcaccccccgtccaccattggtgcgagtccggcacaccaggaaagagggcttggagagtcttcttactcgtgcaactactgccttttccctcacaaaccagctttttgaagtcttcagggacccagttcttggcattgttgcattcgatcgccaccttccatccaggatacacataagcgatgttctcagtgcccgtcccgcggatggaactgaaccacacgatgttgtactgtccaaacggaaactgctgctcctttcgtgcattcttgaaaaactttggggcggtagcttggtctgcgtccattgcagaggcataggcaaatatggaaagaagcattgctaccgaagcgagcttcattttgtcaagcagagccaggaagcctggaacaatgaggttggccagagaagacaacctactgacgttggtagagagagctcaacaacactactgcatgcaagaaaaagatgcacgttcctcccactcaaacatcactggaacttttgtaatgccaggcagcagactcacaagaatcgatgttggtgccccgtgcagggaaagatcagtcacccgcgtatgcgggtaggttggctactaagacagcgaagacgaatgcccatgagagtggattttcccggactcaaggacagcggcttgtctgaaacgaggcacatgaaagaacaaaattcgacggcaactgtgcgtgtccggagagtcagcaaaaagttcgactctccagcgtatacctgcattaccctgcgctcttggtcacctcggctagccgcctttctgcttcgtgtgtggctctccccgttcttgtgccgctgcagtcgttgatccagagaggtgtcacctgtgcttcagcgcgggggtgtacacttggtgtgagtttggaagccttacgtaaaagtggggtccaaagtgcattgatccatggattaccaaacgagtcgtaaaacccccgtctttgccgtgcgttccccgtccgcgcgttttagattcgatgcttctccgcggagtacggaaacaaaacgagctttacaaaactttgggcactactccggcatcctttgcggcgattcgtctccttccactgaacgctgctgtaactaatggcgcggttactgcctgcagagaaataccagcgacacactcccgttcgcttttgaggcgccctgcgagttcattacctctaccgggcgggcactatggtatcgtcacgcgtcacggtgcagtcggcgtgatgtcaccacacgctgccagtggatatatctacggaagctgtaagtagggcaagcgttgtcacctctgtgcacttcatcaagcactccgaatgagagcttgcacctaattcctcaatacgtaggcagaggcgatggaaccgtgtgtgtgcatatactgccccagagggcgtgcgtggaagtcggcggtccaccacggggcggtcagtcgtgtgcgtcgtggattcacttttgcacagttccgcgagactcctgcagaagcaaaaagttaattaaacattgttgttcgttaataatctccgcgcctgaacaagggcatttagcgggcacgaccagacaaactgctctttagctgcagttcttagtgccaccttcacattgcaggatggaaaagaaactagactccgggtaaaagtagaaggatacagggattcccacaaaaaattgaactgtgcaaggaattggtgttttatagatgaagcacggaccagaaaaacagttcgcctctcgttactctaaaccgtagcgttgcatcgccaagcggggcggcacggtctgaacttgtctactccagtcgaccttagtgctgcagagacatgttatctgcggctccgctggcgtgcgttgacatttgccagaaagtctaaagagttactacaccatacagcttcgcagaaatccgcaacagacgggtgtcttcgctctgggaatgcaggacagttgtccgttgccgactgccgtagacaccgcgcagggggaggggggttttctatcggggtggtggagacccagtggatgcatcgacacgaagtggttcatcgatgcttctccagcaatgtcttccgtgtgtacccacaggttcgtcgctatgggttatgggggaacgtcaccgaaacacggtaaacggctagctccacctcccccgcgtgcgatccttccccttgcatccgggcagccatcggtacttgtatttccagtcccgctagacacaacagtttccttgttcttcccaacacaacgca

SEQ ID NO: 3210 - DNA, 1321 bp, Toxoplasma gondii
  source 1..1321: mol_type = genomic DNA
tactcagcgaatttgacatgcagcgcacttctccatcgacttactatttctgctcccaggcaacaagcccagactgttcccgcaggatcggcaagtgcctgtggacgggaatagcaaaagcgcatgaacattgattttttgactaatgttctttgttacggtagccgagcggagacagtagcgaataccacatgaagttctctgatagaaatgctaattacctcccttgtgaggccgttccacaatattgcttaccctgttctcatgctcagttcgcttcgcttacctcacttctttcccgaatggatgcctgaatatccgctcgcttttgtgcactgcggatcggtttcttctgggtgttgtatctctgtagagacgcacaccgcaaaggcaagcacgacgtttgtctcccctgtgagaggtatgttgtttcatgcattagtgcattcaacatcagaagagccgaaaaccagctcggttctggcccgtgaatgctgtatgcgtgtactgcccctgactcactcctgtgtcagagaagaaacattcacggtcgttgtcgccgacagccacctggttcaatgtgtacgcctttgtgtccgtcatccgctggtaatgcgatccagtagccagatcacgagctttcgccatgatgccgagcgctgttatgtctctttcttactcacggaacagaaaacacgtgacatgtaaggattcgtcacttgttctatttcgctggccggcttgtttcgaagtcgcagctccaaaaataagtatggcacgcacttgttgtcttcacctccttacgaaccaccaagtgacacgttagggcttgtcaattgcaaccagaaaaagggatacttatcaaacttgaccgactgtgcctcgaaacgaagcacagccgcatatctcggcctcaatcgactcggggggggggtgcagcttggtacactctattttacattcccgcgcattagctcccacgagcgccggcagtgagtaacttcacacatattcgggacattcaaatcttactgggatccccgcagcggccttcaaaaccgagcaagtagccagccttccgtgctcgcaagcagcttgaagcgattttcccgtgtttgctcccaagcgtgcatgcaagaaaacatgcgattttggcacgagcgaatttcactcgatgctgttatgctactgtgcgttccaatcgaggatctcttcacaaaagtacgacattgtcaagtgacggatatcttttcgagttcctcttcgtcctcgtatatgctgctactgctctagtaggcctcgcgaccttcgtgagtgaata

SEQ ID NO: 3211 - DNA, 2738 bp, Toxoplasma gondii
  source 1..2738: mol_type = genomic DNA
gcttgcttctgcgcacggttgattctgagcctcgtttgccgcgctaggcggaggagcactccggcttgttcctttttctagcgcatcccgcgttccatccgatgctggcacggtgtcactgtcggactctataaaattattgagtccggcaagcagatcaatgcaaggcacctcagctgcttcatcccgtctcctcgcctttcgcctcgagagacggccgcctccccaaggtctgttgtgtccgcaggactgtctgccgctagcgttaccgcttaacggtcgtctgtcaccattgtccgtagcatcgtcgagaccgcgctcaccaaacatcaacttttggagtgcctccgagcttccgaaacattcgacagtcttgttgttcgaacacgtacaaccgccggtaaaacaccggccatcctgcagcaccagaagaacatttcgggcgccaagtcttcgaacaatgcgccgacacacgtctccccgatgtcggcgaccctccactccgacaaccatgccgccatacctggcgctaaaaaaattaggttccgagcatttctgctgctgagactcttgtgcgagcctggtcggctgctcactgtcgcccaaaccaccagcgtctactcccggctggcatgacagctgctgcgggtaacacctggcctcacgcgaggggatgggtcggcccgccggaaggcccgcaacagcgttggccaaaagcagcagtttgttcccaggcgcgcaacaaaggtcgcacacgatatcccctggctcgggacgcagagcagccgcagctgcagcagatgctgcatcgagggggtgaatcaggccgagccggaagggagtgcagttgcgaggagacacatgaggcggaagagcaaaaattaacggaaaggacggaaggagcgccgcatttcctgaaaagcttaggctgtcccctctgccgaggcagtttgggagcagccacggcaccggcgaaggtggaagtggtaggttgagttccgtctggatgcaagacaaaagagaagagatgtaccgatcgaaaggaggcaattgccgcctgctctgagttgtttctggtcgctggatggaagaagcttcgaagtctggctcctctcgcgaggtaaccgcttcaatccgggatcggcggcaagcatcaagtgaatgaaacacacagtcttttgctcgtacagcaggtacaaaagactcatgtacaacacagggcacagcgccacggacgactctgtctgaagccaccgccgcagaatacagcagcttcacgagcgaggcggcgggtccgcccccgttccttaagatttcctggactgtcgccactgcagtgcgcgtgagtgcaggcacaggatagaggacagcaaagcagcgggggatttccaaaggggagtcatacgaagaaatatcgacgttgtttcgcttcaggtaggcagcgaaatcttgtggcagctgctgggagaacgggcgactctcaaccgcgacgccacttgacctgtgaggctcacgggaggcctccattggtagccgtcagcgctactttctcaaagctcacagaagccagctacagtccgccgcagtttgcttatgggagtaacttgcagccatctccaacaaccagccagctcccccgacactcgaatcatagacggcgcgaagaaccacaaaccaggagtggggagagttttttcgccacatcctcgcgcacgttgtaggcaggtttccctgccagtaacattaaaggggcaatagcgactgccaagggttgtggcaaccaccgactgagccctttgtttgtgatggggcgggtaaactgcatgcaagcggaactcgtcgacgagttattcaacgtacaagtgctggatgtggcaggtactcctcccatcgcctgcttcagatgcgttattcacgcaccctggccagccgtaacacctggacttacctctacttctagtgagggtctcaggaggtcccaacagatctcgccctggctgtctgtgtccgcccaaggtcgcatgcgggaaaccgctcggcacatcttaccgctgggcccgcggagactctgtccacttccgtgtcgtacaccgttgtcgcagctgctacacacgatccgtgcgttcctaagttccaactgtgtcgctgaaatgtaaatgaacgttctctcgcgttcagcagacattctttttgaacgtgaagccattgaccttctaacggttaacggctaaattcgacgagcaagaaagccaagcacacagcattgcgtgcacggaaccccagtatcggctgggaaagcgggcgcggcgcgcgtgacccggttctccttgctgtcgcttttttggcgttagagtcaaagtcagacgttataggttgccagattttggaatgtttcccgaggaaatctggttttcgccggaaaagtacaacacagtctcttccgcgtatgtttcctctgctgtcctgccgtggtggacgacgacgtgtaagacaacggccttgcgcgaagggccgtacgaaccccagccgcttcctattgatattaggacacgtgcattttcatgtcacaagctgtctggaaaaagaccgtctgggatccgtgtcgtgcttccgtgccaccccccactgagagtgggtctcgcgtttcttgtggtgcgcacacaacacgtacacactttggcccgggccgaggtcactttgaggtgcaggttctttcattgacttaccctcgcggggaa

SEQ ID NO: 3212 - DNA, 2035 bp, Toxoplasma gondii
  source 1..2035: mol_type = genomic DNA
atgtgtcagcaagtgtgtttttgtgttgggtatgcggagagaagagaacgagtgaatagtcaagagagaagaaccgcaagtcgctgcacctcagattgaagggcagctagttgggtggaggcgcaagttcggggaaacagaaagccccgccgtcagttctttttcgcagtactgctggaaagagcttttgcatggaataggaagatccatttctccacagaagtttcgaaaaacccactttttcacgttcttcttcaccaccggcttcttggccttgagaggagcagcgcgctgcgggagggaaagcgccgcgcaagccactcgcctcagaatcgatgtcggcatctggccacaggtcagtggacaccccgaaagaaaaacacggagaggtcaccgaaagaaacaaatgtgcaacggcaggcaggagagaaaaaaacgtaaacaaaagagacggagccgacagcgcggaaagaggaaaagcgtagcagcagtggaagagaaggacgcgaaacagcaacggaggaagaaaggagagagaagaacgaagagagggagaagagacgaaaacacaccggtaaagatgtagagagcgtcaaacacggaggacaaaagtcgggactggcatgactcaaccgaggagagagaggaggcttgacccttcctcgtcgtcagtcttctctctcacaagctccacaaaaggacggcagagaaatcctggtttaccaagatgtgttttttgacacaccctccacacgaatcgtttctcgagacgcgagcgaggaccacggacccgcgtcgcacttcagacggacgatgtgaaaaaaagggcagaaacgaaaagtcatggaagacaataaagaggcagagacgagagaagaagagagaatagaagcttatagagaggaatatcggtttctcgggtcgtctgtgtcccgccagagtccgcttccgctaccgagagcggcaggtgtctctccacggcagggagcagcgagattgcagatgcgcctttgtcattttcgcgcgtttgatcgcggcagaaaagagcagcagtaggcagagaaagggtgaaaaaaaaccgatcgtcgttctgtcacccccctctctcaaacgctctttctagccagaaggcgctctgcagcgtggagagacgaacagtgggggaaaggcgggcgtctccgcttcgcttttgcttctttccctctgcactgaggcgagagaagagagagaaagaaaaaaagtggaagtgcgtcgccctcaaagtcccgacacgtcagtctctctctctctgcagcatgtgcatgtgcattttatctgcatgcggcaggcagaacgaaaaagccgacgcggacgaagtcgcggagccgcgggcgcgagcgagctttaagggtcgtgtgtccaagaagggtttggggtttagcgttcttggtccttctttgagggtccttgtttcttcttccgcaagaaggaagacagaagaaatttggatcgaaggaaaaagccggaagagaagagaggaaacgaaaacgtgcggcggtgtgcctcgacccgctcttggtcgcaaaggcgagtcgatcttgggcgggtctcgagtcgccaaaaaacgcgaaacttgcggcggggcttccagctcctcgggtgtacatacacctcactcgtgtcagttcctcgcgtcgccaggtgtacgtacacctgacgaagtgtcttgtgtcaggccgttttttggcttctgtcgccacattgggttttcacagctggtgcggcttcgcacggtcttgaacccgcaggcaggaacacttttgttctttcctctcaagaaactctcctttctgcgcgttcgttcctcttgggggttcttcacctttctgcctcgtgcgccggcagtcagtctcctcaaagctgcctcaagaccctgcctcaggcacgagtgacctcgcagactccgcagatcgctttcctttaagttgtccagctcctgacaagcccgggagcccgagaagtgacataaaaggaacctagttctcagaattcacga

SEQ ID NO: 3213 - DNA, 1592 bp, Toxoplasma gondii
  source 1..1592: mol_type = genomic DNA
ccaagcacagaagcagactctctgatggcttccgttcctaggaactcgagaatgccgtcatctttgcaaacgttctggtggagagcacaggctccagagacggtctctggacacaggtctgcagagtttttcgaaaaaaggggcgtatgtgtttttgcctgccctcgtctctcggctttcattcttacacgagccacttggccccagtacgctgcgtgagaccgactcgccattgtgaaagaggcaagcgcatgtcgagtttctgcggagatttcatatgcgggtcaggacagctgcataaaaaagtcacgcgatttctctggatgtctcggcgaaacgattctcttcccggctgtcgacttcgcgggagtcgacgcccgacgatctcgagcctttcgagcgccctagacggaccggactgccgggtggtgaatgggccaatccgatcaggtttccacgttcgttttaaaagacgggtcgcttgcctgaaacctagccttgtttggcctgtttttcatccatgcctcgatttgcacacggaacgacatcagaaagagagcaccttccttttctgagagccttcttccccgtttacactgaactagatccggagaaaaacagttggatgagcaggcggcaaagaaacttccgctctcggccggtggatggggactctctgccggacgcgaatagcggagatgtgcgacactcggacaagtagaaaacggccacaaaaaaagacaaagacaggacgcgagacaatgagaggaagagagaaactgaaggaaaagatgcaatgacgttctttgaccgttcttcgacggaagaagtcgtcaaagaaaagcacgcgcgggttgactggccaagaactctgcgcaggccccccccccctgcgcttttgcggtggtgaaaaggctttccttctggacgctgtctggctgcatgctgggcctttttaacaacaggagaagctacagaggagaaagagaaacagtctgcgcaagccaggttcttgccagcctcaatgccgagacgaccgaggaagaaaagtcgcgaattcgcgtcttaaagtgatgctgcactgcatgcacctgaaaagtgtgtgtgttcgcctgagaaagaccgagaagacgcttgcctctcagttttctaatccagtttctgagtctgtagatttaactctgaacgcagcgaaagtgtgcaggcgaaggggcagtttgggttttgacgaatctttcgttcctgcgtcagcagccgggatgtgcatgcgcccagaagacaggggaattcggaaatggaaaaagaggcagatctgtgttcgtttgcttcagtcgccaagacacattcttcgcgtttcacgagtcacttcttctgagtgttgtcaagatgccgctgccgagaaatctctgacgaacgctctgccgtctgtctgtcagatcgcctgcacccaccgttcacacactcttcactttcccttgctttcgctaaatcccgctttttctgttctttccttcctgtccacacttctctgttgctggattgccctcctgtctgcccctccgtttttgccttcctgtgcgacggcggtggca

SEQ ID NO: 3214 - DNA, 2488 bp, Toxoplasma gondii
  source 1..2488: mol_type = genomic DNA
aaatgtcagtagcgcatccaactgtgcccgaacagttgcctgctcttcctccagtgacgccacgtagtcttcttcttgtgacagcgtgccatctcggcgcgtgcttcctgttgatcttttttgtgcggaccctcgcgggggcgcagacgcttgagtgcgaacctgcggaagcggacaccgagagcagcaaaaataaggaaatgcgacggaacgaagcgggaatgtggaaccggaactgaaccgtttttcgcattttctcctctatggtgaaattcacccttcgcgccagaggttgagtgggagtgacaatgagccgacggcacttccaccacagaaagtgaacagagcaagcagaccacgatcagcccacagactaaactattacgaagccgtggttgcactccatacgccctagtgggacacttaagctgaaaagaacagccttacagatgggcgtgacaaccaactttgtcacacaaggcgtcactgtaggtatttcctcggggacaccacacggctgtattgcacacaaaacaccgtctttcttatcgaactcagggcggcgctctcgtcgttacacttgtcgtcacgagggagtaaatgacatacctccgcaccactaatgggggcatcagatgaagcagccgccaaagccgcactctgaagctctgcaagtctctcccttaactggcgtgctgatggccatgtatcccctttctgaaccatcggagagatgacctccgtgtatagacgctcgaactggcgccccccccatgcagatttcggaggagagaatcccgagaccccgcaagtactcgaagatccggaagaagacgaagcagatattccttgttgcccagatagtgcctgcgtagtgccgcttgcagcattggcaggcgcagccggagtagctgtgagcagagaggatcctggtgcagcatgtgcatttgtcatcgccggttttgcggacaagcttcctgttgttgccgagccccctccgaataaattcgaagaggtgggctggcttgaattgccaaacaacccgccaccggagcttgccatccttctgccgacggagcgagggagggcgtccgcccggaatgcgaaaagtgttgtccgaagagagtcagagaaacatatggatcgtgaatgctggaagcaggaaaaaagagtctgagatagagatgattttaaagagtgagaggtggagtgaacgcaagagacagattggaagccactggttttgatgcacacccgttggctgccaagtggggataaacgaaggatcaagatggcacgctgctactgtgtggtctctacctcaagtggcgtcagacgtttatcacggtaaacggttttcaggctgcagttagctataaatcaacgggcattttcgacaaagatcgagacgaaaaatgttgcccccagcccggctgtgcatgtcttggacctgcaagaccggccacgcgcgagggtagaacaggagtaaccgatccgacaagcagtccacttaccgcatacctctccagaaatacaaagaaatattttagggcgtttatttcccacaatgagatcgatggccgccactttactaactcagcatgcacgacctacattcacgacctattttctctccgcagctgcatgcagcagtttcaggcagacctcctactcctgaatcaatccagccccgaaggttactgtcgccaaaagcatctgtgaagaagagtatatttctacagtgtattcgtacacatctacaggcagagtttgtgatgctggcacacgcgcggaggtcgtgctggatattcatgtagggacggcccacgcctagcacaggcctgccacatcggcgagctcaggacactttttcactagtcggtcacttctggaaatggattttggctggtcgcttgtgaatctaccgccgttaatgcttctcctgaagtagcgctcttcgacacaaggtagcgtgtttgctagtcatggcactatagaggcgtcagaacgtcccccggcgcacacgggaggacaggcatcagccgcgacaaagagcgcaaatcgcgttgttctgataggtcctccgtcgatgaaatttatcaaagcaaacgagatgcaactgcggagagcccaggtgtttcctccatgcacacgcccgtatcttccgctgtgcactacagcttcgtgtacacagttccggggctcggccacaatcgcttttggaggaggcccgctctacgtcgactaagtgatcgggagccgcaggtgtatatccagtgaaagcagttatggcgtaaataggccaaacgtccaaagccagctaccaggaatcctctggtgttcacagtgtgacgtcatctgtgttacgttgtgttttgtcgttggctccagtcgagtgatggaaatatctgtgtagccaaaacactaggaacaggcgctgccgcagacgtggcccttttcgcatggttccagtagcctctctgcacga

SEQ ID NO: 3215 - DNA, 5005 bp, Toxoplasma gondii
  source 1..5005: mol_type = genomic DNA
gacgcagagtagtggacccttttcgtttcagatttcaggtgtacagacactcggacccgaatggtgcgcttggcccccctgtggctgacgttttcctttcacagcatttgccaggcagaagaggcagtcaaaaaaccatgcagacatctcaggggtctttacttgcatgaagcagtacatgggaaattgagggatcaaatttttcgagactctcgcactttttgacagacggcacttgagtccactggcagccagatacacggggagggcgcgcctcgtttgagtgagtgcagaagccaggtgccatgttggaaagaggcaaagcagccgtcagactcacggggtcgggcggaagatgaattttcatcagtccgtaatatgctttgcgtacatgtcccttatgagaggtgcttgttttacggcgagcaaactaccgacactctcgtaattcttcatggctcaggtacagcgtatttcattgggcaaacacggtggcgttgctgcgcttactcttttccgaaaaaacacccgtgattcggaaattgtctatttctacttactagtataaatttgcctctgagcagcaagcacagactgctttcgcatgtgtagcctgcgcaacctatgacgccggtgatgaaacttttcacgatcgcggaaacggctcccgtactcccgcgttcgtttaagaacgtaagagctcgggtaccgttatgtctagggagaggccgagactctcgctggagggagtatgtcgagaaaaacgctgatggtacactttttcccagtgtcacttcgtgacagctttctcctcagtccacggttggccttttctctgcgcgagtgcattgcgaacgatcttcagaacacacctgtgtccgcgatgcataaacctttcagcagcgggtctgtcacggaaagaaagcagtgggtcttgcgccgataggctgcaatttatttagatccgccgcgccggacacacaggtcgcttcttacttggtcacggttgctttatgcgttaaattctatggttttcgctgttcgaataactgcatgaaagttcgcagaaaaactcgtggcaaacgaatgtgaaattcttccgaacacagaaccaccgggcaggattaggctacaactttctatctgtatgttggcactgaattgtcgactgctgtgtccgccctgaacgcacttcggtcggaacttgtccgccggattttggtacctgcagtgttcgattccatagcgcgcttacgacagacaagaagaaacagcatccactcagagccagcaacggtttactgcttcggtgttcctcagtgttaccattctaacatctgctgttgtacacttacagctgaaaagctggctgtcaacgggggagcatcggcgcgcggacagcacccggtgccgaaagacgagtggttgaaaacggtatttctactaaagaccctctcaccgacgcaaccatcgttgttgtggccttggtctctttgaaagaaacaataaaaaactgcatattggcaagtcagaaatttctacgtggcatttgactgattccacgcacgttacctgtcagcagcgattgacaatgtactgaaacgcatgatttcttcgtcctttcgcggtcacagtttgcgacatagagacagagagttccggagcagattttgctgacaattctggtgctcagtctcgaaaacgagtgtcgctggcatccggtgaaagccagctcccaacgcgcgggacgaaactacgagttagacacggttcgagcgacagtgcacgatgaagacgcgagtggccccacgctcgccatccggaacgcaaagtcgagccggcccgttttcgggctcccgtccacaatttcgccgcgagtccgaagaagagctagttgtgtctgacgcagggggacgccgccgagcgttgcggaaaaacagggaacccgaatccaacgtgtcttgcgcgacaacttttcctgcaatgcgtcctgtcggtcttttcattcttgtgccacagttcgtttttctttaaagagtggagtgtctacgttttcgggatacccattaacactgcggtgtcattgtttgacgaagttgacacaggaaccatggagcgagctagcgccgctgcggcaacacgttcgcctatcttcgcgtctgcactgaccaagagaaaacccctcctattgctgcttggattcgcggtcgtcttgacgtttttcacttgcggggttccaactacctctctgcggctgaggggccccaaattcactctgcaggatatgaagaaagccatcaaagacgcgaaagacggtgtgaaaggtgttgaggacgctaagaaaaaacatcagaaggctgaggattccgccaagaaggcatcaggatcaaagaaagacaagctacagaaggaggcagacgaaaagaaagaaacgttgcagagcaagattaaggatatgaagcaaaaatgcgaggagttgcgtcaggtgaaagaaggcaccaagaataacaagggactcagtgataaagaaaaaaaggatttctcgaaggaaggagagaaagccgacgaggttctcaaaagatgcgggacggttgtgtaggtgtagctcttcataaccaacctcttcctctgtggccaggaaacgtgctgcaggagcgagacggcttcgccgaaagaagggatttgcacaaaaagaccgtgacttgtacagatgggagcgcgtcgcggtatcctctgtgcggacaccgggaccaagcgttttgttacacgaatggttttaaagtgtggtgctcgcgttttggaagaaacgttagacgagtgcgtggcactcgcaaaagtttgctgttgctgggaacgtcgctgcaagactcaaaaacagtcaacctatgatttttcgtttgcagtcacgactgtcagtagatacaccacacggcaggtgtctctttcactccaatttgtcatttgaaggcacgcaatgccagtgtagacggaagagatccgtgacaagtgcagtgcaccaggaggtggcggtacgaattcagggaccaggccataagtcacggtcgcaacgccaatgtttcgcgccaacgagcgaccacttacaacacagaagtagtggagttcctttcgtggaactatacacactcgagacactcagtgctatgttgtaaccacaggtggtgggtggacgttctgtggcattgacagccagtaccggattcgcagaaaaagcagaccgaccgcctccattttcatgactgaagaagatacgccggactggaaatgcgttgatatcagtgaggccgccatacagatccgggtgttatgactttagcacgagtgtgcgggatattgcttcgtctggggaatctggaagcgggcctgccgcataatgccttcggcagttctcgcaactggggtgggctgcaagacactgccacgttttgtacgtgtgaacacgctaaggatgtttttgacacacatccatgttctttactaaacaaggttttgcggttgatccgtgcttgacaacgcaatttgaattaggtcactgtatggtcaattgaggaggacagtggatgtcaaccagtattgccgtcaacaatagtttgaggggtgcaccagcaaacaaaatgattgctgagaaaaatggagcgacgatggtagtgtcggcagcagagagtgaactgtgaacaaagcctgaaagaagcaagctgtcaacggaacgcgagacttggtatccagtctctcacctctgagggagaaggttccgtccccgccccccccacaagcttctctcgtcccttttccacaacccactatgcttttggaaacagacgcaccggccttgttgcttgttgttgacacaggaacgctacaaccctaggagagctaactccttgacagtaccactagcgagttattgcattcactggcagaaaatggtggcaaccgagagtcggcgccagttgcgcgctggcacttttccagttttccgcaataggatgtggtcccgagcccgcagtgtgttcagtttccccagcatggggatccggaaactgctggcttttcatcttccttcggtcaggaagaatgtcgcaaattctcttctgatggacacaccggcgaatgcgagcaagaatgacttgccgttgaggaggcggcatgagctagcgagcaccgcgggcacaggaactccctatttgaagacgcgggggattctcgagcagaatgatcgacagccacttccttttttcgtgaattcggaaagcgaagccatggcaaaatagccgggcactggcaaactttccgcggccgggcagaagcacggtggaaaaacagtgctgcgatgtgcttgcgtggacacggcagacaagacattctctcgggaaagagcaggtagttaactgtctgctgagtcggaagaagtgtttctggaacagtcattttccgaaggaaccgcaagtactcatatcgaaagaatccaaagtctttcttcccttgtggcctccattttcgtctcaagcaggggaactgtcatctttttctggcgttgttgcctctggcaagatagcgctaactgctcttccgatgcttctcaactggccaacttcgttcaaccgacaaagcctgctggaaagatgtctatcgagtggggaacggccaacttttgccctttcatctcccagtctttccggctgtgaacacgtcgttttcttgtctcccttagtcttttccagattcagagcgaacccgttgaaaccgggagctcgtcctacgtgccctcgcggggtgcaccctttgattcacatcactagaatccccccacggcgtatgattcacggactatcccaactggtatcgctgaccattcttctttgcatgtcccatcaaaagcagtcgaagctacataaaggtcatacccggcaacggcgtcgccgcctggtctgtaaatagaccgcgttccacgaaagtgttttccatccgcgttcagtcggcagaagaa

SEQ ID NO: 3216 - DNA, 3598 bp, Toxoplasma gondii
  source 1..3598: mol_type = genomic DNA
ccatgatccagtttacttcgaagcctgttagcggagaagcgagatagagcttctgagcttcctggcccttcgacgcgtcggcgctgtttgtcttgccagaagtttctttcttctggcggtgtaacagaagcgcctcctgctgcagacgcactctgcgtttcatcagtatgatcttgtgacgacgaggaacgggcaaagcggggtcgcggaaaggaaaaatgcacaagaccggtggcggacccaccactgggtcgctcacagcagcgtcggacggcgctgacgaagccatctcgtaaactgtcgagtgagttcagagggcgtggagtgagaaaggaaagaaacagggaaaagaaaaaggaggcgtcagggaaaaaagagacggaagacaagtgacaggaaaacaccgcttctctgtggcggtagagaagggtgtaagtgtcgccgtggaaaaggagcagcagcagacaaaaatgactgcaagcaggcgccggtggatctcccgctgatgcgcagagagcaggaagaggagagaagggcagagatgcgagggaaggaataacgaaaaagtggaagaaaaaacctcggccgacgcgtttcgcaccgaagaaaaaagcgggaacggaaaacgtggcgttttccagtgccgcggacaggctgtggacggtggagaacaaaaatctcgagtgtacagacacaccgccgcggtgtcgactgtctcgtccacttgggttagaggaagatgagagggaagggaagcgtactttaacggaatccgcaaacgaatccaagaagcgaaccgggccaaaacaaaaggagaggcgccacagttccgtaacagaggaggcaaaacggctgctagaaacagagacacgttatgaagaagcgaaggcaggagcgaggaaaaatgtgtaaaaaggggagggcaacccagactaacaccgggtcaaaagtttgatggcgctgcggagagggttatagagatatcgagaagaaaagaactcagcagacagcaatgggtcgaccgcgcaagttctcgacaggaaaaaacggtggcgaagaaaggcacaaagcagcgagagtctgatatccgcgtgttcgtctgcttttctttgaacgaaactttccggaacgcggcggcaaaaatgtgagacccccagacagcgtggcacgaagtcctacaagaccttccagggtcgcgcagctgcttcctccaaagcaacgcagagcgcggtccagcctacggactctgaactttctttcttgctgcctgagtgtacgccgcctcttcaaacggaaaaagcaaaagccgaagggaagaataataccaagcgcagatgtcgcgtgggcgggacagcgagaaaggcaaccaccagataatggagggtggaaacgcgtcggaggcaagcggatcgaccaagtgcgacatggaaacggaaaaacacactctcagtttcggtaagaaacacaaaagaaagagagcgagaactaggttgttgtctgcacatcggcttcccccctagaaaaccaccagacagggcgctgccgcgcgcaccgctaccacagagagcgcccttaattgcgttttgcgctgtgacacgcggggatcagttcgcggcaattcggcttttgcgggttttgcccccccccccttgtgacaaacggctttttcttccagaccaaatgaagcgttttaagccccaatgtgctctcctctagcgttttctgtctcccttcttcaaatgctcggtcgatttccacctgtgttgatagaaacacaacccgcctagctgcaggttctcagaggaacggcggcgggacgtgcgacagcgggtgatcacgccgtgagtggaacgcgctcttccacgtctcctttcctcgccgcgttccccttgccggttttctttcggtgttttcaaactcgggcgcacagcaagaggcttctttccgagagaactctaggaaaacgacgcgtttatcggtgcgagggaaacaagtagtgcgcgctctgacgaggtaacgagacacccaagttacaccaggaaagcagtcggccaccttcgaggaaggcggctgcgcttatcaaccatgaagaataactcgggcaccggtttttctcccagaaaactaaatttccgcccggctgttctgttgggcacacttcctggggcgatctttcggaagtgaattgcgctcgcgtggttcccttctgtgcttgttcgcgtgctggtcaaaacgacgtgcgggtcaatcgctggctcggccagagtgacttttgctaggaaacaagcggtatgctgcggcgtgtctgtgcaagtgtttagaaagtttctttgacgcgtgttcatcaacatttcggatttccgtttccggctccccacctttaaaaagccgcgccacggctgcgaaacccacaccctcgtctacgtcgctgcagtcagtcgagttcgagacgctctggacagtgtgtgtgtgaagaatctgactgcactgttccttctgtgagctgaaaggtctttcgttactagtgcttccgtgtcaaagaagcccaattttctctcgaagaggcgcgagagggagcagtacggctgaagaaggagaaacccgagagtagtgttgcgctatctatctgcagctgccacgcagagttcgcgaggcacagcgaccactctccgtccgttccatgtttgtgccttttaaggagttcaagaaaacgcgttttggtttcgagcctttccagaaaactcggaaagtacgaattcatgctcacgagggacaggcacgattcggaacggggaaccgagccgcctgccaccgctgtttttgcatcttgtggaacatgcgcgctgagcatcagaagtagcaggtggctggcgactgatttgcgatgcgctgtgttttccgcgcgggttctgttcgtttttcgcggagcaagaactctttcttctccttctttgtgtctgcctcatcgggagggaagagaaacgcttccgcggcgggtatctttctcctactccgaaggcacctccccgctccgtaggttccgctgcgcgcacagcgcgctctgcggtgagagcccggcttcctttttccgtttctgtgtttttcttgctttactttcttccttcttatttcatgtcttttgttctttcggcgggtaaacttgcttttgtcggccgaggtctttttcccgtcgttttgtgttctggctcggctcgtctacggaagtcagcgtcagcagcggaaactcgaactcctcacctgtttcccattttcttagcgggtttcctgcggtgcctttttctagacgaaagacactcgcttttctcgagttgaaattctcgagctttcccggcaaatcctggtctgcctcgtgtttcagatccgcagccggccttggaaacccgtgtgcctggacacagaggagtcccgggcagtggagtgcgaatgcgtgtttgtgtatcctcacttgctagttgatattcttttgacatttttgaagggcagcgtcacagccgcggtgcgtctggaggttttactgtcgagtaaaggggccacgttttcctgaaaggtcctccaccacaagttcttggggcggtga

SEQ ID NO: 3217 - DNA, 1977 bp, Toxoplasma gondii
  source 1..1977: mol_type = genomic DNA
ggagaaaaaggagcgggcgttgtgaacttcgcacaaaaggcctttcaccagaaccccttggatctgctggctgctgcggacacggctgaaatatggaagcaatgaagggtggagactcttctccgcgtagcacaccagccctggacaaaatgatgtcagaactggcaacaagccatcggcaggaacaagcggaatggttgtttcgtcaatcgagtgcccccctgtgggaggtgaagaaaggccctcttccttgtctgtctcgacctgaactgtcgactgaagatgagttcgttcacttgcagtccgttccgctgcctccctgtatcgccgaacaaactctcgctcagcttctaatacggcaattgcgtcactaacttgcgtaccaagaacgtacgtagcaccggctagtcgaaacagcgtggaaatccgccgtaacgtcttggccggtgatgacccaaactcgtgagcaagggctgttatagattgaaaagataatgacaccactgtaattgactttgccgaagagctccgcaccgaccggagaaactgatctacagagtgatggtccaacaaaactgcttctgctgaggtaacacatccgctgcaagccaagcagtcatagagggaaaccttggccacagctgtggacgccgctatggcattacctttctccccgcctgccgcatcttcctgtccttgtgtcatattcgggttcggcgcactgttccccttccgagcagacgtcattgcaacagcctcccttttcctgctgcctgttgcatgcataccacgatcggtaatcgcacgcccagtttcccggccgggcttcaccaaccgaataagatctgcccgcccatattccttgccgtcattaagatttgctccctggttgaatcggtcgctgttgccatagtccccagtccgtatcccacttctcccgagtcctggtactccattccctctcgctcggccactaacggatctggttaccgcctggtcattttggcgctctggtgtcagaatcgggactacgcaactctgagcaggtgccaagtagtcgtccaagtccgccagcttgacagctgcgctgaaggacgggttagcgacgctttctcgcgccatcgacatcagcaaccacaggactgggcgctaataatgcgatgcctatgtctccgtatgactgactagatgcaaaccacaagctacggtggcaaaaactttggaattaattcaaaaggcgcggcggtgaactgcgccgcgggaccgtctccagattcttctcaccatcgtccggagggatgacgtcgctggcgtacgagcaaaaacgtaggggccagaacacgaaaccgacaaaataaggctgtgcctacatactatgacatgttcttggttttataaggaaaaaaccatagtggaaagcagttatggattttgaacgagcagagaagcacgagcacgtcactcaattgcatgcgattcgcaccgcgttgctttgagtatacttcatcgcgtctcgcaacgtgcactgcattccgttttattcactactagcctgctattttgtattcaataatcagttgtcgtgcgcgacgaccatttgtacctctttgaccacatttgtcgaatgtcggaggcgcttgtgtacgcgtcagcagcgtgtagcaggccatgtatgatcgcgtagcacgcgtacagcgtgtgcacgctgcccactgcaaggacgtggagaacgaatagattcagccgcctaaaaatttgcttgtcgtgactgttcgggagacggtgtttagggttatgaaaaaacgaattccggagaaatcatcagtccccttcgggtcgcccatgttcgcctccactgtctgtacagcacaccggtacaactctacaggatatctaaatacccgacaggttgcggcagtattcgaagtggcgcggacaaccattttttctgacggttgacagcatcatttgaaaaaa

SEQ ID NO: 3218 - DNA, 1860 bp, Toxoplasma gondii
  source 1..1860: mol_type = genomic DNA
gggcaatggataggaacagcacaataggacaacgatgaggacgcttccaaagtgagggaggcaatcacaggcgcacaaagcatggccgaagcgatcatgacataactggaagttaaaccggaggatgcaattttccttgcacagtagagagatatcacggcgaactttctgtcggtggtaactcctattataaggaaccatcccctagttactagtgaaaaccatgaaagcttatgcgtatatgccctgtatactgacgttcatgcgtgtaaatgtatgtatgtcggctgtcctgagtacatggaaagttacaaatctgcgctgctacggtctccaatccagcacgcttgcacgaagcattaaaagtcagcctctcggttgttacggggaatgttgaggtcatccactgtaatgaaaattggcggtttaaaaaccccctgtggtgagagtgccgtagtgagagcctttcctcatgcagcgtacagaagcctcccaagaccatccttctttgtctaaatgacttagccgttcgcgtatggtgttcttcgttaccggcatcagcgctggtctcccactgaagatgctgcagttcgatgcggccctcgaggcaatcgttgaggcagttggaatgagccgactgattgctacgtcaaagaactctagtctctgcgaccatttctgtgcagggtgacaagccgactatgaattgtgttcgtgctggttaatccagctgtcctacagacatcagggcatgtgtctacaaggagtacaaatatcataacaatcgttttggcagtctccttcctagtgctagtctgtacgaagtagtcgggtctatgcatcgagagtacgataatcaacttggtagtggtccatctctacgtaccaggatacatttcagccacgttatggtcagcgctaccttgggattctctgcaaatcaaacaaatgatggacaaactattgacacggggatttaagtgctagctgaacccgaggcacggtatcgttgaaaaacgctgtttcttcagctgtcgtatggctttccactctccctccgcgacaggagtctgatgtcccgaatgacatttttcattgctcgccgctgtttacagtcgtatgctcctggttagcatgtcgctctcggctctgattcgccgaagagcacctcgcctcacactttggcttttttgctgtgctctcaatacgtctgcgcttttgcatggtagccaaccgttgtctccgttcccgtctcagacactgcagcatttcgtttcaggtcttctccgcacttgggttgtatttgtcgcttttatgagcctcgaaagattacccaatccgcatttctgccattcgggcgcgtagattgtatgctgcttccgtcctgtcctcagtgaacaccagatgtgagtctatttcccgccagtgtgcatgcgttgtcacatgcatcttagctggcgctccttctacagccgcacagattcccttttccctcgcgtctgtttgtttggcaagtcgtttcagttcattcctgtcgaagtcactgcacagatttgctctgtgtgtcgctggcctgcagaggatccagtcttggtgaagggtgtcgatgtccctccggacctctgaacggccctcgccagacatgtccagcgcctgttaccttatggaggcgggtcaggggctcgcctcgtgacgatttcgcctcccgaccttttcaatctagattttttcgcattttccacaagataccgacaatggcaggcgtatgcttgcactctgtctgcagcgcgagccgcctgagcagggtagttcaccactgcgttgttttcctgtcctgcgcctgctttctttcccttcgaa

SEQ ID NO: 3219 - DNA, 3994 bp, Toxoplasma gondii
  source 1..3994: mol_type = genomic DNA
ctttccacgcgtgtttctcccttcgtctgtgctcgacttcgcacaatcgcttcaactgcaacttttcccgatctgcgagcttttcaatggtgtctccgtcgaacgcctcgaactggccacacgagtcgacagccattcgctcgagcagacgcagccgctcatggtggtaggccccgcgaactcgcaacgcaatgattatgtttttttccgccactgcatgcgccagctcgtacgccgcagcttcgcctgggtctgagtgctgtcgattcgccctgaaaatccgtcaggaccggaacaaggaagatcaacgcatgcgaatctcgacacttgcgtgcaacaaagaggtgaaggaggttggtgaacctttgaaaaatccactgtcaggacgtggtactgcagaaacggtccaacacggtcaagaagagagcatcactgtggcaccgagtccttcggaacaaggaatggcccgtactctacttagtgagcacagaaacaaagaaaagggcaaggttgtcgcagaagtcccctcggtagtatgagatcgtagacgcgccacgcttcgtggaagatcatacccacatttctggctcggataaagcattgccctcttgagcgatgagagcctaacaggaagtggagcttaaatcgaataaacagagacagcacacaacctaggatactgaatatgactccactaatgagatgcagacagccgagattcgtgtgagtgctgcaagacaaaaaaggggggtcttacacggcaatgcgtctgcggcactcgtgcgcgtgtctgtagtgcattgaaatctcctcttccacgagacggagaagttgatttggatactccgtgatggcttcagccgttcgggtgaggcgaatttcctcgtgcatgcgatacaaagagctcgtcttttcctgtgccattttgccccgcaacgttttggaaggctgtccttggtttactgctgtgtgtgccgcgggtgactcacacttgcgctgaaaattgtggggaacaagggagagcgaagcgagctcgtgacacggcaggatcgcttactaatgacagaaacgatttcgaaaggtgaatgagagagcgacagaatggagacagacctcaaaagacggcggcgcaccgaggagtacgaaagcgaaattcgcacctggttcgcgagaaagagaaagagggcgagaaaacacaacggactttggtcgaagagaaagcaagggaaagccaatgtgtgaaagtgacaagatgaacgcgacacccggtcgacctgcgacatgaacacattcatcgcatgctcgtgctgtcttgtgcattccgtcggttacggacgcatgactgttcactggaaaaagtctcgtgggcacgcgttataaatgaaacacgaaacatacagatgcaagcgcgtttgccgttgaacctcctggaagtgtgcttctttctgtcggagcggaggccgacggtaggcgaccggggaagcccgtctccgaacagctgaaaatttaaaacgcgcatacctttttaaaggctgaacagagtgtgtaggaagtcgctgtcctcaacaggatatgaaagacaagcagctgagacaataacggaaagtttcaccggttctgttcaggcccggccgaacgcatgcacatgcggcacaccaacccccaagacaaaaataggcgtgccgggaaagaagccatcactcggtgagtccttgcggcaggttttgcacacgttatgaattcacaaaaaaccgttgcctcatgctaaatcagagtgacaagaaagccacaatgcagatggcttgcacgctgtggagccatgtcatgaacaacacgtgcgaaaaagtcaatgaaatatcgatgtccaggccaacgtagcatcagcttcggagtctaggccaaattcgaaaggtatcatttgtctgccaccaggcgtcagatttcctctgttgaggtaggggaggggggacccagacaagaactccctcgtgcgcaagtgtctgcatagctcgatgcggcgggatgactttcgacttccactacaactaaccgcagcaaagggtaaggctgttcgtaacgcagtttccacagtgcgcgaaacttgcatctgagaactacccgaaagcgcaaaagacgaaaaggcaatgtaaacggatttcacttgaactatagataatgccccgtagcaaactacgtgacttgggtacggtagactttctatggtcaggcattccgaatcgtacgtgctttcctaggagcgtatagccttttcgaagttaatgcaccttcatctgattggttggatgaaggcttccagttgtccatctctgggaatatgttcttccttttgattttccacccatccagaattgtagtcagtgcacagaggcatcttgtatacgtcgttactcgggttggacccgtatcgtggaagcgattgcttgtgagcacacccagtcttgacaaaataagatacatgcccgtccaaattattcgctcagagaaaacaaaaggtctacctgcgatgcggcttccaagcgcaggggcctcgccgacaacagcgtgcatcagctctttgttgcccaaagcactgaagaaatccacttattagttcgtcacggtaaaggcgcaacgattgtgtggcgagagcaacgacaaagcattcacgcaggaagcactctcgtcagttggttggcgaaacgcaatcgttaaattccggtacttctttaagtgggggtctgaaaaagcgtcactggtagtaaggctctacccctgtggctagtacctgtgtatgttggcattgtaacgtgaccaggatttcaggggaaacgcgtagagcggacacggacacagtgactgttcttggcaatatcccatattaaacttggtagtgcaccgattagcaggacgccctgtgtgactacaaacaatgtgtttgtgcatggcatagcagctatacggtagttcttgagtcgcatcctggaggagggacacatttgtgtgcattatctcataagtcagcaatgccggaaaacacggaatactgacatctccagagctgaagatactggaggcctagcggagtgaccccgagtgagtgttaagcgcagcaaaaacacggtgacgtcgcgtcgctctctccttccaatgtcggcttagctggcgctttcggtcagttcggcggatcggatttactgagttgaatgtcaatagaacttcgatccggtaaaggaataacatgaatgtctaaacgagtagtccaaagttgtttttgtagtgcgtcgaaaatctcatgaactgctgagcgcactctgcatccgaatatgcgcttctgtcttgtaacaggccacccgcgagttgccaactctgatccttgttgtcagtacaataattgagttggtggatacggttgttaagggtagtagaggtcccgagcaaacccgtcgaaatcctgaaagactgcctgccgccctcgaatcagttgttccccaaaatatactgcgtgcatccctgttcgacgcgaaatcacactctatgggaggaaaatagtagacgtcgcttctcttttaacttaggatgggcatgcggttattagacctcgggacgtttttcagttactcggagttgcagtgccggaaggccaggcagcgaatccacttcgccttaaaacttgcacttgctgtcgcacgcgcatgccacattccgaagcacgtgcagtgtctttcgacaccgttgcccatcaacgggaagtcgcgtctcccttctaccacttgactgatcggaaaactatgcacaattgggaaaatttgacagtgctcaggagaggactgtccagccgcgcacatgcagctgcggaacaccgggtctcgaggacgaggttcgatgatgtagtcctagcaatcgcttgcccgatgccctgtttctctgctaccacgtgcctgtggttgcaagaactggaaatttctggaagaaaagctggcatgtgcctggatca

SEQ ID NO: 3220 - DNA, 2936 bp, Toxoplasma gondii
  source 1..2936: mol_type = genomic DNA
atctgtgtcggaagtgcgcctttgttatccttgtgtcgggaaacataggccggggtgctaacgtagtcaaccacgcggcggtagccgtggagagagacagcagcgaggtgggtgggcgcaactctcaggtgatgtttgtgtttcgacgaaggtcgcggcatgggatctcctatggttacacagtcgaatgactgttccattaacagtcgagttcataccgcttgttcaaacgaacctcacagtgggcaacactgactttggttagtatgccgtcataaggctgcctgtgcgttatttcctgggtgtttcccgtggacgaagtacagtgttgtattatactacttcggtgtaagtcgctcttcatcatggcttgcccgcaggtgcttatttgtctacaaccaaactcttttgattcattgctgctaccacgaggcatgtgtaggcatatatttcaggcataacaccacgtatagtgcgtcaaacgagagtccgaagccgtcgaaagtatagagtcagctagcactgatcgcgccagatccggcaaaaggatgtagggaactcgaaaatttggagagccctgctgtcccgctacttagttacatcccgcagccggtgagggttgccaatgcgctggctgttagcgggaatccaaagcgtgttgagtaagaaccgaatggtgttgcttcgttgaaccctttgttttgtgccccttgttccacgagattcgcagccgggtacaagtgtaacgatagcatgtggtgggctccctaaagcgtctaggtctaaaaatgctgcacattgcctcctgcctgcacacattacatttggctgtgaaagacctcttggagcagactccttcaggaggaactaatcggtgtcgtggcagccattccaggtgatgcggtcacgcctgaacgagatgctatctgacgatgagcagccacctggctcaccaccgcaagtcctgctgctctcaaaaatcgtggaaattcttgacgaccaaacggatccatctgccaattttgccactagctcttgacctgatgaagattgtcccatctgccgatgtggtgacagtttttggtatctcttgcttctcctgaaatactacgtcaatgtcgtagtgtgatagtgcctcagttgcaattctcagtcatccattgagtcccggcccgttaacagcaggcgtttttaaagcaaaggacaggttcgattctagtcgagtcccgcagtacactctgtttaactcgccatggtagcttctgttatcgtctaatcttcactttattgttattctacatatatacggatcgttctgccgtagtccatatttattgttgcttcatggtgccaaactagaccggtaagtcgcagccatagcctggcgtcggacacctgcttgtgcaatgtcgattttcagtccttcattcagttagaggtctagggcaggctcggaggtgggaaacgctttccttaaacagctgtatgccgttaaaggaaacaataggtacttttgatgcttgacgagcaagtagcttggcggctgaaccagtcgttagcagcgtccctccacttcagttctgcgtaccaccacaccacaaactgagttattatttatctcggcagcaatggagaactactatatctcaacaaaaactcagaataagcgggcatctacaatcacgcacagtcgtcctcaacactcactcaattccggttgtagttggcatatatttgcctttctgattaacgacgctctctctattcgtgatcttcgtgagtggtcacaatagtctaaacatatccggtgtctcacttgtggttcgtctcaggtttccttccaggttctcatcattgagcgaatatggcgtgccttgcactgttcctctctcacccactgcgtgtggtacctcccttcttctttcccaccacacggcggtcccagccgccagcagacatcacgacctaaaactcatcttcgattcaaggcgccgtttgtctatttttcaatatgttagcttggacccccttatatgccctattcaccctaggagtaaacgtctgggctctgctcagatccctggtgaaattcctaaatagtcaactgtgccagaatcgggcgtggatatagttcagttgctttcgattcttagactgcaacgtaatatttagcggtcctaatcctttttctgatttcgtttgttctttacggtatgctgcgagatctaccttgaatagaacaccgacttgacaccagcacagttctgctgagcagtaccagactaccttagcaggcggctgctttttacctgagtggaaacagtgaaataacaactgaactgccaactcgagaggaatgtagaattgattccggaactctcccccaccacacgtacatgcatacgcacatgactgccttccgccccgcatgcaacatcatcttgatgcacccccacaactaagtgaaggttaaacaaaaacgtctcgccaagccccgtccttaattttttgatctggtgaaatagcgaagacggcgggttatttacacctgtcgtctgagtatacgccaactggtgtgtggtcaagtacgctgtggctgcgaatcgttccagcttcggagaatcattcgcaacactagccgagatcggcctctggcagcggcaccgtgctcgctttcaaacagtccttccgctgccctaacactacactcaataattcgtcagtcgtgatctaggcaccgatgtatgactcgtcaagttcgtcaaacttgttgctttcaacccacaactgaaactgtcccagacaaagtcgagcattatttcgtccgtttccagaactctcgtcacgtcgcagtcatctttgatagcccgatctgtcacgaccctcgaccggaggtgtctcagttctacaagcgaggtgtttcaataagggaaaga

SEQ ID NO: 3221 - DNA, 3589 bp, Toxoplasma gondii
  source 1..3589: mol_type = genomic DNA
ctcgtcctcgatctgcctgtcctgaaccgacaaacgcttctgccagagtcttgtcgcagggacaggccgaagctgtctcggcgctcccctcagacttccatccctccacgtcgtcgattcatgcccgcgcctctcttgcaaccggaggaggagcgggagaagcagcctctttcagcgtctcttctcaacaccgagggcctgcgtcgggggtcaaggaagtcgaaagatccttcgctgccctctccggacccccggagacgtccccgcgggtgtcgccgactgttgccgttcgacgggggtcgaccgaggcgcccagcttctctgcagactcgccaagcggctctggaactcgttgtgattccctggggcttccaagctttccaccgccagcgggaaacgcagaggaaagagggatcgactgtgtttcggtgtcgagggtcggttctgcggtctcacaaccacctggagaaatctacagtggaactcgagagggagaggaaaaggaatgcaagatacgtcggggcttctcgcccacaagcgacctttccgagccttcagacagacgccagcagagtcagcaaacaccttttttcggaattagctgcagtagcgatggttcgcggagcgaacttcttgggtcctccacggggtcgctgtcgaaagcctctcccgaccacccgaaggcaagcgccacgcctgagaaattcgactttctttctctctccaaacagtggctcccgtgcgccggaaaagacgtcgaaggtttcgttgccgctgctgcggcctcggcctggggcagcagtgcacacgagaacatatgatggctctctgattcacctactgttgaacgttcttggcatttttgtcaacggctttatatatatatatatatatatatttatgtatgcgcatgttcatgtgacccttgtagatgggaaaacgtgtctgccttgggagcagaagggatgcttaaagtctggacaagggggctggttggcgaaccggggttgatgagtgtgtttttgcgaaggcagaagcggaggaatgtgtcgctgtcagctggagagttttttcttcaaacggtgcatgtgctaagatgcaaatgaaaggaaggtgagccccgtgggggcgcgaaagggcttgcagggcgctacagaagggtcgagagcaaagcacaatcgttgcattctacgtcaatttggctttttcgctacagaacgaggcactcccagccacgtcgaaagaggacactaaggtattttacgaagacaacaactttccttcacacgcggcaatccccaccgcagacgaatgcaaactggaagcggagcagtccagcttcctcgatggctggccacttactatttttgctttgatcattttcacggacttctccggcaatgcaggaggctggaatactgcgggtaaatccactggagcgtctcggggctgtaacatagtcacggttcctctattttcaaaccccgttggttgttagagcaccagtccgctgtcatgttcaagacgctcgagaaaacgagttctttcgttattcctgcggtgaaaataaattcagctgacagccgcaaggtcagatcggtcgaacgggcacgaacctaacactgagcagaggcgtttattcccctcagacgcaggggatgcaaaagcgcatttgcgtgagacgcgagtgtgatgatcgattaccattggctctgctcggacagacggcatgcggttctttctcaaattcggaaccccagtgttcctcagttgccttttatcctcgtacgtcatcgacggatgcaaaatgtctatcgcatttcgttgaactgaactgcttacaggcggctttcggtttgacggaactttcaaaatgcagtacctgtccgtcggttcgtacctcaaaccgtgtatttaccggatatatacatatatatacgttattgtaggagtagcgaagcttacagaaaagcacatgtttttatcgaaaatcttttcaagacacgtgtgttttgccatgttgaaagaagcgatctggggttttcactcccagtgtacgacttcagcaaaaaatacgtcttgagaggagtcctaggttccttgcggtcaacagttaccacccaattcaaaacagatactttgagtgactaagacagaacctctctgtcgcgccgatcttttttgaacttcggtgcagcggcaaactgaaggttacagcgtccgtgtcggtctttgtcgagacacagattggaagaagaatttgcgtgctgttcaccgatattaatcgcgttaccgcgtggttctaaagtcaaacgagaaagacaaacaaaagcgcggtaccggctgggatcgaaccagcgaccttgtggttaacagccacacgctctaaccggctgagctacggaacctgggactcctctgttgtggtgccccccccaaattctgtggaagcagctgccacggaatcgagtttttccccatcctgcttgccccccctgtccaagtttcattggcacatgcatgcaggattgttctcccggtgttggcaatctcttgtccagtacttttttttcaaagcccctatttttcctctcggagtctgtcccgagtctggacttaacacggtgtgtactcgctgccactccgctggagaccgcgggtggcttttctcctcgctttgtttgtggagaatctgagcctcgcggtgtccactggaagaaacataagcaactgtttccgccagcttgctgtgtattacttttccagtcaatgtttgtttgagatgtgtacaaactgccgtctgacccctcgcgtcaagcaccacatcctttgccgtacctcgttgcttttccttcggccgcggctcttctccggaatgcacctattctactgaatggtctaacatttagcgacaaactggccgtttcagcgaactcttcaaggcagcagtcagcacttcttgggggggtgctgaggaaagagacgacggaacgccacactggcacaccgggacactctctgttgatgtgcctgcagccccgtatttattccaaaaggcatgctcgggtacccgccagctctacatttaattcgcttatgcgggaatctccgttcaaggtcaaattcgacgagtaacggaccgaaacgaatctctcagacgaccgcgagaatctcatctcagaattcgttccggcggtgtctgtacgcccgagccccaggctaggtccgtgatcgttggacaatgtcagtgtggcatttttcgtttggacctccggatggagtagacccgtagaatgcttgtttgttttcgctggttcaccatttctaggcaagaaatgttaacagcaataaggcctgcccgtggtgtgtctcccgtgggtcgcttcgtcgcctgagcgctgcctccgcccgaaggaccccagtacttcacacccctcggaaaagtgggtcaacattctgcactgcggggaacaagattagcgtttcggcttctccccactttttcccgagcaccgcgggagtctctgtttgccttttgcatttccctccaccctctctctccgtctcgcgtcccctccacgtggtgcaa

SEQ ID NO: 3222 - DNA, 2477 bp, Toxoplasma gondii
  source 1..2477: mol_type = genomic DNA
agctgcttggacggtctccagagtcgtccggtgtttgatcttcttcgcgacggccggtctcaccaattggttgccgtcgaattcctctgcatgtgtggcacgaaggatcaactctcccgccgtcgcgcagactccgtaaggacgcccaggccagacgaaggagacggccctcttcgtcctcaggctcggcgcatgttgcttcttgctgtctcgcctcagacgttcctgtgacaccctttcgccacggatctgtcatgcatcgagaagatgtcaacaaagcgaggcctgcgcgtttctctgacccctgcgtcttccgctctcttcgcgcgtctcgtcttgcttcctcgtctgcactctcacaactttgccctctcttccgtttcccccttcggcgctggccgacagcacctgtttggaaggcagtctgaggggagaaacgcgtcctgaagtctcctccgtcgccgttcttcatcgtcgtgctgtgaacggttccgagaatccgcagcgatacaaattcagggaagacatccttctacggttgcggactgccgcggagctgtcctcgcaggcaggccttccacgaagcacaggaaaacgagagcgcgacaacgagaagctgcaacgaatgaacatgaaagcagactcgaagagaaagaggaacgaggtggcaaggagaaagtgtgaggagcgtcgtgtttacttgtcaacaaagaacaagacggagacgagtctcaggacaacagctactctttcatagctgtctggacgcagaaagatccagagaaggtcctctcacaatttttcaactcagacatcgcaaaggcaattactcgccctggttgcgctgacttttgaccgcgtttcgcttcttccagctgtgcacccgcagtcctcgaaactgagctcctgggcgctccctgtgccttcccagccgcgattggctttgtcgataccgttcaatcgtaggagccgcgtcttcttaccctgttcgcggcatccgccgtcgagtccactttgtttctctccgttccgctctgtctcgcttcccccttttcggctgagagtcctcggacatagagtttaacagctaaaacaacaaccttccaagttaaacttacgagttccaatctcgtaattggctatatcgctgcgcatgaagtgctctcgcgcccgtcgcgcctctctcagtcgtcgacgtcatccctgtttgtgtacaacttttgtagctacgcggatcccccgcttccggcaactcccctttgcgcgtttccgtcgccgttttctcttggagacacgcgcggtcctctctgtttctgggtcgacaccgcacgtcggtcgagcgaaggcggcgacgcggcaaaaagaaaagaactaccttgaaaaccgcgagcaaagaccggccgcgggccggacggaaggctgcgcgtcgacgccgacacgcaaaagcggaatagaaaaaggggaaggagacgcataggcagctcgacagacagagaatgaccatcagatccagcaggacggcaccgcacgcgccgtttacttctttccctggaacatgaatccggttgtgttcgtgagtctggctgttggtttggcgacgagaagtggagagtctgcaaagagagtcgagctgaaaaaaccggaccgcttcttccgagatgaggagggacctcgacgcatgggtgtgtttctgagcgaatctgcgtgtttagatgaataagacgtggcggcaagcgacgaacggacgaaggcggaaagagtctagctgtcgctcccatcgcacgcgaagtcggcgcggccgagagggcttgtgcgtgaagtctcattcagcagaagcgagtatccgagtatctcgcatgcagttttgctctgtcacgtgtctgtctctgtgtctccgtctcccttcctccttctactggtccttttgattttttcagttcagcggagacgctgtacgttcggactcagtctctttcaggcgggttttgcgtttcgctgaatccgctattccgccctctcgagacttcgatggttggcgatcgacacgtttcctgaattgtgctcgcgcgacttttcgccgtgtgtgtccccttttctttgtcgcgccttggcttgaatgatggaaagcaacggaaacaaacacacgctggtgtcgcatatccttcctctctgttcccactttcttgaggaacgcttagttctccttttccgtgattgggcttggatctcctctgcttccgttctgcagtccagcttcggcgtgttgccattcgcaagtgaccgagttacagacgagtaagacacacagattttacacgaggactccaattatgttaacgcagatctcgagaacgcttttcgcgaccgcctggtgctttagttctcctgataacgaagaaacaccctttaacgaaccggcctgtgttgcttgtcagatttcccccttctgcacgccccttggtcccgtcactccacca

SEQ ID NO: 3223 - DNA, 2482 bp, Toxoplasma gondii
  source 1..2482: mol_type = genomic DNA
ttcaagagcggctcgacttcgacgagggtgtacgggatgttgaggaagtcgaggcaggcccggactttcctgcagaacgggcaactctcgaactgcaggagatacactgagcagttgctttctgagccgtctgccgtttcctgtgttgctgcactttcgacgcgaggcagctggaggtccctgggcagaaagcgcggagacagctgaagcgtctgccggccggaagcctcgtcgtctttgtctccagaagcacccagcgaaggacgagacgaagaagagagaaggaagcgaatgagaggcgcggcatccgaagcagtggagacaacgacaggctcgggtggcttggaggcgctcgggaacgcggcaggtggaggcggaggcaaaccgatgccttctcctctccctcctggagcagcctgcgcactctcacgaggaaaagaagcgacgacaggagaagcgtccgcggacgagacagggggaaaggtttcgcagccttctggctgtgtgcggcaggcggcaatttcatggcgaagggagcagccagaagcgaggtggaggctgcggggctgcggatttctgattgctctgcttttcaagaggacagatgagacactgctgagctggttcctttccgtggagaggactcgtgccgcaaaggtggaggacggtgcggaggaggcgcgatgagaagagaaggaagacgacagacgaggttggggcagaagacgcgagtcgagagaactactcgagagtggagactgaagagagagaacggcaggcctctgtctgtcggtggggcgcgacgaagaggccggcgccagctgcccgccgcatgtatgtgcagcagctgagactgctggaatccacatggcgttccaagagagcagcagagaaaagtcagatctgcagaagaaaagacctgacgtcgcggaggctccgcagcgaagctagtgtgtgcgcgagcaacgcgcgatgaggaagcgaacgagcagaaacgaagtctcgattctttgcactgagaaaaacatgctcaaactgatgtgtgcttggagagagatacatagagacgatgcatgcgcagaaaaatggtagactcatccacatgattcgcgttctcccgtacatctgcatgtccgactgatcaacaacttcgtcttccgttgctgcaacgcgcgtttttccgctaagcagttggaaggagtcttccgcgtaccaatgcgaagactgtttccaacagcgactccatcgttttctagatctttaccgatgcatgcgtttgcttctttggccaagattgtcttgaaaaccaagcaacgtcgcccgccccgtctccgccgtggttttccaagtgagacgggagggaaagctccgcgagtcgttgcattgcatgcgcgagaagcgttccctccttttcggtttttattccaggtttctcggtttctgtcccagcttgcgcttctgcgctctttagcagttgctcctccgtcgagagactgccatttctctcgaaagggcgcgacgcgagaaaaactccgacgcgctccaacgacgaagtcatgacatttgtgtgtttcattgcagtgaccgtgctctgctactttacgtcgctggtctttgctcgttcgtaccttttccgcgagtctgactccgtcaaccacatccgcgcgcgacgccagacttctttgattcttgttttcgcggaaagcatgtgccagtaccttctctccgtcttctgatacttcgagactccgaggcggtcgacaactggagcaacgcgaagaaaacgcgtcgcaggggatcgtccgttgctgccgtgaatgcacactggaacaaaaaagctggcgaaaaattcgagaagatcaggtttcctcggcacacggaagtctcgctcttgagtcgaatttcaattctgcccgcgcatatttgcgtctggaccgagactcgcgattcctggcagcgtcgctcggatgtgcattcacctcagtcctcccgcgttttcgcgctcggtttgttgacacactttagctttgctcagcgcgcattccaggttgttaagtctcggagacttggcgcctccttgtgagaactctttctctgcttccaccacggatgttccccattccctgcctcctgcttctctccatttgcggttgcgtcttcttcgcttcctgaagccgctggcgagactgccttccacgagcgcccccagtctcttttccgcgcctctatcgggatgagctcgcggaatcgacttggtttcatggcctcaagagcctcgtgaggctttgacaacgcgcaggcgggcgtcctctatctttcgaccttcgcaagacatcacggccttgtcatgcaactcagcctcctcgtctcgtctgtttttcgctgccggtcgaagcaatctttctcgccgtcttcagactctccactctcttctctctcggcctctcccctcttttccaaacgtaactcagactgcatgcaa

SEQ ID NO: 3224 - DNA, 1811 bp, Toxoplasma gondii
  source 1..1811: mol_type = genomic DNA
cgtatcttcgtcatctcaggagtttacgagttccaggagagaacgaggaaacatgtgaaaaacgaacaaggagaaagcgagaggaagcacctgtgcagacctatctgtcttctctgtcaatatcagccctttcgtcgacataaatatataaacatatatgtaaatatatacatgtgtatatatatatatatatgtatgtatatgtgtgcatgtctatatgcgtgcatgcatctaaaaaatgtgcttacataattatatatgtatatatatatatatatgtatgtgtgtgtgtgtgacatccgttgaagccctgaagacctcgaattggatggagacactggtggacttggactcctgactgggactccgtagaatcgatttatggtgaccgccggaaacagctcctcgaactcttgctctccctctcatgggagaagctcggaagagcgatttgagaagagaggactggtggccgccttcctcagcgaagcgattctcggaagccgcgaaaggtcatcctgaaatcttctttcgccacgataagcgcctgtttccctcagtcggtgaacgcagcagagaagtcgcgttcttcagtgtgcagtagtccaacagcggaccaaagtcgtctttgcgacctcgtacgccttaacggtccgaacttctgagcagagtggtttaagtgaatgtgtgtcgatgtggaaagcgtcgcgtcgatttctgagtttgtgctcggaggtccctgtatttcacttgcgtttctctgagtgcgtatctttgaattcctacatgttcacacgtggacacccgcgaataattctttatctacatacaaatatatatatatacatacatatatcgatagatataaacagatgtagctagctacgtatagatagattgatagatatagatacatatagttacagatggatagacatagatatgtgcgtttctgtagatggacgcgtagaactcgcgcaagctgcggagaagcgtttgggtcacaagcaagagacccagcaacaccgaaaggcgttcttcttttcggctctgcacaggcactccacgcgagagggattttgctgtttctacagacgcaaaggtcttcgaccaatgtcgagtttcgctcgaccgttgctgcttcggagatctctgcgtaaacaattgcgcgcacccccgcgaaagctgtcgacgttcacagagaaagacgcagagaaaggcagagagaaagaccgagccgccgagagagagacgcagggagagagaagaaacagagcgagaaagaaagataggtgaagggagatgaattgagagagagggagagagcgagaagcagaaggagacagaaagagaaagcgagagagacagagtaggacgaggcgcagagcggtccgtccaggagagagacggcgagggcggaggaggtcgaagagacatgcagaaaaacgaagacgcgttcattcggcgagatgttgaaagaaacctatttttttgagtttacgaatatgttttgagatccggccatctcagcttcgttgcgccaccgcaaacgcgctatacaccgtctcccgctggacctggcccgcgcgcgttgctgacgccgtctctgatccttctggagtgaagcgcttcgcatcactttccccccgtttttgacaagcggtttgtgtcaaaactttggtttttctcccacagacgttgcaccttcgtctgccctcgctctcttcggtcttcctcccttcgtcgtcgctccacagcgccgtctgctgcctcctcctttttcttcttttcctgtttcgttttctttacca
